United States Patent Application Publication US 2020/0377945 A1 - sequence listing, part 53

SEQ ID NO: 11772 - DNA, 30922 bp, Unknown
  gut microbiota DNA sequence
atatataatctgtatatcagataattacttgctcaaagcctgagctacgtcaaccgcacaagctactgtacatcctaccatcgggttgttaccaattcctaggaatcccatcatttctacgtgagcaggaactgatgaagaaccagcgaactgtgcatcagagtgcatacgacccatcgtatcagtcatgccgtatgaagctggtccggcagccatgttatccgggtgaagagtacggcctgtaccaccaccggaagcaactgagaaataaggtttgcctgcaagaacacgttctttcttgtaagtaccagcaaccgggtgttggaagcgagtcgggttagtagagttacctgtgatagatacgtctacaccttctttccacatgatagctacaccttcgcgaacatcatcagcaccatagcatttcacttttgcacgaggaccgtcagagtaagcgatttcgcgaacaactttcagttcacctgtaaagtaatcgaattgagtttgaacataagtaaagccgttgatacgagagatgatctgagcagcgtcttttccaagaccgttcaggatgcaacgcaacggttctttacgtactttgtctgcttttgcagcgattttgatagcaccttcagcagcagcgaaagattcgtgacctgccaggaaagcgaaacatttagtttcttcgcgcagcaacatggcagccagattaccatgaccgataccaaccttacggtcgtcagctacagaacccggaatacagaatgcttgcagaccgataccgatagcttcagcagcttcagcagcatttgtgcagttcttcttaagagcgatagcagtacctactacataagcccattttgcattttcaaaacagataggctgagtttcttcacacgttttataaggatcaagtccggcagcttcgcagattgcgttagcttcttcgatatctttgatgccgttagcgttcaaggcttcgataatgcctttcatacgacggtcttggctttcgaattttacttctctaatcatagtttctttcctccttatattattcgtgacgtggatcaatagatttaactgcaccctgttctgctgttacgcgtccataagttcctgtaacttttttcaaagcttcgttcgcatcggtacctttcttgatttcgtccatgaacttacccatgtgtacgaattcgtatccgcagatttcgtcgttcttgtccaagaagatttgtttgatataaccttctgccatttcgaggtaacgaggacctttagccaaagtaccataaagagtacctacctggctacgcagacctttacccaagtcttctagacctgcaccgatgatcaaaccaccttcagagaaagctgattgggtacgtccgtaaacgatttgcaggaacagttcgcgcatagcagtgttgatagcgtcgcaaacaaggtcggtgttcaatgcttcaaggattgtttttcccggaaggatttcagcagccatagcagcagagtgagtcataccggaacatccgatagtctcaaccaaagcttcctggataataccttctttaacgttcagtgtcagtttacaagcaccttgttgaggagcgcaccaaccgataccgtgtgtcaaacctgaaatatcaacgatttctttagattttacccatttgccttcttcgggtatgggagccggtccgtgattaggacccttctttacaacacacatgtgttccacttcgtgtgaataagtcataattagctcttttttaagtgatataattaaaaatacgtagtcacgattctctaaatcgcccacaaaggtagtcgatttatttgtttctgcaaaccgccttttattacttttttgtgaaaagagataaatccctttatgtttttctcagtttgtaaagtcgggattgcatttgccgaactactgctattattgacattgtctattaagggtaaacttgttttcttcttatcgtaaagttcttttcacttaatctctaagttgctttagactactgctaaactgtaaacgaaggcttcgtttttataaacgcaatcttcatttgtataatcaaagcctttgtttttataaacggaactttcatttatagtttgtatgcaatcgaagtaaattaattatcagttgaaagcaactttgtctatgctggagtgagacttatctggtaataaataaaggtgatgaacgtgtcgattttcggaagagaatagcaggatatatttgttaaatggtctaagtatgatcatttgtgagccgaaattgaagttttggtggagaaaagtgcaattcttagaataaacggataaaagatgactttttactgaattgattgattctcaatatgatagtttgatgtggcgaacgttgaaagtgataatatagttcgtttgtcactttattatcatcctattgtcagtgtctattgtcatttttatctttcttattatcagttgattaactcgtgaaaatgacaaatgacaataaaactggcgttttaaaaccttatgtagatattagcttataattcgtagggctgcaaatttatttatgtttttcgtacttggatataggatgaaattcgtagctttgcacatcatttatttggaaagaactatgatagaagtaatggagtccgctttgcaaaaagctgcgggtgagggaatggatgaattcatccaagtgtttaccgataaatataaggaggtgattggtggtgaactgactgccgaaactatgcctttgttaacgggggaacaacattctttactcgcttatcagatttttcgtgacgagataatggttggcggattttgtcagttgattcagaatggctatggcggatatatttttgataatccgtttgctaaagtaatgcgttcatggggagcggatgagttgtcgaaattggtctataaagcaaaaaaaatatatgatgtcaaccgaaaagatctggagaaggaacggacggatgatgaatttatggctatgtacgagcagtatgaggcttttgatgagttggaagaggcttatttggagatggaggaacaggttacggcattggtcgcaagttatgtggatgaccatttagacctttttgcaaaaataataaaatgatgaatgcagtattttttaagtctttgcatttagtaagtgtgaatcagaatttatatctttgcaaaatctaaaaaatatgtttatgaaacagatgaaatttttattggtagctttgatggctgtggtgatgagtgtgtcggtgacttcttgtatgaatggagaaaataatccagtttatacagggttggctgtagctgaatgtgttagtacatatcctgctactttcgcagtctcaaacaatcagaaattagttgtaaaagatgcgaccttgcttgacttaaagtatgggaaaacgtatatgttttattatcaatttaatacagaggaacaatctgtttctgcagcttcaataactgtgacactctatcaaggaagtgctccggtagcaattgatgctgatgatgacgagggaccggtggcaaactctgcggattacgaggctgatgcagcattgtattctttgggtacatctttatttccatcttcttttttactttataataaaaaattgctggttccctttggttattgggtaaaagtagaagaaaatactgataagcaaaaagaagaattgaataagcactcttttgttttaacgtatgatgttactaacatagcaagtggtgcgaaaacatttgaattgacacttaatcataaaattagtgacgcagaaggtgagaaagttactcgtgacaggtgggcggaaggctataaagtgtacgatttgactgcagctataacagcttttagtgaaaaatcgggaacagtacctactactataaaaataaagacgaaacttaatacatctactggcggctctttggaaggggcgatagatggtacgaacgaggtaacttatactactgaataacattgaactacaaagaactatttagcatagcaatgaaattgatttcctctccggctaaggcttgggaggaaatttctatggaagaggataggcgaaaagtatatatggcttttgtttatcctatgattggtttatgcggtctgtccgtattcattggttcgttactgaccaatggatggggaggtccgcaaagtttccagatagctatgaccaattgttgtgccgtagcggtagccctgttcggaggctattttctggcagcatacgccataaatgagatggggacgcgaatgtttggtatgcatagtgatataccattggcgcaacagtttgcaggatatgcgcttgttgtaccattcctgctccagattgtaaccggactattacctgattttagaattattgcttggctgctgcaattctacatcgtatatgtggtatgggaaggagttcccgcattgatgggcgtagaagaaaaattgcgattgagatacacccttttctcatctgcgttgttaatactatgtccgacggtgattcagattgttttcaataaactgacagccatacttaattaaatgtgtgaagatgaaacaaccctctgtaaatataaaaaataaacgggctacgtttgattacgaactgatagatacctatacggcaggtattgtgttgacaggtacggaaatcaaatccattcgtttgggaaaggcaagcctggtagatacgttttgttattttgcgaaaggcgaattatgggtgaagaatatgcatattgccgagtacttctacggttcgtataataatcatacggcacgtagagagaggaagttgttgcttaacaaaaaagaattggaaaaactccaaagggaaatgaagaatcccggctttacgattgttcctgtgcgtttgtttatcaatgagaaagggttggcgaaactcgtagttgccttggcgaagggtaagaaagaatacgataaacgagaatcgatcaaagagaaagacgaccgcagggatatggcaagaatgttcaaacgatgacatgataggataaatgaaaaagacaatttctcagattgtatccgaacgcatccttatcctagatggagcaatgggtacaatgattcaacaatataacctcaaggaagaagattttcgtggtgagcggtttgctcatattcccggacaattgaaaggaaacaatgacctgttgtgtctgacacgcccggatgtgattcaggatattcaccgtaaatatcttgaagccggtgcggatatcatcgaaacgaatacattcagttcgaccactgtttctatggctgattatcacgtggaggaatacgtgcgtgaaatgaaccttgccgcagtaaaacttgcccgcgaactagccgacgagtatacagcgaagaatcccgaaaaaccgcgttttgtagcgggctctgtcggacctacgaataaaacctgttccatgagtccggatgtcaacaatccggcttatcgcgctttaagctatgacgaattggctgcatcctatcagcaacagatggaggctatgcttgaggggggagtagacgctatcctgattgaaaccatatttgatacgttgaatgctaaagcggctatttttgctgccggacaagcaatgaaaacaacaggtgtcaaagtacccgttatgttgtcggtgaccgtatccgatatcggtggaagaaccttatccggacagacgttggatgcgtttcttgcttccgttcaacatgccgacatcttttccgtcggtttgaactgttcgttcggtgcccgccagctgaaaccttttctggaacaattggcggcacgtgcaccttactatataagtgcttatccgaatgccggtctgccgaatagtctgggcaaatatgatcagactcctgcggacatggcccatgaggtgaaagaatatattcacgaaggattggtcaatattatcgggggctgttgtggaacaaccgatgcttacatagccgagtatccggctttggtggaaggtgcgaaaccccatattcctgttgccaagccggaatgtatgtggctctccggacttgaactgctggaagtgaaaccggaaatcaattttgtgaacgtcggcgagcgttgtaacgtggcaggctcacgcaaattcctccggctcattaatgagaagaaatatgatgaggccctttccatagcccgccaacaagtggaggacggagctttggtgattgatgtgaatatggacgacggactgttagacgcaaagtcggaaatgacaactttcctgaatctcatcatgtccgaaccggaaatagctcgtgttccggtgatgatcgactcttctaagtgggaggtaatagaagccggattgaaatgccttcaaggtaaatcggttgtcaactctatttctttgaaagaaggggaagaagtctttcttgaacatgcccggattgtcaaacagtatggcgctgctgccgtagtaatggctttcgatgagaaaggacaggcggatactgccgtccgtaagatagaagtttgccaacgtgcttaccaccttttagtagataaggtggggttcaatccgcatgatattatctttgaccccaacgtgcttgccgtagctacagggattgaagagcacaataattacgcggtagattttatcgaagctaccggatggattaaacggaatcttcccggtgcccatatcagcgggggagtcagtaatctttctttctcgtttcgcggcaataattatattcgtgaagcgatgcacgccgtattcctttatcatgctattcagctgggaatggatatgggcattgtgaatccgggaacctctgttctgtatagcgacatcccgacggacgtactggagaagattgaggatgtcgtgttgaaccgtcgtccggatgcagccgaacgtcttattgagttggcggagtctttgaaagcgaccatgaacggaacaaccggacagacagctgtcaagcaggatgcatggagggaggactctgttcaagaacgtttgaagtatgctttgatgaaaggtatcggtgattatctcgaacaggatttggcggaggctttgccactctataataaagcggtcgatgtgattgaaggtccgttgatggatggaatgaattatgtcggtgaacttttcggggcgggtaaaatgtttcttcctcaggttgtaaagactgcgcgtaccatgaaaaaagccgttgccatcttgcaacccatcatcgaatcggaaaagacggagggaacgacctctgccggaaagatattattggcaaccgtgaaaggcgacgtgcatgatattggaaagaatatcgttgccgtagtaatggcttgcaacggttacgatattgttgatttaggagtgatggtcacagccgaaaccattgtgcagcgggctattgaagagaaagtggatatgatcggattgagtgggctgattacgccgtctctcgaagaaatggctcatgtggcaggtgaacttgagaaagcgggattggatattcctcttttgattggtggagccaccacgtcgaagatgcatacggcattaaaaatagctcctgtctatcatgctccggtagtgcatttgaaagacgcttcccagaatgcgggcgttgccgccagattgttgaatccacaggcgaaagccgaattggtaaatgagttggaaacggaatatagagcgcttcgtgaaaagagtggtttgctgcgtcgtgaaaccgtctcattggaagaggcccagaagaaccggctgaatctgttttagcattctgtataagaaaaaagatacgttataatcagtattagtaagcaaaagttttgtcttttcgataaattccttacatttgcgttctgattaattcatatctaatacgtaaatgtttggaatagacgacccttttatcattttgccatacctgctttcagtggtatgcgtggtgtttgcggcctggttcgggctggaatgttggaataaggacgacgaaaaagacgaaacacgatgaatacatttatacttggactgattgtggtagcctatctgctgtcactcgcttatttaggctttctgggatataagaaaacgacgtctgccagcgattatctggtaggtgcccgtcagatgaatcctatcgttatggcactttcctatggggctactttcatttcggcgtccgctatcgttggtttcgggggagtggctgctgctttcagaatgggaatccaatggctgtgtttcctcaatatgtttatcggagttgtcattgcctttatctttttaggtttgcgtacccgacgtatgggggtaaaactgaacgtgagtactttaccgaagccaataaggaattgacggcaattgctccgttagttccggaaaagttcagggtattgggacatcaaggttggagggcaatgccagtgaccggttctccgcaatggtattcattggttacttcccttattctgggagtgggaatcggttgtcttgcacaacctcagctggtggttcgttttatgactgtggagagcagcaagcagttgaatcgcggggtgttcatcggttgttttttcttgataataaccgtaggagctatctatcatgccggcgcattgagcaatctattctttttgaagacggagggtgcggtagcaacggagtatgtctacgctcagttcataattccatacgatgggggcttccgtcggttccgatatttatggaacgtacaaaccccgttcgcgtgataagttgactaacgttattcgtcttggggtactgttttctatcttggtcagttatattatttgttatatgcttccgcatgacatcatagcacgtggcacttctatcttcatgggaatctgtgccgctgctttcctgcccgcctatttctgtattgggtatctgtaaggcgctgtttggcagggatgtgctgatctccacctatcctttttcgatcatagatccgatattgtttgcgttgcctctgtctgtgttggctattatcggagtcagcatgatgacctataagaaataagtattacgctttgattttctttttgtaggattcatagcgcgacaggatgtcacggacaaaattataagtttctatgccacgaaaatatccgtttttacagatcgggtcggtgaagtactcttcattgctcttgagcaagatgaagttttctacattgtctttccataccagtttgttcttaccgtatttctcggccagtgccatcgcatcataaatatgtcctaatccggcattgtaggaagccaggataaaactgagacgttcctgcttatcgggaatcatgctgagactacggtcggtagctgcgatatatttgactgccgctttgacgctttcttccggattctgttcctttccgggcggaactcccatagcccgtgcggtagcgggcattaattgcatcagcccttttgctccggcccaagacacggctgtggtatcgaaattggattccgtgtaagccaatgaagcaagcatacgccaatcccaaccgatatctttggagtacttcttgaataaatcatcatagtgcgatatcttcccctctcttagtgaaaggataggagaatggggcatcattttgctattctcgaagtagcgtttcatactggctgtataggcaggagaggtcatattttcctcatgccatttggtggctgctgccgccagctcgggacagtcttttctcacagcccatgatgaacgttggtcaaaactgatagacaagtcaatatttaagttgggataatacgttttattaagcttggccaaatcgttgtcggctaccgtgtatggaatcttgccttgtgctacttgtgtgatcaggtcttcggtagtgatactgtcattggttaccttatggatttgaatgccgcctcccaattcgttgttcaggttgacaagacggtcgtaatactttccgggctttacatagatatctttccctatcagttccgttacatctttcaagggtttttgttttccttttccctgttgcacaataacctgatgggtgatgatatcctcaccgcaatagataaggctgtctttccattcctttgttacgggtagattgtaggcaatcatgtctccttcgcctgccagtaatttccggatcagttcatcgacactgttagctacttcgatcctaagttttaatcccagacttttggcaaactgaccgctaagttcgtattgaaatcccatttcctgtccccgataaatgaagtaggaagtagaactgtatagtgtcaatacgaccagttcgccgctgtcttttatctgcgggaggtcgtatgcgttctcgcttacaggattgggtcgcgtgttcttacatccgaacacgcaacagaataatataaggaataaaggaataatcagtgtcctaacgcccattctttaattttcaatttttaattcttgaggtgcttcttgatatacattgtcagaatatcaatagctaccttattgtttccaccttccggtacaataagatcggcataacgcttgcaaggttcgatgaattgtagatgcattggtttcagaacccgtgtataacgttccatgaccgcttcggcagtacgtccgcgttcaatcacgtctctttggataacacgtatcagtcgttcgtcaggatcagcgtctacaaatattttaaggtccatcatgttgcgcaattttttatcacataaagcaaggattccctcaatgataaccacttcgcgaggttcgatgtgaatcgtttcgggctgccgtgtacatgtaagataagaataggtaggctgttcaatgcttttcccttctttcaacagcatgatatgcttagatagcaaactccattcgaaagcgtccggatggtcgaaattgatattctgacgttcttccaccgggacgtggctgctgtctttgtagtatgagtcctgaggtagtaacaccacttctcctgtggggagactttctatgattttccgtacaacggtggtctttccggaacctgttccgcctgctatgcctattattaacatctctttaagtatatatttaaactaaatggagtaaatttgcattgtttatacagtatatagaagacaaatatagaaacaattcattaaaatagcaacggtaatggtaaaacacattgtattatttaagttaaaagacgatgttcccgctgaagagaagctggcagtcatgactaaatttaaggaagcgatagaagcacttcccgctaaaatctctgtaatccgtaaggtagaggtcggattgaatataaatccgggtgagacttggaacatcgcgctttacagtgagtttgatactttagaagatgtgagatactatgcaacgcatccggaacatgttgcggccggtaagattctggctgaaacaaaggaaagccgtgcgtgcgtggattatgagttataacccccaataataaaagaatgaaaaaactattttcttttctgcttttaaactttgtggtctatgtgttgcaagcgcagatacaggatcctgtgaaatttaaaacggagttgaaatctctttccgatacggaagcggagattgtatttactgcaaccattgacaaggggtggcatgtatattctactgagcttggggacggaggacctatttccgccacattcaacgtcgatagcaaatcggggattgaaccggtaggaaagttgaaaccggtaggtaaggagatagctactttcgacaagttgttcgagatgaaagtacgctatttcgagaacacggctaagtttatccaaaaggtgaagttcacaggaggggcttatgcgatagatgggtatctggaatatggagcttgtaatgatgaaagttgcctgcctccgacacaggttccgttcaagtttgccggagaagctgagggtaatacggtggcggctaaagaggacaaatcggttaaagaggataaagcagacaagacagagacagatttagctgtttcaaaagatacggttgccatgaccgaactgcttcctgctactccggtggatgcgtctacaggtatccagcctgctgttgcatccagtgagctttggaagccggtcattagtgaactgcaagcgctgggagaggagcatggacagaaagatatgtcttggatatatatattcataacaggttttctaggtggattattggcattgtttactccttgtgtatggccgattattccgatgaccgtcagtttctttctgaaacgcagcaaggataagaagaaaggtattcgtgacgcatggacgtacggtgcgtctatcgtagtgatttatgttgcgttggggttggctattacactgattttcggtgccagtgcgctgaatgctttgtctaccaatgctatctttaatattctcttcttcttgatgttggtggtttttgcagcttcattctttggagctttcgagatcaggctcccgtcgaagtggggaaatgcggtagatagtaaggctgaatcaacgaccggtctgttgagtatcttcctgatggctttcactctatcgttggtgtctttctcttgcacaggtccgattatcggatttttgctggtgcaggtgtctactacgggaagtgtggttgctccggcaattggtatgttaggatttgccattgcattggctctgccgtttactctgttcgctctgttcccgtcatggctgaaatctatgccgaagtctggtggatggatgaatgtgataaaggtgacgttgggctttcttgaattggcattcgcacttaagttcttgtcggtagccgatttggcatacggatggagactgctcgaccgtgaaacgttccttgctttgtggatcgtgatttttgctttgcttggattctatttgttgggtaaggttaaattcccgcacgacgatgatgataataaggtaggagttacccgtttttttatggcgcttatttctttggcgtttgcggtatatatggttcccggtttgtggggagcaccgttgaaggcggtaagtgcattcgctccgcctatgcatacgcaggattttaacttgtatgagaatgaggtgcatccaaaattcaaggattacgagctgggaatggagtatgcccgtcagcaaggtaagccggttatgattgactttaccggacatggttgtgtgaattgccgtaagatggaagctgccgtatggacagattcaaaggtgagtgatattattaataaggattatgtgctcatctctttatatgtagatgataaaactccgctttcggaaccggtgaaagtagtagaaaatggtacagaacgtacattgcgtactgtaggcgacaaatggagttatctgcaacgtgtgaaattcggtgccaatgcccagcctttctatgtattgctggatggtcagggaaaaccgttgaacaagtcgtatgcttatgatgaagatataactaaatatattgacttcctacaagtaggactggaaaattataggaaggagaagtaatgacctctcttgcgatggattaataaagaggttgtgtcaaaacgttggcacaacctcttttatattttacagttcttttatattttcttttggctatgctgctttttcctcatgcatttggcaacaagttgctatattccaattatatcgggttataaatagtcccataaacatattcaacattttttcgcagttccatttaatttgaaatcaaacacagaggtttggatacaagatagaagataacttgataatgactttcggtctggtcattcaattcgtatggaatataggcaaagaaagcttcaagacgggtgaggaaagattcataatcacctgtgcgtaattcttgaacgaattttccgatataaaatccttgatcgcacgttctttttttaagatataatatgcaaatgagaatttaggcagaagacgaatataatcttttcagtatcttttcagtatcatgttttttctttgcgtagaataaattactatctttgccactttaacccgataatcaatgagtagaatattattaaatacaaaaatttggctattaatgctattgttgggtgtcgtttcttctgtttatgcacaagatgatgatttcacaacttggacaaaatttaaaataaatcataaaattgattcccagttttctgtttccggtgatgtggagctacgtacaaaggacgatctgaacaagtgggatcgttggggacttactgtcggaggcgactatcgggcatattcctttttgaaattgggagttgcttatgagactcatctgcgtgatttaggggattcgggctggaaattcaggcatcgctatcatttaagtgctacggcaagttttcgctatcagtggttgaaagtttccttacgggaaagattccaacaaactttcgatagtggtgatgcagaaactcgtttgcgctctcgtttgaagttatcttatgcacctacaaaaggaattgtttccccttacttttctgttgaactttaccaaagtctggatgatgcacctttttggagagcggctcgcatgcgttatcgtccgggagtagaactaaatttggctaaacgctggtcgttggatgttttttattgttatcagtatgaaccttcaaaaggaaaacatattgccggaatagaagtaggctattctttttaaaattgctagttctactatcgtaaactagtgaatttctaatataataatgtgggaatgaatttctatgattttaatagctgatttataactgattgattattggtgtattacatataaatgtgaaaaaatactagtaaaataatacttcacgtcctttttattatatatatttgccgccaatacatcaaaatggtgtgttgaaattgatgattcctcagtgcaacagacgtgttgttcagtatctcataactgaaagcgaatacttcctcttatgctattcttctgtccaatcaaagatttctatttggaaataaataaagatattaagatgaaagtattttataacctgcagagatgtgtaggttttctcgttcttttctctattttgcttgcagcttgtgtaaatcacatttcggaggaggaagaagcaggtgtggtagttaatgatggaaatattccattgaaaattatagctgatattcatgaagttgccaatacgcgtgtggcaaataacacctttgagaaaggagatgaagtgggactgttcgcattagccggttctactaccatacaggaagaacgttatgcggacaatcttcattttgttcgttcggccgatggagagtttatagctgatgaatcggtgtattatccggatgatggtgtgacgctgaatttaatcagttattatccatatcgggaagaaggagtagctatgggagaaagcaagatgccggtatctattgaaacagagcaaaatattccggcgaactattctcattctgattttctggttgctactaaagaagatgtactggcgactcaagaggctatagccttgacttacaatcataaatttttccgcttaaagatagctttagtatctggagagggagaagacgtggaaagtatgttgacggccaatcctaaactttctgtttccggcttttacacaaaaagcatttatgactttcagaagaaatcttattcctcctttacagatgagaaagatatcattcctaccggtgagtgggagatagtcgatgaaaggctagtaggtaaagatctgattttgatacctcaggaagcgacagtaggataccaatatataacattggaggctaacggaaaaccatacacttgcttgttgccctctactttgaaacttcaggaaggcaaacaaagagaactggaaataacttttgtagcagcagaagatatcctcatgagcaagctcaatggagaaatcaatgattgggagggaactgaagtagatcatacaggatcagagactcttcataaatatatagatgtgtcaaagttaactttcgagaactcaaacatttgtaaagtgctgaataaaggaaaacaaatggctgagatttgtaaggagtatctggtaactccggatttttcttcgcaagcaatcgtagtctatccgatgaaagaagatggaacggctgatttatctcgagggcttgtagcacaattgttagggaaaaccggcaaagtgcatggcggaaatgtcgtatgggatacggaaaaccactccttgaattatacaccgggaactttaccggctcgaaataatatttatgtgatggcgaatggggaagtctctttatcggtagctatgggggatgatgtattacaagtcttggcattggaggatgttgctcgtgatgtacgtggagggatgatccataattatccgttggtgaaaatcggaacccaatattggatgcgtgacaatttgaaagcctctttctatatagatggtaatgaaatccctaaattggatgcagtgacagatggtgcagtcggatacctacaatccgaagcgaatgcaacatattatttctatactgctagtgtcgcattatccggtaatattctgccgaatcattggagtgttccgacttgggaggattggaatatactaaaaacttacttgaaagaagatgcttccttattaaagtccggtacatggttacccttgaacaccggagatacagcagagcctgcgactaattggtctggttttgatggaattcctgtgggaatgtatgtgggaacttttcagttaaactatgaaggtaagtatttagcatactggactttggatgaaacaaattcagagatagccgaaactgtattttatctgaaaagtgatacgaacctgatagaatcttctaaagcaggtactgataaaaaagcgctggctatccgttgtattcgcaagtaaataaatgaaattcatccttctttttcatattttgattatatttgggaagtgaaactaataaaagagaaccatgaagaagataataaatccctggaaagggttggagggatacaattgtttcggttgtgctcccaataatgaagttggagtaagaatggaattttacgaggacagcgaggaaatcgtaagtatctggaaacctcgtccggagtatcaaggttggattgatacattgcatggtggtattcaggccgttttgctggatgagatttgtgcttgggtcgtactccgtaaattgcaaacaacaggagtaacttcaaaaatggagacgcgttaccggaagccaattgatacgaaagactcccatgtcgtgttgcgtgcatccatcaaagaaataaagcggaacattgttatcattgaagcgaagctatataataaggatggcgaagtatgtacggaagctgtttgtacctatttcacattcccgcaggaaaaagcgagaaaagagatgcattttcttcaatgtgatgtagaaccggaagaaatattacctttaatttgaaatgaaaactcgtttttttgtgataaatgtttggtagtatcaaacaaattctttacttttgtcgcagttaataaaagaaatatgaaatatacagctatacatcatcatcattttcctaacgaataactcggtgggcatggatgatattgtatatgtctttatataacgataacgaaggcttgccgaatacggtaagccttttttattttactcaaaacgaattgtaattaataaaataataattgataaagtcatgttaagaatcgcagtacaagccaaaggacgtctttttgaagagacaatggcacttttagaagagtcggatattaagttgagcacaacgaaacgtaccttattggtgcaatcttccaattttcctattgaggtacttttcctccgtgatgacgatatcccgcaaacagtggctacgggtgtagctgatttgggaattgtcggcgagaacgagtttatggaaaaagaagaagatgctgaaatcattaaacgtctgggattcagcaagtgccgtttgtcattggccatgccgaaagatattgaatatccgggattatcatggttcgaaggaaagaagattgccacctcttatccggtaatccttcgcaactttttgaaaaagagtggggtgaatgctgagattcacgtgattaccggttcggttgaagtatctccgggtattggattggccgatgcaatttttgatattgtaagttcaggttctactttggttagcaaccgactgaaagaagtggaagttgtgatgaagtcagaagccttgttgattggcaataaaaacatgagcgacgagaaaaaagcagtactcaaagaacttctgttccgtatgaacgctgtgaaaacagctgaagacaagaaatacgtgttgatgaatgcccccaaagataaattggaagaaattattgccgtattacccggtatgaaaagtcctaccgtaatgccgttagcacaagaaggttggtgctctgtgcatacggtacttgatgaaaaacgtttctgggaaattatcggaaagttgaaaggactgggagctgaaggtatcttggtgttaccgattgaaaagatgattttgtaatatatcgagataaaccgtataatgtgattgaaataaataatctgtgtaaatcagtgtaatctgtggtgaaccatgaaattgattaaatatccctcaaaggagcagtgggcggaacttctgaaacgtccggcgctcaataccgagagcctttttgataccgtccgttctattatagataaggtaaaggcagaaggtgataaagccgtgttggagtatgaagccgcttttgataaagttaccttgtctgcccttgctgtaagtccgaaagagatacaggcagccggagcattggtaagtgatgacttgaaagtggccatctctttagctaaacaaaatattgaaacattccattcttcccaacgttttgtcggcaagaaggtagaaacaatgaagggagtaacttgttggcaaaagtcagtaggtattgagaaggtaggtctttatattccaggaggaacggcacctcttttctcaacagtcctaatgcttgccgttcccgctaaaatagcaggatgcaaggagattgtactttgtacgcctccggataagaatggaaatattcatcccgccatccttcttgcagcccaactggcaggagtcagcaaaatattcaaggcgggaggcgtacaggccatcgccgctatggcgtacggaacggaaagcgtgcctaaggtttataaaattttcggtcccggcaatcaatatgtgacagctgccaaacaattggtgagtctgcgtgatgtagcgattgatatgcccgcaggtccttccgaagtggaggtattggctgatgtatcggccaatccgacttttgttgcagctgacttattgtcgcaggcggaacatggagtggatagtcagtctatgctgatcacaacatccgagcaacttcagacggaagtaatggcggaagtagaacgccagttggcaaaacttccccgtcgtgagatagcagccaaatcattggaaaacagtaagcttattttggtgaaagaccttgatgaagcattagagttgaccaatgcttatgcaccggaacatttgatcattgaaacggaaaactatatggaagtggctgagcgggtgacgaatgccggttctgtattcttgggttccttaactcctgaaagtgccggtgactatgcttccggaacaaatcacaccctgccgaccaacggttatgccaaagcctatagcggtgtaagtctggatagttttatccgcaagattaccttccaggaaattcttccggaaggaataaaaaacataggtcctgctattgaagagatggcggctaatgaacagctggatgcacataaaaatgcggttactgtccgtctgaaaaccctaatttaataatgaatatgaaacgcttacaagaactaacccggccgaatatttggaaactgaaaccctactcttcggctcgtgatgaatataaaggagttacggcttctgtctttctggatgctaacgagaatccgtacaatacgccccacaaccgctatccagatccgatgcagtgtgaattgaaagcaatgttgtcgaagataaagaaagtatcccccgagcatatttttcttggaaacggtagcgatgaggccatcgacttggtttttcgtgcattctgcgaaccgggtaaagataatgtagtggctatcgatcctacttatggaatgtatcaagtgtgtgccgatgtgaatgatgtcgaataccggaaagtattgctggataataactttcagttttctgctgataagttattgacggctaccgatgaacacaccaaacttatttttctttgttcacccaacaacccgacaggaaatgacttactccgttctgagatagaaaaaatactgaaccgatttgaaggattggtaatgttggatgaggcctacaatgatttctctgaagctccttcttttctcgaagagctggataaatatcctaaccttgtggtattccaaacattctccaaagcgtggggatgcgctgctattcgtttaggaatggcttttgcttctaaagagattatcgatatcctcagtaaaataaaatacccttataacgtcaatcaacttacccagcaacaagccatctccatgttgcacaaatactatgagatagaacgttgggtgaagacgttgaaggaagagcgtgattatttggaagcggaatttgagaaacttccttgtatcattcaactctttccgtccgatgccaatttctttttggttaaggtgacggatgctgtgaaaatctataattatctagtaggtgaaggtatcattgtgcgcaatcgtcacaccgtttcactgtgttgcaactgtctgcgtgttaccgttggtacccgtgtggaaaatgacactctgttggctgctcttaaaaaataccaggaataaattatgaaaaagaaagtattatttatagacagagacggaacgttggttatcgaaccgcccatcgactatcagctcgactcattggagaagttggagttctatccgaaagtattccgcaacttaggctttattcgtagtaaactcgatttcgaatttgtaatggtcaccaatcaggatggactgggtactttttcttttccggaggaaaccttctggcctgctcacaatctgatgttaaaaacgttggagggtgagggaattacttttgacgagattctgattgaccgaagttttccagaagataatgctcctacccgtaaaccgcgtaccggtatgttgaccaaatatctggatagcccggaatatgatcttaccgggagttttgttatcggtgatcgtcctacggatgtggaacttgcccaaaatttagggtgtcgtgccatttatttgcaggattctacagaaagtctcaaagaaaaagggttggaagaagtctgtgcccttgcaactacggattgggatcggatagccgagtacttgtttgccggtgagcggaaagcggaagtacagcgcaccaccaaagagacagatatctatatagctttaaatcttgatggaaatggaatgtgtgatatctctaccggtcttggctttttcgatcatatgctagaacagattggaagacattccggcatggatttgacaattcgtgtgaaaggagatctggaagtggatgaacatcataccatcgaagatactgctattgcattaggagaatgtatttaccaggctttaggtagtaagcgtggaattgaacgttatggctatgctttaccgatggatgattgtctttgtcaggtttgtctggactttggcggacgtccttggctggtgtggaatgtggagtttaaacgcgagaaaataggagaaatgcctacagaaatgttccttcatttcttcaagtcattgagcgacgctgcaaagatgaatctgaatatcaaagcggaaggacagaatgagcaccataagatagaaggaatctttaaagcccttgcacgtgctttgaagatggcgattaagagagatatttatcatttcgaacttccatctagtaagggggtgctttgactgttgcatgattgggtaaagcattatatttgagattaatatgttgtaacatagtgtatttatatagtactgtgacatttttgtttctccctctataatacttagaataaatacaaaaatgtcacagacaaaatgcctgccaaaatgaaatttttgtcaggaggaattataagttttctatttctttaagccacatggcgaaactcgcatcactcggcattctccagtctcctctcgggctgatggagatgcttcccactttaggaccgtccggcaggcatgaacgtttgaactgctgattgaagaaacggcggaagaaagtggatagccatttcttgattgtctcttcatcatacacccctccgaatgcgatatttgctagataataaatctttgacgggcggaaaccgaaacgcaggaaataatagaggaagaaatcatgcagttcataaggacctaccagatcttccgttttctgtttgatatccccgttttcatctgccggaatcagctctgggctgataggagtatctactatgtcgagcagggtagctttggattcctcatccacgccatttttcgccacccactgtaccagatatttcacgagcgttttgggtacaccggcattgacaccatacatggacatgtggtcaccattgtaggttgcccatcctaaagctagttccgacaggtctcccgtacctacaaccatcccccaggtctggttggcgatatccattaatatttgtgtacgttcgcgtgcctgtgagttttcatatgtgacatcatgtacgtttacatcatggtctatatctttgaaatgttggatgcaggcatccttgatactgatttcgcggatggatatgcccaatgaattcatcagattgacagcattgtggtaagtccggtcagttgttccgaagccgggcatggtaataccgagaatcccctttcttgaccatcccagtttatcgaaagtcttcacgcagaccaataaggctagtgttgaatccagtccgccggaaataccgactacggcagtctttgctccggtatggacgagacgttgtgtcagtcctgctacttggatggaaaaaacttcttcacaatgttcatgcagttcattgtcttgcggcacgaaaggatgagcattgaatttacgggttaaattcagctctttactgtttacaaactccgttgcaatggcaatcgcccttttgccttccaagttagcttggctggcagcgaaagtcgtattcactctccgttccgcccggatacgttccacgtcaatttcgcttacaaccaattgttcctccatgctgaaacgctcgctttgtgcaagaagcgttccgttttcataaatcaatccgttgcctgcgaaaaccacatctgtagtagattctccgaagccgcaggatgagaatacatatccggcgatacaacgtgcggattgctggctgataagtgaacggagataactatgttttccgattccttcattgtcggcggacatattgaatatgatctccgccccttgcagtgcgagggaggagccgggtgggatggtggcccagaggtcttcgcaaatttcaatgccaaatgtggtgtccgaagtttcgaaaaggagattggcgccaatcgggacaacttgtccacacaggcgtaccgtctcagttcttaattgaagtgcggaagtaaaccagcgctgttcgtagaactctttgtaattgggcaggtatgttttggcggtgacacctaatattttccctttttggatggttacggctgcattgattaccgttgaattgacgataacgggcatgccgacaatggatatgatatccagttggcgggtattgttcaatatctgcattaaccccatttcggcttcttcaagcagaagttgctggctgaacagatcaccgcaagtatatcccgtaatgctcatttccgggaacaggatgatttgcaccccttttccttcggctacagcaatcagactttctatcttctccacattgaatttacagtcggccacttttacgtgcggtacggctgctgctacttttacaaatccgtaattcatcttataccttatttatatataatgggtgcaaaaatagaaaatagttttgaataattgtcgtttctccagtgaatccttaaaaggacggtcttcggacggtttatgatactgttggttgcataatcggacggtatgtcaaaaagatagtttatctgtcttttaatataaattatgtttagtcttatttaatgatataactgatttttagcaatataagctgtcaaaaagatatttgtggaattttggtataaaatatgcgacattttgtttcttatatttaactataatatttatatttgtagccaaatttaagtaatatagatgcttgtaacactaaacaaacgagcgatattacttggtagagaaaataaattaagggtagatgaacatacaacagactcacacggtggcaacacgaaaatcttttttagaaatttggcgcaacatcaaaaatcagccaagttagcttctctgttttgttttgataaatcaataaaaataaatcaatttcattaattttaatttaagtatcaaagatgagaaaatcaattctcttgtttgtgctcttttctctgatgaatattcctctgttgctgtttgcacagggagggtatcgggtaacgggacgcattctttcggctgaagacaatcagcctttgattggcgtgtctgtattggagaagggtacatcaaatggtgtaattacagatattgatggtaattacagtatcacagtgacgaaatctcccgccactctgcaattttcttatatcgggatgagacccgtagacaggcaggtcactgcttctactcgtattgacttgtcgatggaaagtgatgcacagcaggtggacgaagtggtggtggtagcttacggtgtacgtaagaaaggtaccatagccggttctgtatccaccgtgaaagcggaaaagatggaaaatgtgcctgccgccagttttgaccaggcattgcaggggcaggcaccgggattaatggtgatgtcaggctccggtgaaccgagtgtggccgcttcatttcagattcggggtatcaactctttgagttcgggaacttcgccgttgtttatccttgacggggtgccggtgtctagtgctgattttaatacactgaaccctagtgatatcgaatcaatatccgtattgaaagatgcctcctcaacttccatctacggagcacgtgcggcaaacggtgtagtggtgattacaacgaaacgcggtctggccctggacaaggcgaaagtgacgttccgcacccaactgggtatttcccaactggctcaggacaagtggaatcagatgaatacggaagaacgtattctttttgagaaggaagtaggattggataaaggaaaagattatgatattctgcgcaaaacagatatcaactggctggacgtggtgttcaataacaaagctatgttgcagaattatgaagtgtccgtcaatcgtgctaccgaccgtttgaattattatgtgtcaggcaactttttcgaccaggacggaattgcacaaggatcaggattcagacgttacaatatgcgtgcaaatgcggatgtgaaagctagtaactggctcaaagtaggtactacttccactgtttcttatgaagagatagaacaggcacaaacaggagcgtatacttccgtaactcctatttccgcttcacacttcatgatgccttattggaacccttacaaggaagacggttcggttgcttcaaccaaagacggcagctggacgggaaccaatcagaatccggtagactggatgcagaataatcccgttagctataagaagtataaagtactgtccactttgtatgccgaagtgagccccgttagagggctgaccataaagtcacagtttgcagcggattatgcgcacatgacagcgttcagccagtcattccccagtttttccaccaacaacaattcgggtactgcgggccgtagttcgaatgacaggcttagtctgacaattacaaataccgccaactaccattttacgctgaaggaaaaacatgatttcaatttcttattaggacaggaaggggtcgatgcccagtcagaagggttctccatttctatgagagggcagaataatgaccttcttactaatatttcgaacggtacgttggctgcttcttggtcggatacggcggcaggaaccgtttattcctattcgtacctctctttcttcggaagaggcgagtataattacgacagtcgttattatgcggatttctcagtacgtaccgatgcttcttcccgttttggtaaggataacagatggggagctttctggtctgtgggattgatgtgggacatgaagaaagaaaactttctgaaaaagtatgactggctcacaactatgcgtctggctctcagtacgggtacttccggtaactcggacatcggctattatgcatggcagtctttagtgaaaggcggaatggactatatgggcgaaaccggtatttaccccgcgcaaagtggtaactccaatttgagttgggagaaaacatggaccactaacttggctttacatctgggtttctggaaccgggtaaacttggatgtcgagttatataataaaaagactacggatatgttgatggacgttccgcaatcttatgcagtgaatggctcaggaagccgttgggacaatatcggtgcaatggtcaaccgcggtgtggaagtcacagtgaatggtgatgtgctccgtacgaaagatttttcatggaatctgaacgccaacttttcgtataataagaataaaattaccgaactttacaatggagtagatgaatacgaaattgcaagtgccaatcttaaatatgtggtagggcattcggctactgaattttatattaaccgctatgccggagtcaatcctactaatggcgatgcgttgtggtataccaaagatggtgagataacgacagaattcagagattccgataaagtgatgaccggcaagagttttgtggctccgtggcaaggcggattcggcacaacattaacatggaagggcatctcgctggctgcacagttcagttgggtggccgaccgttgggtgttcaataatgaccgttatctggatgaaggcaatgggctgttcgaaacatataaccagtccagccggttgctttacgaccgttggaagaagccgggcgatgtgacggatataccgcgttatggagttactccgcaaatggattcccgttttttggaagatgcttctttcttgagattaaagaatttgatgcttagctacaacttccctcaaacattgctcaagaagactaatttcctgacgcatctgcgggtgtttgcgcaaggacaaaacctgctcacattcaccaaattctcagggcttgatcctgaaggcgtaagcaatatgtatcaggcacaatatccttcaacccgccagttcacttttggcctggaagtttcattctaaacatataactataaaacaatgaagaataagataaagatttatttgttgttgatagctttgggcattggctccgtatcatgtctggataagtatcctgatgatgctatccaggccggtcaggctatcaagacagtggacgatgccaatcaagcaattattggcatctatgcggcattcaaggatgcttcgctctatagcggacgtctgacgttgctgcccgatttgcagaccgatctggtgtatgcggtcaccggatattctaatcaatatggtgatttgtggcgttggaacatattggctaccaatgaagatattgaggcagtgtatggagctttgtattccgttatcaatcgttgtaattttctgttagattacattccgggcgtacaacaaagcacgatagacgatgatgcgctcgacaaattggatatgattcacggcgaagccctttttgcacgggcgttgtgttattctgaattgattaagctgttctgtaaatcatacgaaagtgatgcggaagccgaaaacgaattgggagtcgtactcacttctcattatgattcggtagacaatacccgccgtgcttctttaaaggactcttaccaatttatattggatgatcttgaactggctgcggaatatttgaaaatagatgaaaacagtgtgacaaaggatgacctttacagcactccatatattaatgaatatacggtttatgctctccgcgcccgtgttgctttatatatgaagcattatactgaagccatcaaatattcgaccaaagtcattgacagcggatactatgtgctttcaagtgcatctatacaatatggaagtaccggacagagcttctatcagtatatgtggacgaatgatgcttccaccgaaatcatttggaaagttggttttacgcccacttcctatgggggagctttaggcactattttcttcaattatgactattcaacggtgcgtcccgactatgtgcctgcaaaatgggcgctggatttgtatgatgcgtatgatctacgttattcgattttcttccaatcttatttaaccggctatccgcatgcgttgcaatggccgttgcttcagaaatattggggaaataccgctttcatggaaagctataacattcgccacgtctccatgccgaaaccgttccgattgtcggagcagtacctcattcgtgcggaagcatactgctttaaagatacgcccgactacggaagtgcaggcaaagatctaggaaccttgcgtgccgcgcgttattcttcgtatagcggtggtgtgagcctttctgacagaaatgctttggaggtgattgaagaagaacgtgtgaaggagctatatatggaaggttttcgtcttcacgacttgaaacgttggcacaaagggtttgaaagaaagccgcaaagtgagtctctgagtaacggcagtagcttgaaagtagagaaagatgattcgcgttttgtatggccgattccgcaaaatgaattggatgcgccgggatcagacatccaaccgaatgaaagcaataaataaatagtttttaaaaccaatagacatgaaaaagattattatcggattatcggtcatattcactctcgcattcggattcaccggctgcgacaccgattatgttaagtatagcggtcccgattatatcatgttctccgatacattgtccgtgcttccggtacaaaataacgaggagtatttcgatataccggtagcggccactgaagcttgcagttacgaccgtacattgggagtggagattctggataaaaagacgaatgcagtggaaggatggcatttttccttagagtcaaatacggtaactattaaggcgggtgagcgtatggcgaatgtccgtatacgtggtatttatgacaatatagagattaccgattcactgggaatggttcttcaactggtcagtaaggaagaatcgaagtgggagctttacggaaccgaaacgaaagtgattttacagaaagtatgtccgttcgacattcatttgtttgaaggttatgccttgattgtaacttccacctatttcagctcgtatatgcagggggtaagtcaacgattgatccgtaccgtagtcgatccggattcggaaaacactattataatgaaggactacttctacaaaggatatgacctcaaagtgaagtttactactgatgacctgcttaatccgttgattgaaatggaagaccagccgtttgctgctactacggatgcctttgataccatttatggtgactgggaagtgtgggcatatcaatcggggtattacatttcttattatagtagttgcgaaaggtttatgctacagtacatgacattacatgtgccggggatgcctgccggaaaagatgaagtaggtacttatatcaatgttgtgaaatgggtcagtgatgacgaagcgcagattctcattgaagaaggcgtcaataattcaataaaacaataataaaaaacaaaaatatgagaaagcttaaacaaaaaaacttggttgcgcttatgcggaagttctgcttggaaggctgcttcacggctctgttcatggcgttatgcattagtgcttgttcggatgatgacgatgatgcggtaaaagcggtttttcctgaaaaacaaactgtcaattgtgtatatggtgatacaaaagagttgaattttgaaacgaatgccgattggcagttgacttcttcggctacttggtgccgctttgtgaatgatggtcatgaagattattctttatccggaactgccggaaagcagacagtgacattgaagattaccgatgaagctgtggcgttcgatgcacctactgttgcccgtctgactatgatgataggagcggagaaggcaattattgctgatgtggtgcgcgataataaaatgcgtgaattgaagatctatgatatggaaggcaacgaaatccatgagatagaagtgggatataataattataagccctttcagataaaggcgaacttccgttttgccgcaactaaccggccggaatggttggagatagccggaaatacgattgtgggtactgtaaatgaaatgacaaaaggggaagttaaggtgattgatagtcctcagtatgcaaaatatatacaaa

SEQ ID NO: 11773 - DNA, 3278 bp, Unknown
  gut microbiota DNA sequence
gccatatattttaattttcctcagtatttatactttttctattctctcctcatccacataccacagataaccggtaatattctcgtaccccatcttagaaagtaactgcatatatcccttcacctgcttgttatatttaggattctccttgccaaacttaaagtctactacaaccacctgattctctttcatcatcacacggtccggacggcgggtttgcagcacacctttctccttgtagatgatggcacattcgctgaataacgtccattctcctgagtaccaatcctgtatttcgggggaagagaaagccttttgcaccacttcgcgcaccattccctctttttcatcatcccggataaccccttcaaagacaaggcggtcgatagcggaatcgatgtcttcttccgtctcaatggcggaaaataaggtatgcaacaaacggccgcgattgataaaacgatcgtcggaatcttcctcctcaatgccctgaataaagtccgcagaacggttggattggcggaactcgatgtcgtgccgcatggattccatacggataggacgtttctccggtttttgagtaagtttgttggtcgaagtcttggccttttcttcttccgaagaacaaagttcaccctgctcgtaacactcttcgtcccattctatatcctctttcagcgccactaccggaagaacattcgccaatacttccgacattgtacccttttggcctttcttgctccagatgatgagattctttcctgcacgggtgaaggcaacatagagcagattcaggttatccacccaaagttgcaggcgttcgttcaagtaatcatctccgtagatagattccgccatttgtgtggaataattaatgggaaggatatccagcccatcgaacggggccacctgcggggtacaccacacaagctgaccattcgtctcgttctccaacttccagtcgcagaaaggaagaagtaccgtatggaactccaatcctttggatttgtgtatggagaagatgcggataccctccacctcaccgcttggaatcgtcttgccgcacaacgtttcgtcccaatagcggatgaatccgtcgagctcggaagagttgctttgcagataatccgtcaccgcatcgaaaaaggcgaacaggtaagcgtcctgatcgctgatgcggttcatctcgaagatactgaaaagttcctccaaaagttcgtagagaggcattaaccgcagttcttccagcttctcaaggaatgcggcaggaagataattctctacgggaaggagtaggagcgtgttccagtccagccctttccgcagcacttcgttctgataagccacagcaagttgggcacgcgctatcttgttgttcccgtcggagagataacgcaaggcgtccaacatcatgcagatagcgagcgaggcgtcaaggcggaaagcttcgtccgacacgatcttataatgcagctccttgtcaaagtaatcggcaatgcggggaatgttcttattcttccgcacgagaatcgctatatcattcagccgtacgccggaggagagaagacggttcacctcttcacctaagctgatcaatgtctgttcggtatagtcatgttcctcatcgggttcgaggaacgaaaccttcacgtaacccttttccgttttcttggaagattcctgcacgacatcagcgtaggctttctgcaaatccttgcagtcttcgcccaactgactgcggtatatcccgttcagataatcggcggcggcagtaaaaatacggttgttgaaacggatgatattggtttcgctccgccggttggtagccaatgtccttacatggatggggaaatgctcaatgcggtcgttcaggctattcagaatcccccagtcaccattccgccaacggtaaatggactgtttgacatctcccacaatcaagctgtccgctccttgcgaaagcccttcgagcaaaagcagtttgaaattcccccattgcattcggctggtatcctgaaactcgtctatcatcacgttgcggatattggttcctatcttttcgaatacaaaagaggaatcaccgtctttcaccaattgatgaagcagggcattggtgtccgacaataagaaacggttgttatcgtggttcagttggcgcacttcctcgtcgatattggcaagaagctgcactttattgagatgttgcagagacagtcggcaactgttcagcaacaggttattttttgaacggagcttttccgcatcctccaggatatgtatcagactggaatctgccaaagcgatgatgtccgcgtagcgggaagaactttttgccgcccagttctttgcatcttccagacacttctccacagtcgcattgcggatatcgtttcctaagataccattattcagtttacggaaataactgccgattccgcgtgaaccgtttttcagatcgtcggcggttagcgcatggccttccaattcctcctcaaaatgatcatagaaacctttcatttcttccagcacttcggcttccagctctttcagttgcttacggtattccttgatggtgtccggattgcgcaaccgcttccgaagtccttctcctttttcaatatagccctcgtcaaagatattgcgaccgaaacttttcacctcatccgatacattccaacgcttgtcatcggcaatccgttcgttgatatagtccagcagccacgcgaggacaggagaggtgggaccgagtttctcaatcatgctgtctaccgcatcgctgagtacttcggtattgttcagctcgatattcagattcgggctgagttccagttcccgcgccaggttacgcatgacggattggaagaacgagtcgatggtttccacccggaaacggctgtaatcgtgcaacatatagccgagagcgactcccgccgcttcccgtatttcctgctccgcccttccggtttctttttttatccggtcgagataggcttgggaatctctgtcacctatctgaatgccatatagctggctgagaatacgctctttcatttcagccgttgccttattggtaaaggtaacggccagaatctgacggtaggcacgcggattgaggattaataatttaatgtattccactgcaagggtaaacgttttacccgaaccggcggaagccttatatactaaaagttcactcatgcttattgtaaatctgttaatagaattttttcataaagtccggtccgaaatagaataggaataaatgtaagacaaaaata

SEQ ID NO: 11774 - DNA, 26340 bp, Unknown
  gut microbiota DNA sequence
taattaagaggtttaatacattaggttaagatttcgcctataaagataacaaaaggatattgcaattgtttatacatctttactaaaaagttgttacagaattaattttaacataaaagcggtgatgtgtcccgacacaaaggcgttattagcatatgttaaatcagaacttttctttgcagccatctgttattacataaaaatcaatcctaaaccaattacagctatggcaaaaaaaatagcagaacagttgatagatactctggtaaaatccggagttgaacgcatctacgccgtaacaggcgacagtctgaatgaagtaaacgaagcagtcagaaaaaacgatcaaataaaatggatacatgtgcgccacgaagaaacaggggcgtatgccgctgcggcagaagcacaactgaccggtcgcccgggatgctgcgcgggaagtagtgggccgggacatgttcatctgattaacggcttgtatgacgcacaccggtccggcgcaccggtaatcgccatcgcctctacaattcctaccggagagttcggtacggaatattttcaggagacaaataccatcaaactttttaacgattgcagttattataatgaagtagccactactcccacacaatttccacgtatgctccagtcggccatacaaacggctgtcacccgcaaaggggtgtccgttatcgggcttccgggtgacttggcaaaggcttctgccgttaccgtcgactcgtcggttatcaactatcctgccccaccggaagtttgtccgtcggaagaagatctggctcaattagctgacatgttaaacaaacatacacgtatcactcttttctgcggcatcggttgccggggagctcacgaggaagtgatcgcgctttccgagaagctgaatgctccggtggtatatactttcaaaggaaagatggaggtgcaatatgaaaatccgtatgaagtgggtatgaccggattgttgggaatgccgtcaggctattacagtatgcatgaagccgaagtgcttctcatgctcggcacagactttccttattccgctttcctgccggatgacatcaagatagcacagattgatataaagcccgaacgtctgggacgtcgtgcaaaggtggatatcggactttgcggtgatgttaaactgagcatccaaagtctattgcgtatgctgaatccgaagacagatgattcgttcctgttgaaacaactcaaaagatatgaaggcgtaaagaaggatctagctgcttacacggaagataaaggcgacgtaaataagattcatcccgaatatgtgatgtccgaaatagacaaactaagttcggacgatgctgtgttcacagtagatacgggaatgacttgtgtgtggggagcacgttatctgcaagcgacaggcaaacgccacatgctgggttctttcaatcatggttctatggcaaatgctttgccgcaagccatcggtgccgcactagcttatccggatcgccaggtagtggcgctttgcggagatggtggcttgtctatgactttaggagacttggaaaccgttgtacaatataagttaccaattaaaattatcgtattcaacaaccgttcattgggaatggtgaagttggaaatggaagtggacggattgccggactggcagacaaatatgttgaatccagactttgctcaagtggccgaagcgatgggaatggcagggtttaatgtcagcgatccggaagaggtgttgactaccttacttaatgcattcgaactggatggtccggtacttgtcaatatcatgactgatccgaatgcactggccatgcctccgaaaattgaattcggacaaatggtgggttttgcacagtcgatgtacaagttgttaatcaacggccgctcacaagaagtaattgataccatcaattctaactttaagcatatacgggaggtattttaagttattctctttttaagatcttcaatacctctcccaaagtatgacttactattattgctaatcgcaataaggtaagtcatacctttttattgtctattttatagtctatcttgaagtggaaatcattttattttcttatgtttgcaattatcaaaaagtaaaaacacatggaaaagcccgacttttcgcctttatcccgacaagctctacacacaaccattaataccggatacaaccgttattccattcaaagcgatatctgccttctttacagccttaaaattctcaaccgacagttctactattttatccatacagatatattctataatatagatgatatgcaaagataagaaacaaaaagagattcttttaagtttcagaacagtttataacaaaaaagtcgctttcggtaaaccgaaagcgactcctatattcattctacgaaagccggaattacatcattccacccatgcctcccattccgggagcacccatcggcatttctggcttatcttccttcttttctacgattacacattcagtagtcaggaacataccagcgatagaagctgcattttccaaagctacacgagcaaccttagcaggatctaccacaccggcagcgtgcaagttttcgtacacatccgtacgggcattgtaaccgaagtcaccctttccttcacgtactttctgaacaactacagcaccttctttaccggcattagctacaatctcacgaagcggttcctcgatggcgcgtttgatgataccgataccggttgtctcatcagcattgtcacccgtcagaccttccaaagattcgatggcacggatgtaagctacgccaccacccggaataataccttcttcgatagcagcacgggttgcacgcaatgcgtcatctacacggtctttcttttctttcatttccacttcagaagcagcacctacatagagaacagctacaccacctgacaatttagccagacgttcctgcaatttctcgcggtcatagtcagacttagttgaagcaatctgagctttgatctgttcgcaacgttctttgatgttggctttgtcacctgcaccgtttacgattgttgtattgtctttagaaacagtaaccttgtcggcagtacccaacatttcgatggtagcctgttccagtttcaaacctttttcttcactgataacaacaccacctgtcaggatagcaatatcttcaagcatttctttacgacgatcaccgaagcccggagccttcactgcacaaatcttcaattgagaacgcagacggttcactactaatgtagtcaatgcttcgctatctacatcttctgcaattaccaacaaaggacgacctgtctgtacagctggttcaaggataggcaagaaatctttcaagttagaaatcttcttgtcgtagatcaggatgtaaggtttctccatctcacattccatcttttccgtatttgttacgaaataagccgacaaataaccacggtcgaactgcataccttccactacgccgatggtagtatcagtacccttagcttcttcgatagtgataacaccgtctttagaaactttacgcatagcgtcagcaatcaatttaccgatcaccggatcattgtttgcagatacagtagccacttgctcgatcttatcgtagttgtcaccgactgtttcagcttggttcttgattgattccactactttggcaacagccttgtcgataccgcgtttgatatccatcgggctggcacctgctgttacgttcttcaaaccttcagctacgatagcctgagcaagaacagttgcagtagttgtaccgtcacccgcatcgtcacctgtcttagaagcgacctcttttaccaactgtgcaccagtattctggtaagcgtcagccaattcgatttctttagctactgtcacaccgtcttttgtgatgtgcggagcaccgaatttcttctcaatgataacattacgtcctttcggaccaagagttacttttactgcattcgccaaagcatcgacaccttttttcaattggtcgcgggcatcgatattgaataatatttcttttgccatatctttatttactatttaaaattttactatctactattattaattaacccaaaacagcgagaacgtcgctctgacgcatgataagatatttagtaccttcaacgtcaagttctgttccggcatatttaccataaagaaccgtatcgcctactttcaataccatttcttcgtctttcgtaccgtgacctactgccacaacttcacccttcaaaggtttttcttttgctgtatcagggataatgataccaccaattgttttttcttctgcaggtgcagggaggataagcactctgtctgctaatggtttaatgttcatagttacttgttatattttagttatacatttaatatttagatgttacccgtcattttcaggcggaacgctaaaaacattgcgaaaagtgtgccaaagcagtttagtgattctttgtcagaaattgaactgacaaaatggctgtctgcctacctcgttatggcaaaaacaaatgaatcccgtgcgaaagttttcgcacaggattcatattatgccttattataacatgagcttgatatattaatagccttcaccttttcactgtaactcctcattcatcagtgttaacgggtgaagagcgacatcttcacccgcatttacacctccggttcattaataacaagcttactttctataggcactaaacttcttttctattatagataaacttctcttcttccgaatataaaattcttttgcactaggcacaatctataaacgcaagttgcgtttataaaaacaaagattgcgtttataaaaacaaaggcttcgtttttataatcaaagccttcgtttatagtttatctataaccaaaaagaaattagttcttatagaaaggaagtttagatcctatagaaaagaagttcatctacaatatccggtcgccatcagaccaattatcggtatacatagatagcttaaaaaaaggaaagtgggtgaaatatatgcccttcacctgctaacatccatgaataaggcgttatagcgaaaaggtgaaaggcatatcacatttgtacgacacacggacatcataccttaattccggtaaatcagacagatagaaagtcttttcttactcttctttagcttcagtcaagccatactttgctctcgtaattttccgtacaagttccctttgaacactttccaatgcgttcacttctttatccaacagttccaaagctgaacctttctgtagcagataagaacggtctgagtattttatcatagaagtggacactgccttattatcctttttatattgttcaatcatatatcgcaaagcttccgatctatatttacaaacggtcttccgttccgcataatataattctttgtaagcattgtcttcacttctcaacttcttccaaaaagcagaaaaagctgccgacaccgcatctttctcttccttagatacagcctccgattgtctctttttaagctccctatattctttatatgtatttaagaacttatccagcgcatctttacagactttatgctcaagccggtaattttccaatgaagcaggacggttatattcaacaatctcttgcaggtaaggcacatcattccaactgatatacttattattcgcttcacaatagtctgcgtaagcactcacaagttgccaactatattcttttgttttctgattcagttcttcattgatggccgacaaacttttctccatttcctgtaaattctgcgctaatgcggtctgcatactcccccatcccgaaatgaacagacaaaggacacttaataatgttgttttcataatataatgattttaaattatagacttgccatgtatttccaaagaggggcggcattcagcgactgcataatttcgttattctcaagcaacgtcctcacctcttccaatgtgaacaaatgcacagaaatatcttccgtagcttccaaatgttgatgatctatcagttccacatctgtggcgagaaaacaatgagtcaagttagtatgagtactcggattagccgaaactaccatatattcctgccagttcccattgccataccctgtttcttcccacaattcgcgctgggcggataccagtggcgaaacatcttccttctcgcacacaccggcgcaaagttcataacaagtccgtccgattccaggacggtactgacgaacaaaaacaaatttaccttctttggtgatggcaatcgtattcacccaatcgggatattctaagatataatattcggggatatgattcccatttgggagcaacatatcttcgcaacgtacagttagccaagggcgacgaaacaggtacttactactcacagtttgccatgctttattcttttcttccatgaagtttcattttttcttccgacaaatataggaatttccagcgaaccacctcacttcgcctgtttattttcttttattgcaaaaaacttaaatattgaaatagtgttcgtatctttgcaccggctaactaataatctctttatttttattacaatatggcatttacgaataatattatgattgtccggcacaaattgctggcagaccttgtaagactctggaaaaacgaccagttaatagaaaagatagaccggctccccgtagaactgagcccccgaagatcgaagccgatgggacgttgctgcatacataaagaacgggcggtatggagatataagacttttcctttgatgggattggatatgacggatgaacatgatgaagtcgctcccctctctgattatgcgcgtatggcattgagccgccccgagccgaataaggaaaatatcatgtgtgtgattgatgaagcatgttcttcctgtgtccaaatcaactatgagattaccaatctttgtcgcggatgcgtagcccgcagttgctatatgaactgccccaaagacgctatacgcttcaaaaagaacggtcaggcgatgattgaccatgacacttgcgtcagttgcggtatttgccataagagttgtccttatcatgccattgtgtatatccccgtgccatgtgaggagtcttgtccggtaaaagcgatcagcaaagacgaacatggcatagagcatatcgatgaaagtaaatgtatctattgcggtaagtgcctgaacgcttgtccatttggtgcaatctttgagatttcacagacattcgatgtcctgcagcatatccgtaaaggagaaaagctggttgccatcgttgcaccgtccattctcgggcagttcaacacaaccatagaaaaggtatatggagcatttaaggaaataggattcgctgatgtcattgaggttgctgaaggtgccatgcagactaccagcaacgaagctcacgagttattggagaagttggaagagggacagaaattcatgaccacttcttgttgcccttcctacatagagttagtcgaaaaacatattccgggaatgaagccatacgtatcttccaccggttcacccatgtattatgccgcacggatcgccaaagaaaaacacccggacgcaaaaatcgtattcgtcggcccctgtatagccaagcgtaaagaagtccgacgcgacgaagcggtagactacattctgacatttgaggaaataggttctattcttgatggattcgatatccaactggaacaaatgcaggaattttccattttgcacacttccgtccgcgaagcacacgggtttgcccaggcaggcggcgtgatgggggctgtcaaggcttacttgaaagaagaagcggagaaaatcaacgcgatacaggtatcggacatcaataagaagaatatcgctctgttacgcgcttgcgccaagacgggaaaagctgccggacaattcatcgaagtgatggcttgcgaaggcggatgtatcaccggtccaagtacgcataacgatattgtttcaggacgtcgccaactggtacaagagcttctcaaacgcaaagagagctatgaaacaatggatcgataggctacggtgggaaagaacactccgaccggaagagttccggcaactgttgactgaatgtgacgcagagctgctgcgttacatcaacaaacaggcgcaggaagtcagtctccttcattttggaaacaagatttatatccgtggactgattgaaatcagtaattgctgccggaacaactgctattactgcggcattcgtaaaggtaatccaaacatcgagcgttatcggctgacgcaggaaagcatattggactgttgcaaacagggatatgagtcaggtttccgtactttcgtcctgcaaggtggagaagatcccgtcctgacggatgataagatagagaggatagtcacaaacatccggcaagaatacccggactgtgccattacattatcactcggagagaagtcccgcaatacgtatgaacgtttttttaaagcaggcgccaaccgttatctgctacgccacgaaacttacaacgaggcacactaccaacaactgcatccggcggagatgtccggcaagcggcgtttgcaatgtctgcaagatttaaaagacatcggttaccagacaggaaccggaattatggtcggcagtcccggacagacagtggaagatattatcgaagatatcttatttatagaacggctccgtccggaaatgatcggcataggtcctttcctgccgcatcatgataccccttttgcccaatgcccaagtggaacagtggcacagacagttctcctattatccatcttccgcctgatgcatccatctgcattgattccggcaacaacggctttagcgactcttgcctccgacggaagagaacggggaatattggcaggcgccaatgtagtaatgcctaacctctctccgcgcgaggaacggaagaaatatgagttatataatgacaaagcttcactcggagcggaatctgccgaaggcttgattgccctacaaaaacaactgaatgccatcggctacgagatttccaccgaaagaggggactttatacagtacaccacagattacacggattttcacagattaagaatgaaccggaataaatctgtgaaaatccgtgtaatctgtggtgaaaatgaaaaaagagaaaatatatgatataccaaaaagattcatcaaaagcagaagagtttatccaccacgaagaaattctggatacgctggaatacgctaaaaacaataaagacaaccgtgcacttatcgagcagctgattgaaaaggcctcccattgtaaaggattgagccatcgcgaagcagccctgttgctggaatgcaaccagcccgaccttatagaacgcatatttcatcttgctaaagaaatcaagcaaaaattctatggtaaccgcatcgtgatgtttgcaccgctctatctgtcgaactattgcgtaaacggttgtacatattgcccgtatcacgccaagaacaagacaattgcccgcaagaaactgacacaggaagagattcgccgggaagtgatcgccttacaggacatgggacacaagcgtcttgctcttgaagccggagaacatccatcactgaatccgatagaatatatcctggagtccataaagacaatttatagcattcagcataagaacggtgccatccgccgggtgaatgtcaacatcgctgctactacggtagaaaattaccgtaaactgaaagaagcgggtatcggtacctacattctatttcaggaaacttatcacaaggaaaactacgaaaccctccaccctaccggaccgaaaagtaactatgcttaccatacggaagcaatggaccgtgcaatggaaggaggtattgatgatgtggggattggagttcttttcggtctgaatacttatcggtatgattttgtaggattgttaatgcataccgaacatctggaagctaagttcggtgtaggaccacataccatcagcgtcccccgaatctgttcggcagatgatattgacgccagagactttcccaatgccatctcagatgaaatattcagcaagattgtggctgtgattcggattgccgttccttatacgggaatgattatttccacccgtgaatcacaggaatcccgtaaaaaagttctcgaactgggtatctcgcaaatcagtggcggctcacgtaccagtgtaggcggttatgccgaaacagaattacccgaaaacaactccgctcaatttgatgtcagcgatacacggacattggacgaagtggtcaactggctactcgaactaggctatattcctagtttttgcactgcctgctaccgggaaggacggatgggagaccgcttcatgtcattagtcaaatccggtcagatagcaaattgctgcgggccgaacgctctgatgaccttgaaagagtatctggaagactatgcctccgaagatacccatcggaaaggattggagctgatttccaaagaaacggaacgaattcccaatcccaaaatcagagaaatagctatccgtaacttaaaagaaatttccaacggtaaaagagattttcgcttatgagcctgacaaatactccaaatgccaacagacttcatatagcccttttcggcagacggaacagtggtaaatcttctcttgtcaatgcattgacgggacaggataccgccctcgtttcagatactccgggaacgactaccgatcttgtatccaaagctatggaaatgcaaggtattggtccgtgtttgtttatagatactccggggttcgatgatgagggagagctgggagagctgcgtgtcagccggactttaaaagctattgagaaaacggatattgcattgctgctatgtggggatactaccttttctcatgaaaaagagatgctagcactattgaaagagaagaatatccctgtcattccagtattgaataaaatagatataagagagaacagtgatagcttagctacatacattgagaaagaatgtaaaatacgtccattgctcgtcagtgcaaaagaagagataggaatcgagcaaatccggcaggcaattcttgaaaaactgccttcggatttcggtcagcaaagcattaccggagagcttaccgcagagaatgatcttgttcttctcgtcatgccgcaggatatccaagctcccaaaggcagacttatcctgccgcaagtgcagacaatccgtgaattgctagacaagaaatgccttgttgtgagttgcactaccgacaagttgacagagacattacaagctctcgcccgtcctccaaaactaatcatcaccgactcgcaagttttcaaagctgtttatgaacagaaaccggaagaaagcaaactgacctctttttcggtactttttgccggttataagggagacattcattactatgtagaaagcgctgccgtcattgaaagcctgacggaggattcacgcgtattgattgcggaggcttgtacccatgctccccttaccgaagatataggaagagtgaaacttccccgcctattacgcaaacgaattggcaaaaagttacaaatcgacattgtaggcggaacggattttcctcaggatctcatgccttacgacttgattatccattgcggagcatgtatgttcaaccgcaaatatgtgctaagccgcatcgaacgtgcacgggagcagcacatccccatgacaaattatggagtggctatcgcctacctcaacggaatacttgaccaaatagaatattaaacagtacacacggaaagaaaaaataaggtgtcgctgattgtgaagtcaacgacaccttattttttttatattcctactatctcttatcttatagcagcaatcaattcttccgccgaaacaagattctgttctcctgtctccatattcttcagcattgctttgccttcgttcatttcattctcaccgacaatagctacaaacggaatattctttgcattggcatagctcatctgcttcttcatcttagccgtatcggggaaaatctccgcacggatacctgcagcacgtactttcgataaaatgcccatagagaacgcggcttccttctcaccaaagttaataaacagaagttcggttccattcacagcttctttaggataaaggtcgagttggttcagcacatcaaagatacggtctgcaccaaaggaaataccgacacctgatactcctgccatgccgaatacaccggtcaagttgtcatagcgaccaccacctgtgatactgccgatctgcacatccaatgcttttacttcaaaaatagcaccggtataataattcagtccgcgagctaatgtcaggtcgagttcgatttcattcttcaatcccattgtctctaaagtattcagaataaattcgctctcttctacccctttcaatcctacttcgctggcagccaacacatttttcagcgtcgccaacttttccgcattcgttccgctaaggagaatgatcggttgtagcttggcaatagcctcatcactgatacctttctctttcagttcggcatttacattgtccaaaccgattttatccaacttatctatggcaacagtgatatcgacaatcttatccgattcaccgataatctcggcaataccggaaagaatcttgcgattattgattttaatgcacacacggatgttgaaacggctgaatacagtatcgacaatctgcatcaattcgacttcgttcagcaaggaatcacttcccaccacgtctgcatcacactgataaaactcgcgataacgtcctttctgcggacggtcggcacgccataccggctgtatctgataacgcttgaaagggaaagtgatttcgtcacggtgcatcactacataacgcgcaaaaggtactgtcaagtcataacgcaatcctttctcacagaacttacttgccagcttagcagcattacggctcaataattcttcgtctgtgattcctgagaagtaatcacccgaattctgaatcttaaaaaggagtttatcaccttcgtcaccgtactttcccatcaacgtagaaagcatctccatcgcaggagtttctatctgctgaaaaccatacagatggtatacgtcacgaattgtattgaatatataattacgcttcgccatttctaccggcgagaagtcacgagttcctttaggaatacttggttttgctgccatgatattgctgtttataattttaattgcgcaaatttactgcaaatttccgagcaatgcttacatatatatgaaaaaatcctccatagtcttcggaaagacttagtctcttctacccatgaaaatcatgatatagtaaaccaacgtagccaatgaactcaatgcagcaactacataggtataagcagcagaacgaagagcatcttcagcttgtgcatgattgtacgagttagtaatgccggatgaactcaaccataccaatgcacgtttacttgcattgatttccactggcaacgtgataaaactgaacaatgtagtcatggcaaacaaaataatacctgccagcaataactgcggaaatgtgttcaccaacaagataccacccagcaatacccatgtcataatggaagaggcaaaattaactaccggaaccaacgcactacgcatcttcaaaggagcatacatacgcgcatgctgcacggcatgaccacattcatgagccgctacggcagccgccattatactattactttcgtacactccttcactcagattcaccgttttgttagtcggattatagtgatcggtcaactgacccggcgtatgcgtcacctgtacatcataaattccattgtcatgcaacatcttgatagctacgtcgcgtcctgtcattccatttcctgtaggaatcttagaatactttttgaatttgctctgcaaattcatttgtaccagccaacttactacggctattcctataaataatacccaataagacatattcatttcattttaattattactctatatctccatatacaaattgtttgccaaaaataaggggaaactatcaatgtcagaatagtttccccttgcttttatgaagaattagctaaaaattagtcaattattattcttcagtatagcgttcgatagtttgtgctctgtccggtcctacagatacaatcttgatttgtacccccaactgctcctctaggaaagtcaaataagcattgaattcttccgggaactcatcttcgctctgcatcttagtcatatctgtcttccaaccgggaagttctgcatatacaggttccacgccttctgtgatatcgtacgggaaatagtcgatttcctcaccatttaccttgtaagctacacaagccttgatggtatcgaaagtatcaagcacatcgctcttcatcataatcaacttagtaactccgtttaccattacagaatattttaatgctaccaagtcaatccatccgcaacgacgcttacggccggtcacagcaccaaactcatgtcccaatgcgccaatcttgtcgcctgtctcatcaaacaactccgaagggaacggacctgcacctacacgtgtacaatatgctttgaagataccatatacctccccgatacggttaggagctacgcccaagcctgtacaagcacctgcacaaaccgtattagaagaagttacgaacggatatgaaccgaagtcaatgtcaagcatagtaccttgggcaccttcacaaagtacgctcttaccatccttcaacaaattgtttatttcatgttcactatctacgaaatggaattgtttcagatattcaataccttccagccaagccttttccagctccgtcaagtcatattcataattcagacttttcagaatctgttcgtgacgggctttcgctgcggcatatttctgttcgaaattatgaaggatatctccaacacgaacaccgttacgactaactttatctgtatatgtaggaccaatacccttaccggtagttcctactttggcatcccctttggcagcttcataggcagcgtcaaggatacgatgtgtcggaagaatcaagtgagccttctttgaaatatgcaaacgttctttcaacggatgaccggatgcttcaagagcctcagcctctgccttgaacagcgccgggtcaagtaccacaccattgccgatgatgtttaccttatttccctgaaaaataccggaaggaatagagcgaagtacatacttctgtccttcaaactcaagtgtgtgaccggcattcgggccgccctgaaaacgagcaaccacatcgtacttaggtgttaaaacgtcgactacttttcctttaccttcgtcgccccattgtaatcctaatagaacatctactttcatctttcttttttattgttgttattgacttttttccgtttgttggctctgtcgcacttgctgcatatcccatatatatataaggaataatgcgaaagctggaagcggcttaatttcgtattttcaatgacatgctgcaattcctcattctgaaactcagtcactttaccgcattgcgtacatatctggtgatgatgcgtttcacgattgtatgatttttcgtattgggaagaagtaccgaactgatgcttaatgaccagccgtgcattgataagaagaataatggtattgtaaagagtagcccgactcacccggaaattctcctgatccatcattcgtgaataaagcatgtcgatatcgaaatgaccgtcgatagaataaattgtatcgagtatggcgtagcgttcaggagtcttacgatgcccgttcgcagtgagatattcagtgaatatctgccttactgtatctttcacgttttgagtttccatcatcagccaaaattagcgcgaacaaagttaagccttttttgcggaacgcaaaaggattttaataaattatcaatttgctcctatgccaatataccaattaaaagtacacaggcttattattccatctccgcctttaccatattataaagcatttgctctccttccatattggaatcggccattccttctaccaaccgacatacccggaaagcattctcttcgttgtgctgcatatatttacgaatcaccagcaaagcagcattgcgtacatgataactttcggagtgaacggcgcaaatagcctggtcaagcaactcaccggcagcccgttcagtcatatctccctttttcatcagaagccgggcagcagtcaggaacccacaagtctgtatatattcccgttcatcggctatccagtggaaagacttggcaggggcatacggcagattctgaaaaagattcatacacgtcagttccgcaatctctatattccggatatcctctacccaaatatcggctatttcaggataaaaagtatcaatcggctgcaacagtccggccaatattttacattcgcggatatcctctttccacaaagcctgcgccaagtcgtgattcttctcgtaattccctgcgatcattttgatacggggcagttcgacaccaaaattcaatttgtataccaaccccttttcacgcatactttgggacacagccccgttcattgagagacggagctgtgtcttgatatctttcagttgttctttaatatccatttcagattagttgtttaccgaaggcaacggagagttttcggtgctgtaacgtaacatctgttctgcataaccttcgtcgtatgatacggtgacatccgtaatgttaccgttttcatccgtcaccagttcatatttaggattcacaaagcctttgtaaggagccagattcaacttcttatagcgttccagtatctcagcatgcagagtcggatctactttcaccgcataattctctaccaatgaacgggcaccttcaaaatcaccggtcgacttgatacgttggatctcagccaataactcaccgaaaagttcgcgtaccttcggataatcgttgatgaccacatacgtctttccatccttcttcaccaattccacgactttatcggcagctcctttctcatagacccaacgggctattaactgacggttacgcatgtgagcttcctccacattgtttcccggttcgatacgtaccaactgagtcatcagaccattcatcagatacgtgtaatattgagctttataagcttccggagaggaaagaagtttcagttccagcaatttcgaatcagccacatagtacaatccgaacaagtcggcacgggcttcctcaatcgtagagccgtaagccttcaacgcatcaggatctactcccggaagcaacttcccggaaccatgtcccagacactcatgcaaatccgtgtgaagttcgtccgtcagatcggaataagcgtcgatcaactgtctttccgtatcgctataaacgaattcctcattaaacccgtttccatgagccgccttattgtaagcgtccgtaatgttaccgatagtcaccgatttagaaccgtgatgcgcacgaatccagttagcattcggaagattgataccgatagcagttgacggatagagatcaccggcaaggatagcggcggtaatcaccttagccgacacacccttcacttcatctttcttgaaagacttgtccaccggagaatgatcctcgaaccattgagcattgctgctgataatttccgtacggcgagtagcttccaggtctttgaagttgaccaaagattcccagctcgctttcatgcctagcggatctccataactttctgtaaatccattcacaaaatcaattcgcgagtcaaggtctttcacccaaagaatagcatattcatcaaaatctttcaggctaccggtctcatagaactgaatcagttgggcaatcacagctttctgtgcatcattctcagccaccgcttccgctttcttcagccaatacacaatcttctcaatagcctgtgtataaagcccgccgactttccatactttctcctgcaactttccattctcttttaccagacggctattcaagccataagaaatgggagtctcatctttcggatccttcatcgctccgtagaaagcctccgcttcctgttgcgtcaccccatcgtaatagttacaagccgaagtcagcacaagatcctcaccatccgcctgattcacccgtttcggcataatagccggatcaaagatcacggggaacaactcatcacaaagctgttcggcagtctgcccctctgcaagcggaagctgcttggcgtcgagggcaagcacagcttgtttcaaaaagtcctgtgagaaattcggtacaaatttctccgagccataatgatgatgaataccattggagaaccatactcttttcaagtaaatctccatgttcttgaaatcagaagttgtcttatccccctgataattcgtatataccgcttcgagcatccgacggattctcaaattgtattttccattctggtcgaacagaatatcccttccttccaaagcagcctgtgtcaggtaataaatcagttctttctgtttcagcgtcagttcctcgaatccgggaaccttgtaacgcaaaatctgtaaatcagcaaattgttccactgtgtaatcaaatttttctgcatcagcagttgttgttttacttcctccgcacgacgtcaaaagcgtggcggcaatagtcattgaaataagatgtttcttcataatgctagtgttgatcaattaaaatgagaaaaggaattatctccaaacattttcatttagaggtaattccttttggctaattccggaacacgctattactttttgctttccaaatgtttcttgcggtatccgttaggagtctcacctatattcttgtaaaatgcggcataaaaagattgacgatttgcgaaaccaaccatggcactaatttcttccacattcttgtcagcataacgtttgtcagtcaataaatgcaaagcatctttcactctgtattcattcaacaaacaagaataattcataccgaaacgcgagttcactactgcagaaaggtaacgagtattcgtcttcaattctttcgccaagtcttttgctgaataatcaggatccttgtactttttctgtacgactatgatattcaagatcttgtcatacaactcatctgccaattccggtctaattaacgacctatatgcagccttcttttctttcttctccctcaaattgtaagggcgttttttcggagtttcttccgatgttttgttctctaaatcactcattgaattaactggttagggtttgttcatttgttagtaggttgcatacttgcaacgttacatgttacaaatgtcttactttttttttaaacacacaattattttgtgcgtttttttctgaataaacaatcaaaaaccttgaaaaagagggattaagctcgaataataagaaactttaacctttttatatttcatatcggaaacagaaatcactcattatcataattgacgaataaaaacgtacctttgcagcaagtttaaattaacgtccaatgagagatactctaaaaacatatttcggatacgacagtttccgtccgctacaagaagaaatcatccggcatattctagataaacaggatgcactggttctaatgcccacaggtggaggaaaatccatctgttatcaattgcccgctttgctcagcgaaggtactgctatcgtggtttctccgcttatctcactcatgaaagatcaggtggaagcgttacaggcaaacggcattgccgccggagctctgaatagcagtaatgacgaaacggaaaatgccaatttacggcgttcctgcgttgcggggaagctgaaactgctttatatttctcctgaaaagttgttggcggaaaaagactacctgctacgggatatgaacatttctctatttgccatagacgaagctcattgtatctctcaatggggacacgattttcgtccggagtatacacagatgggagtcctccatcaacaattcccacaagtgcccatcatcgctttaactgccactgcggataaaatcacccgcgaagatatcatccgtcagctacatcttatccgaccgcgtacgtttatttcttctttcgaccgccccaacatcagcctgacagtcaaacggggatttcagacgaaagaaaaaaataaagccatcatagaattcatccaacgccatggaaaagaaagcggaattatctactgcatgagccgcaacaagacagaaactgtagcccaaacgctgctaaagcaaggtatccgttgtggggtctatcatgccggtttatccgcacagcaacgtgacgagacacaaaatgatttcatcaacgaccgcattcaggtagtgtgtgccaccatcgctttcggtatgggaatcgacaaatcgaatgtacgctgggtgattcactataatctgcccaaaagtatagaaagcttttatcaggaaatcggacgtgccggacgggatggcctgcccagcgatactgtattgttttattcattaggcgacctgatactactgaccaaatttgcatcggaaagtagccaacaaaagatcaatctcgagaaacttcaacgaatgcaacaatatgcggaagctgacatctgccggagacgcatcttattgagctatttcggagagacagccacagaggactgcggaaattgtgatgtctgcaagaatcccccccagcgttttgatgggacagtcattgtacaaaaagcactaagcgccattgcacgtgcggaacaacagatcgggacagggcttctgatcgacattctgcggggaagctattcggcagaggtgacagcgaaagggtaccaagaactcaagacattcggtgtcgggcgtgatattccccctcgcgattggcaagattaccttctccagatgttgcaactcggctattttgaaatagcttataacgagaacaaccatctgaaaatcacgcccagcggaagtgacattctttttgggagagcaaaagccacattggcagttatccgtcacgaagagaccgctacacgaaaagggaaaaagaagaaagtagtggtaaccaaagaacttcctttcggcctggcaggcggcgaaagcgaagatttattcgaagcactgcgcggattaagaaaacaattagctgaccaggaaggtctgcccgcctatattgtattgtcggacaaagtattacatctgctcagcatttcacgacctaccaccattgaagatttcggatctatcagcggtatcggagaatataagaagaaaaagtatggtaaagatttcgtcaacctaatccggcagttcacctgacatccgactccaaatccagtaaagccttttttgtcggcagcctacccgcataaccggtcaaagcacagttaccgccaatcacacgatgacagggaataagtattgaaatggttatctacattgtttcaactgctcgtgtaaatcggcaggaggtactcccagcgaaatggctttctcaaagtccgattttgccaatgccttttttttctgtaccagatagatatttccacgcaacaaataagcatcagccgacgaggcatccaaccggatcgcttcctccaaatcaaccagtgccaaatcttcatgtttcatgtcacgctccacatcggcacgggctatatacagtgtcgcatcctcaggatattccacaatcatcttattcagaatggcaagagcttcacggaactttccttctttctgttccagcgtagccaatcccagccgaccgctataactctgcgggtcaagttccaataaacgattataatcaatacgggcagccggataatccctgcggagtacataaatatacgcacgcatcaataaggcttccttattttgcttatccccgtcaagcacctggcaataatcagtataagcgcgatctgtctttcccatttccatatagatggcggcacggtccaacaaaataggaactgccaatggagcaaagttcaaggcaaaagaataagattcgagtgccttatcaaactctcccaaacgacgttgtaccaatcccagattggaaaagagcaacgcattcttcgcatttttcggttccagtttcaaagcacgaagcaaaagttcttccgcttgtggaagactgtctttttcgatacagtcaatagccctttcggacaattgctgataagtttgcgcatacaaggcaaccgggaaacagaaaaataaagcaataatcgttcttaccatggttcaagtctttttagtatttataaatcaaaatcagtccaacggatatgcgtcaaatgcaaacaattccgttgacaaataacgctctcccgtatcaggtaacaacgccactatctttttgtttttaaattccggacgctgtgctagttgacgggctgcatacacagctgctcccgaagaaattccggtcaacaagccttccgttgccgatagctcacgtcctgcacgaatcgcttcatcatcaggcacaccgataacttcgtctatcatagaagcatcataaagtttaggaataaaattggctccgattccctgaatacggtgtggagccgcctgtccaccttccaatacaggagacgcagccggttctaccgctacgatataaatatcgggattatgtttctttaaagcacgggctacaccgcaaaccgttcctccggtgccgactccggcaacaaaaacgtctacttcaccatctgtatcccgccagatttcttctcctgtcgtacgctcatgcgccgccgcattggctggattctcaaattgttgcagaatcaccgaaccgggaatactgtctcgcaattcctcagcctttgcaatggaagccgccattccgcccaagccgtctgtcagaacgatttccgcaccgagtgctttcaacaggttacgccgttccagactcatcgtctcaggcattgtcaatatcaggtgatatcctttgatggtagcgaccattgccagtccgacacctgtatttccgcttgtcggttcgattatcgttgcgccgggcttcaataccccacgtgcctccgcatcttcaatcatcgaaagagccaccctgtctttcacacttcccgccggattaaaggcctccagtttggcaataatattttgttccagaccatacttaccacaataaccggaaagctccatcagaggagtattccccactaaatctgttagtttcttcgcaatcttagccatttcattacttaatttttgtcacacacacgacaaagatatggaaaaaaagagatgttttatattacatcatgagaaagataacgaaaagtatactaactttgtatccgttcaattattttaagtttacacattatgaaaaagagaattatccaatttttcacgacatactttttatttgtcctcttgtttgttcttcaaaagccggtcttcatggtctactaccatgatttatacgccgatgtttctttcggtgattattttagtgtcatgtggcacggcttacctttggatttatcactcgcaggttacctcaccgccattcccggcctgatacttatcgcttccgcctggacggattcgtctatactccgccgcatccggcaagtctatttcggattgatagcatttgttatggcatgtatctttattgtcgatctcgggctatacggtttctggggattccgtcttgacgccacccccattttctatttcttctcctcacccaaagatgctatcgcaagcgtcagtttctggttcgttttattgggaatattagcaatgttggtctatgcggctgttttatattctatcttttatatcgtactgatccgtgaaagaaaacctttaaagataccctatcgccgacaaaatgtttcattcgcgctattattgctcaccgccgcactttttatccccattcgtggcgggttcaccgtatcgaccatgaatctgagtaaagtctattacagccaggatcagcgaatgaatcatgccgccatcaatccggcattcagtttcatgtattctgctacccatcagaataattttgagaaacaatatcggttcatggaccctcaaaaggccgacgaattgtttgcggaaatggtagacaaacctgccgtaactgccgacagtattccccaattattaaatacacaacgcccgaatattatctttattattctcgaaagtttttccacacacctgatggaaactttcggcggacatccgaacgtagctgtcaatatggataaattcgccaaagaaggcatattattcagcaatttttacgctagcagcttccgtaccgatcgtgggctggcttccatcatcagtggttatcccggacagccaagcaccagcattatgaaatatcccgaaaagacggacaaacttccttctattccacgaagtttgagaaatgcgggatacagtctggaatattattacggaggggacgccgactttacgaatatgcgttcttatctggtatcctccggcattgagagaattgtatgcgataaggattttccattgtccgaacgtaccggaaaatggggagcgcaggaccatgtattattccaacgtctgatgaaagacatcaaggaggaaaaacagcaagaaccttttcttaaactcgtgcaaacctcaagcagtcatgaaccttttgaagttccgttccacagactggacgataaaatactcaatgcttttgcctatgcggacagttgcgtgggagatttcgtagaacaatataaggagacgcagctttggaaaaacaccctatttgtacttgttcccgatcatcagggagcttatccgtatccgatagaaaatccgttggacgggcagaccatcccgttaatcttgcttggcggagcaatcaaagagcctcgtgtaatagatacgtatgcttcacaaattgacattgccgccaccttgctcgcacagctggggctgccacacgatgactttacattcagcaaaaacatactgaacccgtcatctccgcatttcggatattttacccgaccgaacttcttcggcatggttactcccgaaaaccagttggtatataacctggatgcaaataccgtacaacttgacgaaggtccagagaaaggtgccaatctggagaagggaaaagctttcctccaaaagctctacgatgacctagccaaacgataaagccggagaacaactgaataatcacagtaaaaatataaaaacagaaccagatggtacatactgacatcatccaatatctttcggagatagatacaaatgttttcctatatttcaatggtatccactctcccttttgggactatttcatgacttcctttacaggaaaaataatttgggtaccgatgtacgccaccatcctatacatattactaaagaacttccattggaaagccgctctgtgttatgtagccgctattgcacttatcatcaccttcgccgaccagatgtgcagcagtatcatccgtccggtcgtggcacgcctgcgcccttccaatccggaaagtcccattgtagatatggtatatatcgtcaacaattatcgtggcgggagctacggtttcccgtcgtgtcatgcagccaattcattcggtcttgccatgtacgtggtcttcatgttccgcaaacgctggctaagcattttcattatcgtatgggccttctgcaattgttacacacgcgtatatctaggggtacattatccgggtgatttgcttgtcggaggaattatcggcggattcggcggatggctgttcgctaccattgcccataaagcaaccatctatctggaaccttctacccgtatgaagagaaaagaactcaaacaatggtcagtcactatttatgtaggattactgaccgtactcggaatcattatctattccactattaaaagctggtagaacacaacgacactatttcaaactggaaagtaaaagcctgacaccgtttccgatgccaggcttttacttttcatccggattcatcaagctttcttgatataatcaacaatccactgtcctacttctttcgttccgtatttagcaccgtcagccacctggatttccggtgtacgtacattctcatccaaagaagcgtctactgctttacgaatcagcgcaccctcttctttgcaatcgaaatactcaaacaacatagctacggaaagaatttgtgccaacggattagcaatattcaatcctttagcctgcggccatgaaccgtgaatcggttcaaacaccggagtgctctcac

SEQ ID NO: 11775 - DNA, 7923 bp, Unknown
  gut microbiota DNA sequence
acccctcaggtttttacattgacccgaaaaacagatcttttatctttacagcagtagtagcttctcttttgtacgtcagttgtacaaagccccaaaccactctttcagagaacgaacgaccgttcaatccacctattatgggatggagttcgtggaacgcctttctagtagacatcagcgaagacattattaaacatcaggccgacctcatggtggagaaaggattgaaagatgcaggctatcagtacatcaatgtagatgacggatacttcggcaaaagggatgaaaacggagtcatgcaagcaaacgagaaacgtttccctaatggcatgaaacctgtagcagaccatatacacagtttgggaatgaaggcgggactctatacggatgcagggactagaacgtgcggctctctctggaacaaggactctataggaataggagctggtatctacggccacgaaccgcaagacgcccaattatacttcggcgactggggcttcgatttcatcaaaatagattattgcggtggagaagtgctaggactggatgagaaagaacgatatacctctatccgcaacagcatagataaagtgaataaaaatgtttccataaacatctgccgatgggcttaccccggcacttgggccaaagacgcagcaacttcctggcgtatcagcggcgatatcaatgcacattggaattcattaaaatatgtagtcgggaagaacctctacctgtctgcctatgccggaaacggacattataacgacatggatatgatggtggtcggattccgtaacaatagcagagtaggcggaaacggtcttactccgaccgaagaggaagcccatttcggcctatggtgtatcatgagctctccgttactcatcggatgcgacttggaaaaaatgccggattcttcgctcgaattactgaaaaataaggaattaatcgcactcaaccaagatcctttgggattacaggcatacgtagcacaacatgagaacgaaggatacgtattggtgaaagatatcgagcagaaacgtggcaatgtgcgtgccgtagcattgtacaacccatccgacaccgtatgtaggttctccgttccattctcttctttggaattcggtggaaatgtgaaagtgcgtgatttagtaagacacagtgatttaggcagtttttccggtatttttgagcaaacgctccctgcccacagtgccatgttcctccgcatggaaggtgaggcacgcctggaaccgaccttgtatgaagcggaatgggcctacctgcctcttttcaatgacttaggcaaaaacaccaaaggtatccagtatgcttatgacaaagaagcctccggcaaaatgaaagttggatttcttggtggaaaaccggagaactatgccgaatggcacgaaatatatagtgaagacggcggacgttataatatgaccatccactattcacacggaaaaggacggcagatagaggtagatgtcaacggtatcatcacaaaaatcagctctttgggagaggacgataatcacagccaaatctcaattccggtagaactgaaagctggttacaataccattcggatcggcaacagctacgattgggcaccagacatagactgcttcacattgacaaagacattataaattgcaatagcaataaatagaaaaagtgcaaaaaaggaggagctaagatcactctccactcctcccgtcacgacaaacaactaaaattattcactatttgatgccatccaatgctcttttagcagtagcattagcggggtctatagccagaattttactccagtagtccctagacgtctccttgttcgctttcgcttcggccttcaatgccggattctcgatagccaacaaataataatagcccagatagctgtagcactcaaccaaggcagcattgtaacgaggatcatttttactttccaataaagtagccacttcctcatagaaaggtttagccaatcctaaagtagtctcggggtcaagtgcggaattggcacgcgccctccagaaattacccagatagctatccggtgctgccactgcgatagcttggaaaacagaatcggcagacgccaaagcctgtttgcgttcttcaacagtgattgtcaatgaatcaggttgcgtaccagcaccgtaataaagtctgccaacctgaaactgtaagtccggagtctgtttttccttatcaagagatgcataatatttccggtaagcactgatcgcctttttataatcattcttccgctcgtaagcagcagagatgtttttgtataagttcgtattggagggatctaattgaaccgccttttcatattgtatcacagcttcatcatactttttcaaatcttccagcagatgtccgtaatacatataatccaaataagaataatcggctttatcggtttcattaaagaaaatatccgcagctttcatcgcttcgtcaaaacgcttcaagtcagtataattatacattgccaggcggttgaacgcagcatggcggggattcttttgcagtcccatattggctacttcaagcgacttctcgaaatcatggttcaagaataaagcaaacgcatacttcactaaatcctcctcagtagctaccggtcccatagcaaaacgcgaataagcatccgcagctttgctgaaatcattcttcaaataataaatctcggccagcttcttgtctacaccggtgttagacggttgcaaagctttcagttgattcagcttttcgatagcaagactcgaattggccatcttatagatatctgcaaatttcagataagccgccgcacagcgcggattaaagtaaatggcttcctcatatttttgagaagcaagaccggcattcttctgtttgagggcaatatctccctccaatacggccgcatcagccgatttgccgtttgcttttttggcaagagccgcatattgctgagcttccggtattttaccagcttccagataagcctcaccgatagccaccaacagctctatattctttttattcttgccttttatcatttgtccagcctcttcggccgcttgtgctggattcgcctgaatagtttctttcaattttgcaacacccactttccattcggaggcaggagtttgtgcatagagcgacccaactgctataaacgctccagctaaaaacatttgtactcgtttcatgatagtctctaattttagttattattcgccattcacatggactacacgtatcggctgagtagccggaacaagtccggattttaatatgatgcgctgccccttgtcggaggtcataaaagaagtgaatccccaaggcagcccgttgcgaggatcattcagaattgcataaatcggccgtgccaatggataattgccataatacaaataagcctgataaggtttatagctgtttccgggagtcgccacatcttcggcactcaccgccatcaccctgatttcctccctgaaagagagattggtagtatcactgcggtttcccaaccagttcacacctatcacacctatcgcatcaggattctgcgctacataatttatcacctgctgatttgtcctcaaagcactcacatttccttctgctaacggttttccgttgcagatcgaatccatcgcaaagcgtactgtactggagttcttattgtcgaacaccacccgaatacctttcagacgagaacccgaatttacctgtttccaatctttcacttctcccgtcaagatacggcggaaatcgcgcacactcaacaatgaatccggattctcccggttcacaatcagtgccagtccatccgtagccagcttaatctcacgaggataaaacttacggctgtgaaacgaattcatttcttcctcagtcagtgtccgggttgcgattgccaaccggacactgtctttcagaagtaaattaatcgcctctacttcagtagtgtagcgaggaacaattccggccaaaggatacaaactctcaaacacatcgatttcttcctgcacaatgggttcgaaactttcatccgccgcaatagctatcaccccggacgaatacgtatccgtcggtccgtctttcgatttagaacggcaagcacttaatgccgccagcaaaacgattcctatcagccaaaattgtcttttcatcatctttttattgtaatctgaacattaccggaactgtaaacttcacacgcaccgccttaccgttctgcttgcccggaatccacttcggcatactctttaccacacgtacggcttccttatccagataaggatctacaccacgtgccacacgcacatccgaaatagtaccgtcgcgctctacgacaaactgaatgataacacgtccttgtgttccgttctcctgtgcaatggtaggatatttgatgttttttcccagataaaccatcaattcctgcattccgcccgggaaggcaggcatctgttctaccatatcgaacactttttccggttccggctcagcctgtgttactacctgcttcaagtcagcgatatccgcaccattctcttcatcattacctttcacatcggcaatggagatcgctactttagtagaagtcaactcttcctgactcttgatctcattatcctcgtgcacctcttcatccttcttgatgacgggagccgtaaacttaatagaactcttcaatgcagggggtggaggagctacgggttctacccgcttcatctcttcctgcttgatttccggttcttccaatttcgacagagtagtaacctccgtcatcacttccttttgtttcggagttgccaacttgagcaacgtaggaatcgtaaacccgatcaatgcgatgaccaatacggcaaacattgccagattatgccgttttgtcgaattagcacgcatcttataggcaccatacgcctgattcttgccttcaaaaatcaattgacaccattccgaagaagtcaaatctatttttgccattttacttttctgttttaggtgttcatcatttatcggccagattctgtgacaaggcacccttctcatcgaaattcttcatcaagaattcgtctgcttcggcaatgtccgtaatcacatacttacctatattacatatctgcatctcgtccagcgcgtcaatcagattcttataagaagcgtcatccgtcgccttgataatcacggtcggcgtatcttttccgctcttaatttcggaaacctgtttccggtattcctcttctgaaatcttaaggtccagcttctgcagcttcaaagccctcactttgttcacggcagccacattcttctgaagcagtatggaacgtattccatccggagtgtaactcgtctctttcagcgaagtgtaatccttatagttcggttcaccctcgtagtaatagagcttattgtccgctcccagcagcaatgtgattgcctgcgaagccttcaccatactcttctgttgttctgttatactcttatcattactcggcatgcttatctccatcgtttgaggcttgctcagggtggtacaaagcataaagaaagtaatcagcaacatattcatatccaccatcggagtgaaatccacccgcacggcaaactttttctgtttgctctttccattttttccgccgctctcttgtacttcagcactcatactgttttcctcctttctattcttcagattcccctttgagagaagtaatcaggttgtaccggttctctctcaaatcctgaagtgagttcataacgttctttatcaccgagtatggagtagatgcatccgccttgatagctattcgcaaatcagcgttggctgcacgcgcattgcgtacccatgccttaaactggttgtcggtactatcacatggaattccttcgtttttaagaatcttatcccgttgttcttcaggaagatcgaggaatctctgcatacttctgataggcactccgaaagtggaagctaacgtaaaccgcttctgctgttccggagtaaacttaatgccatactcttcacccatgctctccaaaacagcctgcatatcctgctgtttgtcgaggctcataaatatctttccgctaggatctaccagaatctggagcacgtttgtctccggaatcttgatttccgatacggaagccggagtgtttacttgcaccggttctttcttcacgaatgttgaagtcaacataaagaaggtaagaagcaatacagtaacgtcactcatagcggtcatatctatgaacgtacttttctttttaatttgcgctctacccatgatttatagattttaaagggtccgcagaattagtgagtagcggcaaaagtttgcacaatagagaatccgacttcgtcgagaccgtaagtcagtttatcaattttgttagtgtaatagttgtaggaaataacagccaatgcaccggtcaagataccgaaagcagtgttaatcaaggcttcggaaataccttgtgacagagccatagagtcagcaccaccacctgcagacaaagcggcaaacgaacggatcataccgattacagtaccgagcaatcccatcaatgtacccaatgtagtgattgtggcaataatcggaagattctgttgcatcataggcatttccaatgcagtagcctcttccagctctttctggattgccaacaatttctgctccttagacaaagcagtattcttctccatttcgtcatatttacgaagagtagaagtaaccacattagctaccgaacctctctgattatcacagatttcctgcgctttcttaatatccccctcagccaatgcagctttgatattagcaacgaatttagctaaagaaccttttccgaaagcagagcggagagcaaaatagcgttcgatactcaatgcaagtacagtcaacagcaatgtctgaatgacaggcacgataataccacctttgtaaatggtacccaaaaagtttcctggcaacgggtgattgttcggatcattgttcataaagtttgacggatttcccaataggaaatgataaatacatactgccagaataaaacagcagataataacgataccggcattctttatacctacgacatgagtttttttagtagtttccataataagttttttgttaagatattaattttagttatttagaaaaaaatgtcaacagaattagacacactacgctatagacccggtaactttttagatacaaaaaagccacacagttcatacagggtatgaaaagtaaattactaattgaagtgaagggaataaatactaaataaggatacgtctcagagcgaacacataatactcgctacagataatggaataatgaggatccttatccgaataataggatttactttgatctaataccagtgagttttctctcaacaagaaaaacttattaataatgtctttcaaagagtcattaatttcaatgattctacgcagacgataattagaattcgtttcggaaacaggcttaaagcccaattctacatcagaaatggataaagactgtgtattatcataatccacatgatgaccacctacagaagaacgatgattcgtattgtctgaagatgattcagagaactgacaagtcgattcacaactagatatgcaagtagagaaatccatagcatttccacttatgctaaaagatagcatcagcagaatacaagccaatatgaatctcggagaacttttcattatatcttagttgttatttattagtctcacctaatttggtcgcaaatatagtcattaaattgattaagtttatcatcattcacatcatttaaactataaatcttaatcatactattagaacaagtcagaaaggatattgtttccaaagaaagccatttattatcttaaaaaaa

SEQ ID NO: 11776 - DNA, 1184 bp, Unknown
  gut microbiota DNA sequence
atcaagcagcattttgccgacagcaaagtagcattagccaaaatggaaagtgatttcttttataaaagttatgaagtgattttcactaatggcgataaagtagaatttgataacaaaggaaactgggaagaagtaaattgcaaatatagtgcggtacctgcagctattatccctgcaacaattcaaaaatatgtaacgaccaattatcccgatgctaaaatcctgaaaatagagagggataaaaaagattatgaagtaaaactgtccaaccgtacggaattgaaattcgacttgaaatttaatttgattgatattgattaattaaaccttttaaaacagactgataatgaaactaaaaaaatttgcttttttactggcactaagtgctatatggagtttacaaagttgtgacaataatgatgacgaatcaccgaacgtacctgtagagttacagaatgccttatcatccaaatacccgaatgtaacgaatgtaaaatgggaaagtaaggccggatattatgtcgctgatttctatgaccagtatgaaatatctgcctggtttacacaggacggaatatggaaaatgactgaaacggatattcctctctctgcattgccccaagaaatacaggcctcctttgaaaacagcgaatattatcttacttggaaagtagatgatgtagataaattagaacgggatggttttgaaattatttatgtaatcgaagtggaaaaacaaaatcaagaggtggatttgcactattctgccaatggaacattgataaagagtattgttgacacagataatgatgaagatgaatatctccctgttcaactgacagaggccataaagaatttcatttataaaaactattcaaatgctcttatcatggaagtagatatagaaaacgaccgaaatgataagtattacggatatacggaagtggacatcattcataacagaatccataaagaaatattattcgattcgaacggaaactggtattcgacttcatgggaagtgcataaaaatgaacttccggagactgttaggaatgttatcgaaaagcaatataaagaatataatttggatgacgcagagtatatcgaaaaagctaatgacacaaaatattatcgcattgatttagaattaggagagactgatcttacagtaaatatagata

SEQ ID NO: 11777 - DNA, 2799 bp, Unknown
  gut microbiota DNA sequence
cctggcttccttaccgtcgcaatacgtatcgtggtaatttgctttttgctcatgacgtagttacgcgtcaaggcttcttttttttgaaagaggctcctagcagcagtacccaattacattatccgggttctgacttcgtggcggactttagcgattttatggtagtggggctgggcgttgcgtctcatgatgtaaagccggatagctggacccgcgtttatggatgcgttaccggcatctataccggcggcgagcaagaagcgcttactgccttgcgcctctatcagaaacaactgcgtcatcataccgccgcacaggatgagatgattatgctcaatacctggggcgaccgtagccaggatgccaaaatagatgaggctttctgtctggcagaactagaccgtgccgcacgcatgggcatcaccctctttcaactggatgatggctggcagagcggaaaaagccctaactcaaagaccgccggaggtagttttaaggatatttggaagaataccggttactggacgcccaaccccacgaaattccctcatggtctgaaacctattgtagagaaaggcaagaaattgggtattcgcatcggattatggttcaaccccagcatacagaatgattttgccgattggcaaaaagatgcgcaagccattatcggactttataagaagtacggcatctgctgtttcaagatagacggcctgcagatacctaccaagacagccgaacagaatctgcgccgactgtttgataccgtgttggagcaaaccaactatgaagtgattttcaacctcgatgccactgccggtcgtcgcggcgggtatcactatatgaacgagtacggcaacatcttcctggaaaaccgctataccgattggggcaactattacccttatcgcaccttgcgcaacctctggatgctgtctcgctatgtaccggcggagaagatgcagatagagtttcttaataaatggcgtaatgccgacaagtatgacgctgccgatccttttgcccccgcccgttacagtttcgattacctctttgctatcaccttggcggcacagccgttggcttggatggaggcttcgaacttgcccgaagaggcttatattacggcatctctgctcaagaaataccaacccttgcaactccggtttcatcaaggcgtcatactgcctattggtgaagaaccctcgggacgctcgtggaccggatttcaatcgaccgtctccggcacgcaaggttatcttgttgtttaccgtgaagacaacgagcaagccagggggactattgacacctggcttcctgaaggcaagaaagtggattttatccctgtgatgggaagtggcaagaagtttgctgcaaaagtcggcgcacagggtaaagtcagtttcgaactgaatgataagaactctttcgcgctttatcaatacgaagtgaaaccatgaaaagactattaacaataacggaattatgataaaaagtttgcgttttgtttttcttgctttgtttgtcgtcctgcaatttgttgcatacgggcaaccggcagaaagactgattcaagtgcaggtcactcccgaccacaccaattggctgtataaaccgggagaaaaagtgaaattcaaagtgacggtattgaaatgcaatatcccacaggataatctggaagtgcgctatgagatttcggaagacatgatgaaacctcatcagacaggcaaacagcctttgaagaacgaaaagcttgaaattaacgcagggactatgaaaaaagaagggttcctgcgttgccgtgcttttgtcacttgccaagggcgtgagtatgaaggcgtggctaccgtcggcttctctcctgagaaattgcaaccgaccactcctttgcccgccgactttctggagttttggaaaagcaccaaagaagccgctgaaaagtgggcactggaaccgataatgactttactgccggaaaggtgcacagataaggtgaacgtatatcatgtttccttcgcgaacaatgactatgcgtcccgtatgtacggcatcctttgtgttccgaaggcttccgggaaatatccggcgattctgaaagtgccgggggcaggtatccgtgcctataacggagaagccgaacgtgccggaaaaggttttatcattctggaaatcggtattcacggcatcccggtcaatatagagggggatgtctatcaccgcctttataacggagctttgaagaactaccactcgttcaatatggacaatcgggacaaatactattacaatcgggtttatacaggctgcgtgagagccattgatttcatttacacacttcccgagttcaatggcaatctggcgacctttggaggaagccagggcggtgcgctttccattgtaattgccggactggacgctcgtgtcaaaggattggtttctttctatccagccttgtgtgatatggcgggttatgcccacggtcgtgcaggcggttggccgcatatgttgaaggatgagaagaaccggacaccgggaaagatgaaaaccattcagtattttgatgtagtcaactttgcccgtcaggttaaagtgccgggattctatacttttggttataatgatatggtttgtccgcctactactacttactccgcttacaacgtgattaatgctccgaaagaactgtttgtagctgagacgaccgcccattatgcctatgccgaacagtggagcgcagcctggaactgggtaatgaatttcttgaaaaataaatcgaaaaacgaataatatactaatacc

SEQ ID NO: 11778 - DNA, 1247 bp, Unknown
  gut microbiota DNA sequence
ggcacaagagctgataacgaatgtatatggccgtgacatccattcgctgaatggtaaatggaatgccatcatcgacctgtacgaccagggacaacggatgaaaatctatgagaaccggcaaccggaaggaaatattgatttctacgaatacgcattcgaaggcgggttgcgtcttaacgttccgggagattggaactcccagtcgcccgaactgaaatattacgaaggaactgtatggtatgcccgtcactttgacgccaaacgcttggcagacaaacgccagtttctttatttcggcgctgtcagctatcgttgtaaagtctacctgaacggaaaagagatagcagagcacgaaggcggttttactcctttccaagtggaagtgacagacttgttgaaagacggtgacaacttcctggcggtagaagtaaacaaccgccgcaccaaagacgccattcccgctctggcattcgattggtggaactatggcggcatcacaagagatgtgctgttggtgaaaactccccggacatttatagaagattatttcgtccaattggataaaaatgcttccgaccggataattgcccgcgtgcgtctttctgataaaaaagcaggtgagaaagtaacagttgccatccccgaactcaaaatcaacgcggagctcaccaccgacgcagaaggaaaggcggaaaccgtattgaacgcaaagaagctgcaacgctggtcgccggaagaaccgaaactctatggcgtgactgtatcttcaaataccgaccgcgtggaagaacaaatcggcttccgcaatatcaccgtgaaaggaacagatatctacctgaacgggaagccgacatttatgtgctgtatctcttttcacgaagaaattccgcaacgtatggggcgtgctttctcggaagccgatgcagccatgttgctgaatgaagcgaaagcgcttggcgtgaacatgattcgcttggcacattatccgcagaatgaatacacagtacgcctggcggaaaagatgggcttccttctctggcaggagattcctatttggcaaggcattgactttacagacaatgatacccgtcagaaagcgcaaaggatgctttctgaaatgattaagcgcgaccagaatcgctgcgcggtaggttattggggtgttgccaatgaaacacagccttccaaagaacggaatgaattccttacttccttgctcgaaacgggaaagcagctggacactaccc

SEQ ID NO: 11779 - DNA, 10959 bp, Unknown
  gut microbiota DNA sequence
agccatccctacgcaacttctcaaagctctgtatgccgatagggtaaatcctctgcttcattatctgtttctcctttccattcattagcgtatgacacgttgtacaaagataggactttttttctaagaaaagcccatccgactatgaaatcaccggtatatcacatgaaacatacgggacgaattactcaaacaagcggaaatcatttgcttttctcccttatatagtttacctttgaggtcgatatagtctattcttcacggccatgaagatttcctaccacagccgtgagaagatcctaccacgcccatgaagagatctcgtcacggccgtgacaaactaatgataaaggctccggaaggcaactatccttataccttaatccaacaacaaaggcaggacaatgtatatataaagccacttggcggcaaacaggcagtagcttgacagaaagtaagcagtagctctacaccaagcaagcgacagctatataacaataaaaacaaagatacaatggcaatacaatttgaattgtacaaaacgccccacccgaaggatgaggaaaacaaggaaacataccacgcacgtgtggtcaacttccaacacatcgacacggattatctggcaaaggaaatccaaatggccacttctctgaccgaaggggatgtaaagtcggtactcgaatcactgagccacttcatgggctatcgtctccgcgaaggagaaagcgttcatctggatggtatcggttatttccaggttaagctgaacagccaggaaccgatcacttcgcccaagctgaaagcgaatcagataaagctaaaagccaacatctgtttcaaggcagacgccaagttgaaaaggtctgtcagtgtcgtccatgtggagcgtagcaaactaagaaaccattccgcttccctttcgaatgaaaagatagacaagttgctgacgaattacttcaacgataaacctatgttaacccgcatcgattttcaaaggttatgcggatttacctccaccacggccgcccgccatatcaaacgactgaaagaagaaaagaaattgaataatatccatacgtattataacccgatttatgtaccaatgccgggatattacggcaaggcggaaataaaagaggatgaaacaaatgccataaagtaaagactataatagaatgagagataccttgcggcgaggtatctctcaattatttatatcccccattcataagacctacattcaattattcttattaatcaaattgattactaccttcaccatcacgtccttttcttccgtccggctttcagcaatcattaacgtaagtgctacgagcatattgttaccgattaacttcgaaccatcagatttatacagtataccgttcttctccagaaaccaaaggaacagaaaagcggcaattgtttgtgttcgatgacgttagaaagaagacgtacggtgctcttcaagtctgccatttgcgcctgtgtcagccacaccgtctcattctccaacttcacatcaatggaagttttcccatcctttgtctgataaatgacaatctttcctctattgtcgataaaatgcttccttatttacgcattgtgtccgtccattgctacgaaggtaatggacggacacacaaatgtacagctttcaaaaagaaataaagaatataaagctgcttttattagttgctctgaagtgttattatagaacgtgccggaatatgaacaatctttccactcttcacttttcctaccggtagcaaattctccccttctttatccgaagtacgataaacctgccattgcgcattcccgactttttctttatgaatagaaaactctttctcctcattggcatagtttataacgactatcacatacgttccatccacgtttttgtaagcagaacacatcaatccttgctggtcagtgtcgccatcgggaatgaaagtgtttgtttgatcgaaagctgaaacggataaccggactgctcccggacggataaaacggctgtaattgcctagagcccacatcagtttggaatcttccactctgccatccaagaaattatcgtccgtagtatattcacgaatcagtccgtctttataatcgccgccaatagcacgccaccattgccagctctttgcaccggcatatacaatatcatggtgaatgatacgggcgacataaagggctgtcttcatcgtacggtcgaatccatttcctcctccgatttcttcatcattgcccatgatgcaagtctccgtctgccaaaagtcaacatcgtgtttgtctaatgtatcccgcaactgactgcggatattgcgtaactcactcaaaggagtcgttgtccagtagctatgtcccagcattagtcggggaacattcggagtatcacccaaatatgtgtccacactgtccggacagaagaaagcctgaatctgatagccacgttgccaatctgtctcgtgtgtacggaacatacaacggtaatcggaagattcacttaccaaaatctgcgtatctatattccggttcacaaattcccggctcaacagacggacagtacgggctatttccctgttcgttgccggacaaccttcctgtttcggtcctacccaattccagtgtccgtccggctcattgaaaggacagatgtagttgaacttgataccatcgtgttgctctactccctgcactacatcggccaaaaaacggacgtacttctcataacagtccggtttcagatttgccgtaccaccgcgacccgtgtttgtagccaagctgttctgcgtataatagacgggaggagaattgaggaaagccagaaatttatcgaccccacgctccttcgccaacttcaggaagttacgctgcccctgttgcttgctccaattgtaggtcccgtccggttgcaagaaacattcggcacgcatccaaggagaagcaatctgactgtcgtcaccttgttccgcactgcctgcaccgacattgaaacgccaaagagacaaaccgatacctttgggctgtccattcgcatcattctccgtactgaacagccaatcggctatctgattctgcttttcctccggccaaagtccgatgaactgcatactccaagcgtcggaagcgccgaaataagtcattgtctggcagggacggtctgtttctagctgatagctaacatcagtggcaggttgggaacacccgcctaccatactcatgtagaagaagcctaaagaggccaagaacactttacttttcattttttacaatatacctattgaaaatattatccgttctatttcaaatcgtaaaccattgtgacaaccgatttagccggaatatatcctttcaaatattcatctacctcattcaaattactcgtacttgatgttacatattgtctcatagaaaccacttgtttattcaatccttcgatagatgtttccatttgtatagattcatcatttatgttagtatataccactaccaacttatcttcctcaggagagatataagcagaaccaaagaattttttatctccttcagggatattcaaatctacccgatgataccccggacgaacgaagagactataattacccaacacccacaggttcttgctagactcataagttccaccatcagcaatattaccataatctcctccggtcggaatcaaacgaatcatgtaaaaacggcttttctggctataaacttcctgtgaggctgttgtccaatatgcccaagaattcatacttgccgttaccaaatcatggtgcagcactttagccatacttaaagctaaatccatataagttgcttgatcataattttcgtaatcttcatatccttcgcccaacatactccattccgtctgataaagtttcaacccatatttatccgcctcagcacgggctttcgtacgtgaatcaaacaacacatcccatgttttatcccaccaataactatgagcgcaaatcaacttaggcatacgttctaagtcgccaagataatgttctgaatctgacttaaaataagttggaataacattcgcgcgatctgcccaactgtcatcagtagtataaagataaggaaccttagcagcttccgccaataacatcatcgtattttcaggcccttttgtcttcagactctcattcaacgctctagccatctttgccacatgtacatgttgccaagaacatccctcctgaccatctcctccccatgaatactgtggttcgttcaatggacttatatatgagatattgtatccattatcagagaaatgtttagccacagtggccaagaaatcagcaaaatcatcaaaacaatcttctcttaaattattgttccaccaatcacctgaccctttaccgttgacagtaaactgtacaggaggagtattactaaacaatacgaaattattacaaccatattctttcgctttctgcataaagtactgctgcccactagatttattccaatcatacgtaccattctgcgtcaggaaacattccactcttcgagtcttatccgtaattccgctagcttcgccctgctcggcagtaccaccacctaaatttacgcgccacatggaaagaccaataccttccgggtttcccctttctatcttttgagagaaaagaagtttagcaatgccttctttagcattattactccaatatttaccgatataatccatcgtccaagcatcagaagaagcaaatccatcaataacctgatgtttgtcggcaacatttaccgttgatgtcatcgcatggtccgaagttatcttcggaagataatctggttcaaaagccttgtcgtcactgcatgaacacagagcagccaagcacgaaagtcctaaaagaatatatttatttttcataacattgtgtctttattatactgaaattgaattgatttagtatccgggattttgctcaatgcttccacccgacaaggttatttccgttggaggcaaggggaaaagttcatctctaccctccttgaaattgacacctttattactattctctttttggttactgctttcatccgaatcataaccaatcttattataggcaacaaatgtaccattcggtcccataacattacaaatagccgatttaccattatcatctttccaacggcgcaaatcatacaaacggttattttccaacgccagttccaagcggcgttctttacgaatagcgttgcgaagttcagtgccggtagccgtcgacggagctaaatatacacgatccctaactttattcaaagcccatttagcctcatcatcatgtcccagttcgttctccacttccgcatacatcaacaatacatcggcataacgcaacaagcgataattcaaaggaatatgaggtgcatcatagggagtaggccgtttttccacaggtatatataatttacgtgaaacacggggagacttatgatcattcggagatattacataaggatttttagcattcgcatcgccataaacctttgtcgctccattcttaataatcgtccatctcaaacggtaatcttcattaagttgttcctccggtgtctctcgcacaggtttttcctcttgaaaagctctctctaaattgcttgtcggaagtccccacgcccaaccactatcatcacgcgagccacaaacaataggaatacgtatacccaaattataagacacatcactattagtctggacctcaaacaatgattcggtactatttctttggtctatatcccatacttgtccaaaatcgctcaacaattcatattcttctctgccaccagcgaactcgcctctgcaagtaatctcttgtaataatggctctgcttccgtatattttccctgatacagataagctttcgccagatacccttgcgctgccccttttgtagcacggcctaaatccatagcgtcgtattcactccgcttcggcaagtcaggaatagcttccaacagatctttttctatctgcgcataagtatcttctacagttgcacgtttgatgcctgttatttcactcggcaatttcaatcccagtaccaaaggtacacctccaaagtttcttaccaattcaaagtaatgaaatgctctcaggaatttagcctccgcaatatatctttttttcaaactttcattctcgaaaacgacttttggaatctgctctatcgcaacattacttcttagaatacctttataacgatattgccaaaagttctgacaggcatttcctgcattatatgtatttccggtgtaatgggcaaggtcacggtattctccgggatcctgcgttgtgtttcccatccacatatcatccgtacacatatcacttgctatataaaatttctgtatctgccaccagtcatcaaaaaagacagactgataacatcctgtaatctgctgtttacattcatcttcacttttgaagtagtcatccaggttctgttgtgccctaaccggttcttccaaaaaatcggcacagccggatagtgagattgtaaaagcggctatggaaagccctaatatatatttcttcatggtctttactagtttatatattaaattagaaatttagattcagtccgaacagataagtacgaggattcggataacctgcccagtcgataccggattccgtcacattacctttcgttcctaatgaggcggtttctggatccataccggagtattttgtaattgtaaacggattctgtgcggagaatgatagcctcaagctgaatcccttcgtccaattcttgggcagggtgtagcctatctgcaaaagtttacaacgcatataagaaccatcttcaacaaagaaactagacggacgcttgtagttcatattcgaatcattcacagacaaacgaggtaagaaattactcgttccctctccgtgccaaactttattataagttcccgcatatacattctcgcctccggcaccggaataacgtcctaacgtagtgttgaatatatcatttccaaaagtaccataaaaattagccaggaaatcaatgttcttgtaagaaagatgagcattcagacctaccatcagatcagggaaagcagaaccaatataagttttatctttatcatccagctcaccgtcatggttaagatccctaaaacggaaatcacccggtacggcattaggctgaattatttttccatgttcatcggtatgcgcattgacctccgtctgattctgaaagatcccatctacaacatatccatagaagcggctgatttctccgccttcttcgttacgaataatataatcaccattaaatccacccgtataaagaggttgtcccatcagtttttcggccttgttctttacagaagataaattcaaaccgacaccataagtaaaatctccttgacggtcttcccaaccgatggacaattcccaaccggtagctttcatactgccaatattctcccacatctgtccgttccacatcggataacccaatatcaacaggttatcacgcttcatcaacatatcatgtgacttcttttgaaaccagtctgccgttaccgtcaagcgattattcagaaagcccatatccactccgattccgaagtcttctactgtttcccattgtactttcgtatttccgatagcagttacacttgtacctatctcgcgattaccttcctgaccgaacacataatcagttgtaccgactgtagaagcataagccgaatcatcaatagactgattacctacccgtccccaaccagcacggattttcagattgtcaaaaatatgctggtctttcataaactcttcaccagtaacacgccacgctccggatacagccgggaaagttgcatacttattcccttttacgaatttagaagaaccatccacacgtacagaggctgtaaggtaataacgatcgttgtaattgtacatcacacgtcccagataagaaatcaatgaagagtaggaattagttccggaagcctgctgattctttgtacctgcactgacatattgcagaagttcgtcattcgtaggaattccgtcacgtgagcctgtcagccaatagtgttggaaacgctccatagtataacctgccattatattcagattatgtttctgattgaacgactttatccatgtcaacgtatttgtccagttccagtctatccaattcttcatttccctttttgccacgctggtttccgcacgctccaaattatcaatatcaaatgtcggagtaaattcatcatataagcggaaacgagcattcaatcccaattgtgaacgaaagatcaaccctttaatcggttctatattgataaacggagtagccaacaagccatattcatccgtattcttcgccatacgtgccatattagctaccggattccatacttggctgttatgagaacgggaataattatcatattcattatccgtccattcactttcaggacgcatcaccggagtagtagggtccatagccatgatagatcctatcaagtcgggagtgtctttccagttttcatacttgggagtaaaatcaataccggcctttacaatattgttaaaagtatattccatactaaaacgagctgtaaacttttgccaatttcctattttatattgagaatcctgtccgaaataaccaatacttgccgaataaagaagtttatccgttccaccggagaaacttaaattataattgtgaatcaatgccgttttcctcatcgtctcatcccaccaatccgttccttcagcatcagtaatgccattataccccacatacataggcacattaccgtcattaatgtatcttgacttcaatacatattcatactcggaagcttttgccatatcaggtttctctaatgtttggaaacctgctgaagctgtaaaagtgaatttggttgccccctttgttcctttcttcgtggtaattaaaacaacaccattcgaaccacgggtaccataaatagcagaagcagaagcatccttcaaaacctgcatcgattcaatatcattctgatcaaggaagtttatattatctcctaccggcattccatcaactacatacaacggattggatccattgactgtagacacaccgcgaataatgacgcggggaactgttccgggaccacctgcacttgatatttgtacgccattgattttcccctgtaaagagttcattgcattaccggaactcaacgtttttagttcgtcacctttgatagctgcaatggaactggttaagtcacccttcttcactgcaccataaccgatgactacaacttcatccaatgcttgcgtatcatcttgcatcactacattaattgtagtacgtccgttcactttaatttcctgtgttttatatccaatcatggagaaaaccacaattgcgtccttaggcacattattcaatgtatagttaccgtccaaatcggtcacggtaccgtttgtcgtaccctttatcaaggctgtcaaaccgatcatcggctccttatccgcagccgaagtcacaacgccttttacagtaatgttctgcgcatagccacataagcttattaatgcgagacacaataataatatctgctttttcatattaaatttaatgttacttgttatcaacaggaatcaacttaacccttccgagatgagcgtcaaatataagtttataatctccggctgtctttaccgttggctttgcccagtctttattttgtctggtcaacatagtcccttgccaagccggatttacatgcaccgcattttcatcactaaaatatccgaaaacttcagggtcataaacggcatctgctccttccgatttatcaacataccatgcacaataatcccaccagttatcatggtgccaattatgaattataaaattcatctgcgtatttgccttaagtgacaatgatttaagataaaataaatgaggattaatgttatcttgctcaaatctctggatattcttaggagcatctgtcatataaccaaaataaaactcttggagccatgaaccaccattattccacgtatctaaagaaattgagccaaattcatgcggcgcaggatcaatcgcctgttcaatcgaataagtactcattgaatatgagttatctgatatattgaaagttatttcataatatacattagcctgttcaaggactatcggttcagcaatactcggatcagagactaatttattaagattattggggtctctaccaaagcaaatcggataaatatctgccttttgaggaataaaataaatctccgtccctgctttctgcgaataataattcgccttataagtatatgctcccgtacgttcaattctcatcggaacaccaaacacatcagaagtcaactggctggcatcctcaacatcactaagatacattttctgaaaatccggcatttccgccaccactttgactgtataagatgtagtagtagtttcttcattagcaaatttatcaacgacctttagttttacatcataagttcccgattgcgcaattggaagtctcaccacaccatcaaatttagtttttccctccgcatctactttctcaaccaactccaaggacggaatacttacttctacataatctaaggcctgttcatcctctactataaagtggaacggaacggttccatcctccgctgtcaaagttgtgaactcaccctctgctgcaaatttgattgtcggtttttccgaatcattatccgttgaaaccataatggtatgttcaactgaacgccctcctacgtctgtaatagtaactataatcggataatcagccattctcggcagtttttcagaaagagtaatagcatattctaattcataagaatataatggttcaccataaatgctaagtaaatcaatagttttatccaaataaag

SEQ ID NO: 11780 - DNA, 305 bp, Unknown
  gut microbiota DNA sequence
atttatttcacctacaccaacgagaacccgatagcgttcaacccgttctatgtcgaggacggggtattcgacatagagaagaaagagagcatcaagacccttatactcaccctgtggaagcgggatgatgaagccccgaagcggtcggaagaagtggcgttgtcaaacgccgtgagtgcctatatcgaactgacaggcaaagaccgttcggtaacgccctgcttcaacacgttctacgagtttgtccgggatgattaccgccgacagcttgaacagaagaacgtcagggaaaaggattttgacat

SEQ ID NO: 11781 - DNA, 138 bp, Unknown
  gut microbiota DNA sequence
gagtttgtccgggatgattaccgccgacagcttgaacagaagaacgtcagggaaaaggattttgacataaacaatttcctgaacgtgcttgaaccgtactatcgtggcggtgagtacgactacctgctgaactccgac

SEQ ID NO: 11782 - DNA, 600 bp, Unknown
  gut microbiota DNA sequence
aaaaacatcaaatacttctgatttatcatatattaatatatgttgctgtgttgaattaatttaggatagttcaagaactatctatcaacacattgattctttccatattgcatcttcgtcaaatatttggtgtgcaatagggaagtgttgggactgttttcaataagtcacgaaattatattaatagtgagtacaaaacagaccttttttcgtcttctttattgtaaaaatatagattggaatgaaaaatcgactgaaacaacgaatatttgcactttctctattagcatggacagccgtatgccctgccgatgcacaacaaacacgctcacttagggagcaatttcaaaatccgtcagacgaagcaaaaccctggaccttttggtattggatgtatggtgccgtgtctaaagaagggattacagcagatttggaggcaatgaaacatgctggattgggaggtacttatctgatgccgattaaaggtattcatgaaggcgcccaatacgatggcaaggcgcagcagctaactcccgaatggtgggagatggtacgtttcagtatggaagaagcagatcgtttggggctgaaattgggaat

SEQ ID NO: 11783 - DNA, 6673 bp, Unknown
  gut microbiota DNA sequence
atcacaaaaagagcggctagtcctgcggtagccactaacgcataccagtttgctcccaggaactcacaaaccatgttgtaaccatcagccgagatgattgcaaccaagttcatcgccatgtgaaatgttagaaacaggacaagggcgataccggtaacgctcatcaccactttccttcctacagatgaattacttaaccacataaatgattgaatttaaattatttaattgttagaactaaaatttcgacgttttacacctcttacggactgcaaaaataggggaaatagattgattgagcaaggaattaaagaaataattctttaatcgctaatctttccgattttttcaccattggctgctttcttgcgtaaggcgcgtggagtgtcaccaaaagagtctttgcagaagtgcgcaaagtgggacagagagtcgaatccgtatcggttacatatctctgtgattcgcatattagtgtgttggaggtcatccaggatgccttcccgttttttctccagtatccattcgtatacggggattccgtacatgtttttgaagagtcggcggaaggtcgtggttgtgtaacctcccagatgtgcaaattcttccacacttttcaccttgctgtaattttgtatcacgaagtattggaagctctccgtataagtactgatcgggtagaagaaagtctttaattgaggtagcggatagaaattggtaatcaggaataccaattccttacatttcagttcgatatatttgctgcaaggagatttttcattgaggaagtcgggcatactgctgataagggaatgaattctttcgctcatcaccagaggggtgtaggtcaagggtgcttccgcttgatcttttatctcattgtaacggtcttcgcagagtagagggagttcgttgaaccagaatgtgatgtattcaacgtccgtaagagccagtatttctattttagacccgatggcctgtaggataaactgcttttcgtgtaaggtatttcccgggtactcttcactattgataagtaattcgcctttaagcatgaaaagcatacaattttgcgtgcacttatctttaggaatgtgttctcctttgggtaagttcttatatacgagagtgttttcagtagctcttggacaccctgtacaattcttatattgtatacaaaatgaatcttctggcatcggtcttattcgtgaattattatcatcagggaacaaagataggattttttgtgtaaacttgtgctctttctgttgattattggaagttatatagtaatttttgaacatcattttatgctgagagtgcatacttttgtggttgaaattcataaaatattaatcgttatgctaatacctagaaagattatcttttctttgtttctgttggtcggtgtatgtctttatgcacaacagaaatcttttgtaagttcttatgtgcgtggaaatttctacaacaggggacgtgtcgctactgaaagtctgcgggcaagcgacgaccttattctattaaatgtccatcccaataaggacggatcgctctcttttgagaaccctcgtgcatttcaaggtaaaggagtcactacttgggagggattgataaaatccattcgtgctgaggtgaaagggacgaaggcgaaagtacggattggagcttccagtggtcagtggaaggcgatggtggctgatgagaccgcccgtacggcatttgcaaaaaatataaagaaagtgctccaacaaaataagcttgatggcattgacctggactttgaatgggcggagaatgcgaaagaatatgaggattacagtttggctattctcaagatgagggaagtgctgggcgataaatacattctcagcgtatctctgcatccggtttcttataagataagtaaggaggcgattgctgccgttgattttatttcacttcaatgttatggtccttcaccggttcgttttccggtagagaaatattgttcggatatacagatggtattgaaatatggtattccgaaagagaagctggtggcaggagttcccttttatggagtgacaaaggataactcgaaaaagactgaagcttattttagttttgtgcagaatgggctgattacgagtccggcagagaatgaagtaaattataaaggagaagtgtatgtgtttgacgggcaagataatatccgtatcaagacacgttatgcgaaagagcagggcttgaaaggaatgatgagttgggacttggctacagatttgccgttggataacagccaatcattgcttaaagccatgattgaagaattgaataaagagtagagtcgtagactgtaattgtcatttaaacgcagattctcgcagatttgaatatcagttctttgcgagaatctgcatttagttttttatacctgctttatctgtttcagataatctgagggtgagacaccgaattcttctttaaagcattggcggaaatagcctgtactgttcattcctactttataggcaatttcagatatattaaacttcccttcgagcaacagccgttccgcattctgcattttcaccttccggatatattcgttggttgaaagtccggtaagtgctttcattttccggtaaagagtggaaccgctcatacacatcttgtcggaaagataagtgatgtcaatcttctctgaagagaggttttcttcgattaaaagagttattttctcaataaactcattatccagcttgcttagagcctcggctattatgatacgtttctcgttcaaatccgtctgattacccgaaacaggctgtgcttggaattgggtaatcagtttctttctcgattcgagtagattattgattcggctgcgcaaaagagaagcgctgaacggttttgtcaggtaagagtcagcgcctacctcataaccttcttctttgtcctgtagcgaatctttagctgtcagcagaataataggaatatggctggtacgtacatcctcctttaactgccgacatagggtaataccatccattataggcatcataatatcgctgacaatgatatccgggatgtggctgagcgcctgttgttttccttcttctccattatcggctgtgattaccgcaaaagagtcggagaaggattcggcaatgtatttctgtatttcttcattatcttctacaatcagtaagatcggtttgccattgtctactgtaggttctgaagtgttttcggaggtcgttgcttgggcagtatcctcttttgccgcaggttcggtagagtcggtgtgcaaggcgttgggatagatattatccgtcaagaggctgatgcagaaagtgctgccttcgttttgcacactttctgcacggatttctccttcatgcagctctacgagattctttaccaaagccagaccaataccggttcctgatgcctgatgtttgccgctttcctgatagtaacggtcgaaaatatgtggcagtgcttcggcggaaattccgtatcccgtgtcgcttactttaatttccgtatatgccacctcattgcgcacggtctgatacaggcttagggtaatacatccttgttccgtatatttgatggcattggaaatcagattgtccaatacgatggtgacgatttccttgtcaaagaaaagaagcatttcttctttttctatctgaattcggaaatcaatctttgtcttttgattcagttctttgtatttgagacctatttcatagatcaaaggggcgatgttgcctttgcagacacacagccttttgttttgtgtctctgtctttctgaactccaatatctgattgatgaggttgagcaggcgtaatgcactttggtggatgaccgacaatttctgagcttgttttaccgggagtgaggtatccttttgcatatcctccagcggaccgagaatcaaggttagcggtgtacgcagttcgtgtgtgatgttggtatagaaacgcaggcgttcctgatttaattcttgttcttgttcgtgattcttcttttccaatgtgtaaaggctttccaaatccagctttttcttatatgcgtgaaggatgagatatacaatgccggcagatatcaggacatagataagctttgcccaccaggtgagccaaaggggcgggttaatccggatagtcagggaggtggcttcttccggccattcctggttgtgaatgcgcgctttgataagaaactcatattttccgggaggaatgttccggaatgtcacgctattgttttcattgactgtgtaccacgaattttctagtcctttcagcatatacacatattccacttgattgaccagagagtagttttgtacgttgaatgtcagcccgaagctattttgtgcatgggtcagttcaacctgttctcctttggatacattgatgaacaggtcattattttcgagattgctcaaccgtcccagtactttcatttcggtgatgatagccgacggattggcttggtcgttcatggtgatatccggatcgaaacaacatactccgttgattgaaccgaaataaatcagtccgttcttgttttgcgttacgcagccgcttgagaaactgcctgccgggacatcgtccgaatgaccgtaattgtagaagcagtttttatccgtgacgtagcaactgattcctttattattactgaaccagatattacctttcttatcttccgttatggcacaaatattggtattgagtaagccatctttccgttggtaagttttataggtcagtgcgtcggttgacgggaagcataccagtccttctcctgtccccatccacattcttttctgtctgtcttgtatgatctggttgatggtgttggagcagaaaccttccctttgtacgaaggtttgaatcaattgcaggtccggactgtatactccaagtccgtctccgaaagtaccgatccagaaccggcctttctcatcctgtgcgatggcacgtacaaagttactgtgcaattcgctgtttcccgtatgataatgccggatgatttccatgttcagaggattcagtacgatgattcctccactgtatcctacccagatattatgtcgggagtcttcgtagattgtacggacatcctgattggattgtcccatcagagagatggaacggaaagttctgttgcggctgtcatagtaactgattcctccttggaaagaaccgaaccataagttgcctttagagtcttgcagggaagtgagtataaagtttgaaggaatttctccggtttcttttttatagatagcggtgcgcttgtccccttcaaatacattgattcctcctccgtccgtcccgatccacacccgtccttgtctgtctgtgcaaagactgcttgccactttgttattcaggctgttctcattgccgggaatgggagagtagctcaatgttgtgaataaaggaggggtactgctgatgaaattgattcctcctccccacgtccctatccagatattgtcaaaagaatcttggaatatgcatcgggcacttgcattggagagacttcggttatcatctccttcttgtatatattcgagggagatctggtccggtgaaagaaacatactttgctttagatccagtatggtaatgccattcagctcggaggctatccatagtttgctgtcatttagttgtttgatggcgagtatgcggttacataaggcttcgtgcttgtcgtttttgttattcttgaaggtgataaagttactatcggcagcgttgaagagagccagtcctttgtctgttcccagccagatattcccgtttgtgtctttggtgagacatcgtacatcatttccgggcaggctcatcggattatccggttcgtgtcggaagttttttacacttttgtctttcagcgagagaatgctgaaaccaccgctaacatggccgatatataaatttccgcctcctccgtccaatacggtccatgtttgttcgtcgggcaagccgggaattgtgtttttattgtaatgggtaaattgtccgctgttgatgtcgagatattctatacctctataataggtactgatccacagtccgtcttcgctttgtgtagaaggggcaatgtctgttacgtcattggttatcaggctatgcggatcctccggattgtgcaggtagggagtgaatacctgtttgtcataattataggcatttaatccgtcacgttgggtcgctatccatatcacaggacgtttagtgtcggcatacacccggttaagttcattaccggtgattccctgactgttttgtgaggggtcattcttataataggtgatgaagtgggttccatcgaacttgttaagcccttcttctgtagcgaaccataggaagccttgtttgtcttgtgtaatgctaactacataattattagacagtccttgttcgattcccaaccgttttacggaataagtttgtgctgccgactgataaacggacagcaagaataaaaataaaatagaagcaatgtgtcttttcataactcgtgcctattcgtttcatttacaggctcaaaaatagaaataaatattttatttagagtatgtaaatcgtgcattgcatgatttatgtagcttctctgcatgatttttatcggttgtatgtatcttattcacttatat

SEQ ID NO: 11784 - DNA, 17904 bp, Unknown
  gut microbiota DNA sequence
atagtaaataattagtctctttcaaaataaaatgcctttctttgcatcagcatagttcagcacggttaactcttataatattagcatgaaacgaactgataagaaagcaacattcggacaacaggcaactaaggtcacacaattggcagacacacttagtcaggctatttccaggaaagaatttcttgaaggagattctttgccttccatcaatcagttgagtgcacactatggagtatcgcgcgatacggtgttcaaggcttttcttgatttacgtgaacggggactgattgactccactcccggcaaaggttactatgtgaccagccaggtgactaatgtcttattgttactcgaccagtatacccctttcaaagaagctttatacaacagtttcgtcaaacgactgcctattaattataaggtcgacctgttgtttcaccaatacaacgagcgattgttcaataccatcattcgcgaatccgtaggaaaatacaacaaatatatagtgatgaatttcgacaacgagaaattcagcacagcccttaacaaaattaatcctgcacgactgcttcttctggacttcggtaaattcgagaaaagcaagtatttctatatctgtcaggattttgatgaatctttctaccaggcattactgacgttggaagacaaaatgtacaaataccgtcaaatcgtattcctgttctccaaaggattaaaacatccgcaaagcagcaaagaatattttatccgtttctgcgaagaacaaggattctcatacgagatacaggaagacattgaaaatctggtagtacagaaaggggcagcctatatagccatcaagcaacaagacgtggtaaaggtggtcaaacaaggaagattggagggactgaaatgtggaaaagatttcggcctgctggcatacaatgatattccttcttacgaagtgattgacgaaggaattacctcattgactattgactgggaaatgatggggaacgaagcggcaaacttcgttctcaatgacgcctctgtacagaagtacctccctaccggaatcaggcttcgaaaatccctctaattttttttgccgcacattcagcacagttcagcacagagttcaattaaccatataatataaaaaacatgaaaaagtatccgaaaatcgggattcgtcccaccatcgacggtcgccagggtggcgttcgtgaaagccttgaagaaaagacaatgaatttggctaaagccgtagccgaattaatcagcagcaatttgaaaaacggtgacggaagtcccgtagaatgcgtgattgccgacagtaccatcggccgcgtagccgaaagtgcagcttgtgcagagaagttcgaaagagaaggtgtaggttccactatcactgtaacttcttgttggtgttatggtgcggaaacaatggatatgaacccgtattacccgaaagcagtctggggattcaatggaacagaacgtccgggtgctgtatatctggcagcagtattggcaggacatgcacaaaaaggacttcccgcattcggaatctacggacatgatgttcaagatctggacgacaacacaattcccgaagatgtagcggaaaagattcttcgctttgcacgcgccgcacaggcagtagccaccatgagaggcaagtcttatctgtcaatggggagcgtatctatgggtattgccggctctatcgtcaatcctgatttcttccaggaatatttgggtatgcgcaatgaatctatcgacctgacagagattatccgccgcatggaagagggtatctacgaccacgaagaatacgccaaagcaatggcatggactgaaaagtattgcaaggtaaacgaaggtgatgacttcaagaaccgtcccgaaaaacgtaaaacccgcgagcagaaagacgcagactgggaatttatcgtaaagatgatgattatcatgcgtgacttgatgaccggaaacccgaaacttaaagagatgggattcaaggaagaagctttgggacataacgctatcgcagccggcttccagggacaacgccaatggactgacttctatccgaacggtgactatccggaagccttactcaatacttccttcgattggaacggtatccgtgaagcatttgtagtagctactgaaaatgatgcctgcaacggtgtagctatgctgttcggtcacttgctgactaatcgcgctcaaatattctcagatgtgcgtacttattggagtcccgaagccgtgaaacgtgtgaccggcaaagaattgagtggtctggcagcaaacggtattatccatcttatcaattccggtgccactacgctcgacggttccggtcaatcggtagacgcggaaggcaatccggtgatgaaagagccgtggaatctgactgatgcagatgtagaaaactgcctgaaggcaacaacttggtatccggcggaccgtgactatttccgtggaggcggtttctcatccaacttcctgtcaaaaggtggaatgcctgtcactatgatgcgtctgaacctggtcaaaggtcttggtcctgtcctgcaaatcgcagaaggatggacagttgagattgacccggaaattcaccagaaactcaatatgcgtaccgaccccacatggcctactacttggtttgttccccgcctgtgcgataaaccggctttcaaagatgtatattcagtaatgaacaattggggagccaatcacggagctatcagttacggacacatcggacaggacttaatcactcttgcctctatgctccgcatccctgtatgtatgcacaacgtagaagaagaccagatcttccgcccagccgcatggaacgctttcggtatggacaaagagggtgcagactacagagcttgtacaacttacggtcctatttataaataagattaaaacgcagattatgattaccaacgaacatattgaacagtttctatcacaggcacatcgctatggagctgccaagctgatgttatgcagtagcggcaatctctcttggcgaattggtgaagaagcattgatttcaggtacggggtcttgggtaccgactttatataaggagaaagtttccatctgcaatattgccagtggcactcctaccaatggagtaaaaccgtcaatggaaagtaccttccatctgggcattcttcgcgaacgcccggatgtaaatgtagtcctccattttcagtcggaatatgcaacggccgtttcctgcatgaaaaacaagccgaccaacttcaatgtaacggcagaaattccttgccatgtaggttcggaaataccggtgattccctattaccgtcccggttcgccggaactggccaaagcagtggtagaagccatgttgaatcataattccgtgttgttgaccaatcacgggcaagtagtatgcggaaaagatttcgatcaagtatatgaacgggctactttctttgaaatggcttgccgtatcattgtccaatccggtggagactactcagtactgactccggcggagatagaagatctggaaatctacgtattgggaaagaaaacaaaatagtatccggaaacacataccatgaaagatacgcatagaaacacttatttagcagcagactttggaggaggaagcgggcgtattatcgccggctctcttctccacggtaagctggaattggaggaagttcaccgcttccccaatcgtcaggttaaactcggtaatcatgtttattgggattttcccgccttgtttgaggatatgaagaccggattaaaacaggccgcacaaagagggtatgacgttaaaggaatcgggatcgatacttggggagtcgacttcgggcttattgacaaggatggtaatctactaggaaacccagtttgttaccgggatgcacgaacggatagaatgccgacagaagtgttcaagttcttaaacgaacagcaacactatgccgataccggtatacaagtaatggcgatcaatacgttattccagctttacagcatgaaaaaaagtaaggatgcgcaattagacgcagcccaacggcttttattcatgcccgaccttttcagctactttctgacaggaatagccaacaatgaatattgcattgcctctacatccgaactactcgatgcacggcaacgaacatggtctttatctaccattcgtacactcggacttcccgaacacttgttcggcgaaatcatctatccgggtactatcagaggaactttaaaagaggatattgcccaagaaacaggcttaggatctgtagacgtaattgcagtaggttcacacgatacggctagcgctgttgccgcagttcccgctacggaatctcctatcgcatttctaagttccggcacttggtcgctgttgggagtagaagtagacgaaccgatacttacagaggaagcgcggctggctcagtttacgaatgaaggtggcgtgggaggccgtatccggtttctgcaaaatatcacaggtttatggattctgcaacgtctgatgagtgaatggaaaacacgtggcgaagaacagagctatgacacgctcattccacaagctgccgaagcaacgattgcttccatcatccctgtagatgatgcactattcatgaatccggtaaatatggaaaacgctcttatggattactgccgacaacacgaccttccggttccacagaacaaagcggaaatggtgaaatgcgtgctccaatccttagctttcaaatataagcaagcggtggaaaaactcaaccgttgtcttccttcttcaattcgccaactcaacattatcggtggaggatcacaaaataaattactcaatcagttgacagccgatacacttggcattcccgtatatgccggtccggtagaagctaccgcaataggaaatatcctgacgcaagcaatggcaaaaggagagatatccgatcttcacgaactgcgagagattgtaagacatagcataacaccacaagtttatcatcctaaaaaatagaattataatgaccatgaaacacactaaacagtccatcatctcaaaagatggcgtcagttatcttattccctttattctcattacctcgtgttttgcgttatggggattcgcaaacgacattaccaatccgatggtaaaggcattctccaaaatcttccgaatgagcgctactgatggtgcacttgtacaagtagctttttatggaggatatttcgcaatggcttttcctgccgcaatatttatccgcaaatactcctacaaagcaggtgtattgctaggactcggaatgtacgctttcggagcattcttatttttccccgctaaaatgacaggggaatattatccgttcctaatcgcctacttcattctgacttgcggactttctttcctggaaacaagttgtaatccttacatcctttctatgggaactgaagaaacagctacacgacgtttgaatcttgcccagtcttttaatccgatgggatcccttttgggaatgtacgtagcaatgcagtttatccaggcaaaattacacccgatgtgtaccgaagaacgggtactgctcaatgatagtgagtttcaagctatcaaagaaagcgaccttactgttttgattgccccctaccttattatcggtctgattatcttggctatgctcatcgtcatacggcttgttaaaatgcctaagaatggagatcaaaaccacaaaatagacttcttccctaccctcaaacgtattttcatggaaacacgttatcgtgaaggtgtaattgcacagttcttctatgtaggcgcacagattatgtgctggacatttatcattcaatacggaacacatctgttcatgtcaccggatttcggcatggatgaaaaaagcgcagaagtactttcccagcaatacaacatcatagcaatggtcattttctgtgtcagccgttttatctgcacttttatcctgcgttatctcaatgccggaaaattattgatgattcttgctatcttcggaggtcttttcacattgggcaccatcttccttcaaaacattttcggactctactgtctggtagcagtttccgcctgtatgtcactgatgttcccaaccatttacggtattgccttgaaaggtatgggagacgacgccaaattcggggcagccggtcttatcatggctattttgggaggttccgtcctgcctccgttacaggcatgcattattgacatgaaggaaatcggttggcttccggctgtcaatgtttcattcattctgccatttatctgtttccttgtgattatcggatacggatatcgcacagtgaaaagaaactggtaaaataaagataaatatcgaccttttactttgaaagcaaaaaaaagagtatgcctctttcggaagacatactctttttttatacttttgtgaaataaccatgttatgtaaaaatgactataacggaaaacattcgaaaagagttacagactttagtagattccaagtatcaggaattccattctgccctagttcccgggacggaaaatattctaggtgtacgcattccacaactgagagtaatggctaaagaaatagccaaaagagatgattggcgtatattcatcgaggcaaccgataccaagttttatgaagaagctatgcttcaaggaatggttatcggacgatctaaaacggcacttgacgaacaaatgaaatacgtaaagagatttgttccccgcatcgataattgggcagtttgtgacatattttgcagcgagctgaagactgccgtaaaaaaaggaaaagaaacagtatggcaatttatacagccttatttaaaatccccccaagaattcgagttacgtttcggaattgtaatgcttttccattatatagatgaagaacatattgacctactgttgaaatacaccgactcattctgccatgacgcttattatgcacgtatggctatggcttggatgatatcaatctgtttcgttaaattccccgaaaagacaatggaatatctgaaacatagtaagctggataactggacctataataaatcattacagaaaacgatcgaatctctccgcgtagataaaagaactaaagatgttcttcgaagtatgaaaaggcgttaatctgcgttttgttattcattatgacctctttatctttttccttctacttctgcgtctctgctgcttacggcgactgtaacgttgccatctcttataaatcatccaaccactcatcaaggcaacgacaacaaaaataaggatagtgataccgactcccagattatctcctttgatacgcgaccaaatatcaagaacttcttttgtcttatcaccaaaatcacgaatcatggcacaacgttccactactttgcgatccggatattgtatcttatcaatctgtatactatcggcatccggcccaaagaaataactcaagtcggaaaaatatgtgagagtggtgtcttgcttttcttccaaaatctcaggagtagcaaccgaacttacatagccgcagaaatccatattgcgcaaagcaatgtccggacggcacatgaagttaataaaataactggctgctttcggattcttcgcatatttaggaatcacccaaccatcgtaccatatattactcccctcttcaggaaccacataatccaagtccactcctaccgcattggcttcctcaattgcccatatcgcatcaccactccacgtcatattcagccaagctttgttttttgtcatcatttccttgccaaagtccgcttcccagccgacaatattcggtttcaactctttcagatatttctccgccaactccatcgcacgcggagagtaatcgttcatcagttcctccaccgtcaccgttccttcttccaactctttcgcatgggcataaatgatagcagtaccgtatgcatcacgataactatctttcatcagtatttttccggcatacttcctattccaaagacactcccatgaggttgcgaccgaatcgggaatatatgcacggttatacaggattcctgctgttccccacatataacataccgcataacggctcgcttcctctcccggttggctcagcttattgatttgctcacggataaatggagctacattctgcatataattaggagaatgggcaaaattcgtatcaatgggcaaaagcaaatgtttcttcaacatacgctcaataatatattccgaagggcataccacatcgaagtcctcatggcctttctctatctttgtcaacatgatttcgttgatgtcgaatgtctgataaacgatacggatattctcccccgtctgctccttataatacgcttgaaaatcttcgagtacactatctccgatataatccgcccaattataaatcttgagaatccgctcacggggctcgccggaattgtaacacccggccaaactcaacactaacaggataacaggaattatctttttcatcttatttacgtagtagtacatttagtaatccgttaatcttttttcttcgctttccctgcccgataattaatcgcaataagcaatgccagcactacaacaaaaataatggctgaaagcgggcgaagttccggtgtcagccctcctttacgggcatcggcataaatataggtagaaagcgtctccaatccttgattgccgatggtaaatacagtcacggcaaaatcatcaatagacagagtcaatgccagcatgaatccactaatcatccccggacgaatctcaggaacaatcactttccacagggcttgcataggagtagctcccaaatcgagggcagcctcataaatattcgggttcatctgtttcagacgaggtaaaacgctcaacacaacgtatggtgtacaaaaagtgatatgagcaagcactacggtagtatatccttgcgtaatccccactgaaacgaacaaaaggaaaagcgaaataccggtaataatatctccattcagaataggaatactattcacaaaaccaatcgccttacgcgaacgggatttcatgttaaagatgccgatagcggccacactccccaacaacgtagaggcggttgcagcaagcagagcgatagtgatcgtattaatcaaggcattcatcaaagagtgatgtgtgcccgtagtgaaaagcgaggtataaagcttagtggaaaagcccgtccagttgcccagtacttttgcttcggtaaatgaatagatgacaataatcacaataggagaataaagcaacaacagcaatatccataaataagcctgagccagtatcttctttaccataatcctcctccttcgttagcgttatctttatcatccgtactgaacaaggaagtagctgcaatcagcaacagcatgataagcgaaagcgccgccccgtagttccacatactattattgatattctcctgaatcgttgtaccgaaaagtttgatattgttcattgtcaacagttcggcaatggcaaaagtcgaaatcgtcggcataaacaccatcatgataccactcatgactcccggcatagaaagtggaagaaccgctttcagaaagacttgcagaggattggctcccaaatcttgcgcagcctcaatataactatgatccatcttctgcaaagtgttgtagataggataaatcatgaaagggataaaattgtagaccataccgaatatcaatgccccctcacccagcggcacactgaaaaagtcgaataaggcaacagtagctaacgtacgcaccaggatatttacccacatcggcaggataaacagaaccaccatcgttttagaacggttcagtttactgttactcaatatccaagctgcgggataccctaacaaaatacaaacaatagtagtgataatagcaataccgatagagtagacaaaggtattgatagcttcgggatgttcgaagaatttctgaaagttggcgagcgtcaaatgaccgttatcatcagtaaatgcatacacaacaattaagaacaacggtatgaccacaaagatcgctgaaaaaataatgtaagggagagtccaactcttacgtgatgacaaaaacactaaaaacctcttattcacttcctttcctgttaatcggttattttaactacacgaatggcatccggggggatagtgatacctacgcggtcgccatcgtcccatacatcattcgtatctacaaacacattctcgtcccagtcggacaacacagtcaaatgataatgatctcctttataaaggataaacttcacctcacctgtcaacgccccgtcttcctcgttatcctgaagaatcactttatcaaagtctacttccaccttaacgtttgtgtcaggttctatgttttccaccggagtacaatcaaagctacagccaagaaattccacatgagtagcatccagcattttcccttcgaaagtattgcatacacgctctttcttcatgatatgaatatcaaacggttttaccagcagccccacttccactcctacttcaaaatgatgataatcctgcacaaggaattcataaccaccacaaagtaccgtcatttcataatgtacacctttgaatatggaagtctccaccactccggtcaattgtgccatgtcggatacagggaaaatatacaagtcttcgggacggatcacgacatctaccggaacattctcaccaaacccctcgtctacacattcgaactccgtaccacagaaacgaacgagtttatcatgaatcattgtaccattcaagatgttactttctccgataaaatccgccacaaacgagttgataggctcattataaatatcgatcggcgtacctatctgctgaatctttccttcgctcatcacaacaatcgtgtcgctcagcgtaagcgcttcttcctggtcgtgagtgacgtacacaaacgtaattcccaaagatttatgcatttccttgagctccatttgcatatccttacgcattttcaggtcaagtgccgccaaaggttcatccaaaagtaatacttccggctcattgacaatggcacgggcaatagcgacacgttgttgctggccaccggaaagagaatcaacatcacgatattcataatccgtcatccctaccatcttcaaagctgctttcactttcttctgaatggtctgtttcggtgttttcttcagcttcaaaccgaaagcaatattgtcatatacattcaaatgcggaaacagggcatatttctgaaacaccgtgttcaccggacgcttatggggaggagtttgtgttatttccttacccgaaattcggatctcgccctctgaagctgtctggaaaccggctatgagacgtaacaatgtggtttttccgcaaccggaaggtccaagtatcgtaacaaattcgcccttcttcacgttcagactcacatcatccaatgccgttttctcgccaaaatacttcgatacatggctcacctcaatgatggatttatcttcttgcatattcatactaaagtttgggttgcaaaggtacacatttctgcggttttcacctacgtgttaatctaatataacagtgtttttcgaggccagatagaaaaataatctatctttgcataaatatttattcactaatcttacaaaagcatgaaaaaattaagtcatttagtcattgcaacggtagccttaggtatggtagcttgtaccggtggaaacaaagtcggctatgttgttacaggtacagtagaaggtgcagccgatggtgacaccgtttatcttcaagaagctaatggtagaaatctgatcaaactcgatacagctgtgatctctaagggtacgtttactttcgaaggaacacaagattcggtagtaagccgttatgtcacttgcgaagtaaacggagaaccgttgatgattgatttcttcctcgaaaacggaaagatcaatattgccttaagcaaaaaagatgactctgctaccggtacagccaacaatgacgcttaccaggaactcagaggacagatcaatgatatcaacaaaaagatgaatgccatctatgaagcaatgggtgacactacattgagtgacgaacaaaaagaagcgaaacagaaagaaggcgctcaattggaggaacaatatgacaatgccatcaaagaagctgtaaaaaagaatattactaacccagtaggagtattcttgttcaaacagactttctacaacaattccactgccgaaaatacagaattgctggaacaaatcccggctaattttcagaacgatgaagcaatcgtgagaataaaagagctgactgacaagcagaaaaaaactgccgttggtacgaaattcattgatttcgagatgaagactccagatggaaaacctgtaaaactatcggattacgtaggtaaaggtaaagtggtattggttgacttctgggcaagctggtgcggtccttgccgtcgtgaaatacctaacctggtagagacttatgccaaatataaaggtaaaaacttcgaaatcgtaggtgtatctctcgaccaagatgacgctgcatggaaagatgccatcaaaaagctgaacatgacttggccgcaaatgtccgaccttaaattctggcagagtgaaggtgcacaactttatgctgtaaacagtattcctcacactgttttgattgacggcgaaggtactattatcgcacgtggtctccatggagaagaactacaagccaaaatagcagaagttgtaaaataagtcaccgctattaatctgtggtggaacaactgtgttgaagctctttgtagcaaacagaaaaaatttagcccctgcatcctcagagattgcaggggctaatttttatatctaaagtagcagggagaatcctcccccctaccttacattttcaattaaacaaaccagcgaacatagcagaagtcctgacgatgtggaagttccggatttttgggaaacatacggtaagacaccttgaagctacctgcattcgacaggctatgtttaacctggaatgtatacaagtcgccttctttctttatcacattaaacggctctaccgagtaaacatgttgtttaccgtctgcagtcgtataagtagtaaccaattccagtcctactgcatcattcagacctttttcatcgattacataagtgattgtatattcttttccgctttcgatatcgcctttcttcagttcttctaccttatcgcaagatacgatttcgatagaatcccatttagcaaccacttcctctttccatgctgcgatttctttcgctttcgcattgtcattggcagccaaagcgtggaaacgttttgcttgcttgcaatagaatttgctataatagtcatccaattgacgcttcattgtataatgaggagcgatttgtgcgatagaattcttcacaactttaatccagccttcagaatatcccttcttgttacgagcataatacaacggcaggatttccgtttcaaggatactgtaaatagtagcagcatccaactggtcttgatgttcctgattctggtaagtacgtttttcagtcaacgcccaacctgcaccttcacggtaaccttccagccaccatccgtctaatacagagaagttaacaacaccattcatcaaagctttttcaccggatgtaccggatgcttccaacggacgagtcggagtattcaaccagatatcaactccggaaaccaaacgacgagccaactgcatatcgtagttttcgaggaagataatcttacccaaaaattccggacggcgagagatctcgataatacgcttaatcaaaccctgtcctgctccatcgtgcggatgagccttacctgtaaacaggaactgaaccggatagtcaggattgttcacaatcttagaaagacgttccaagtcggtgaacaacagatgcgcacgcttgtaagtagcaaaacgacgaccgaaaccgatcagcaatgcatttggattgattttatccatcaatgaaacgatacgcgaaggatctccctgattcttcagccaagtatcgcggaatgacttacggatgtagtcaaccaacttattcttcatggtcatacgagtctgccagatctcctcatcaggcacattgtagatagcttcccaaatcttaggattagactggtcgaaccagaagttttcattgaaatatttaaagtacaatttcttccattccgttgcgctccaagtcgggaagtgaacaccattcgtcacatatcccacatggctttcttccgggaagtaacctttccagatagaagagaacatttcctgagacactttgccgtgcagccagcttacaccgttcacctcctgagaagtattgcaagcaaaaacagacatacagaaacgttcgcccttgtcaccggcattgttacgtcccaaatccatcaggtcgtcccaagtgatacccattttagcaggataaccacccatatatttgccaaacaaaccttcatcgaaatagtcgtgaccggcaggaaccggagtgtgaaccgtataaagagaagaagcacgaaccaactcgatagcttgattgaaagtcaatccggtagctacataatcacagatgcgttgaacattgatcagtgcagcgtgtccctcgttacaatgataaatatctttcttgatacctagtgctttcaaagtcaggataccaccgatacccaacaggatttcctgtttcaaacggttttcccaatccccaccatagagctggtgagtgataggacggtcgaactcgctgttcatttcattatccgtatccagcagatacagagagatacgtcctacatttacacgccacacgttagcatgaacataataatccagataaggaacgtctactaccaatggcttgccgtctgcatcgagcacacggtcgataggaagctgtccaaagttctgtgcttcataattagcaatctgctgtccatccatagacaaagtttgcgtaaagtaaccgtagcgatacaagaaacctaccgcacacaaatcaacattgctgtcggaagcttctttcaggtagtcaccggccaatacacccagaccaccggaatatattttcaggacactgctcagaccatattccatactgaaataggcaacagaaggacgctggctatccggcttcacatccatgtagtctctaaatttcgtataaacttcattcatccttctcagaatcaccttgtcttttgtcaaagcttccagcttttcatagctcatgcgttccaacaacagcacagggttctgtccacattctttccaaagttccggatctagatctctaaacagttctgtcgcttcaaaattccatgcccaccaaatgttgcgtgcaatttcagacaacttctccaactctaccggtatacgtgatttcacagtaacctctttccagttgggaatattcacattactaactttgattttcataatgttttttaattaacttattgataataaattttctcttaactaagttgacgcttcattgcattgcgcaaagcaatgtcataagcctcataataatattgtataaagtgtttccacaaagcctgttccgctacttctgcggcacgcttgcggatttccttcacttctttttctgtcttatcggcaaatagtgtaattgtatctttaataccatccgccacttccgaataattatagtccgaacggcgcagcacctccactccatcgttaatgcctcgttggttcttcaggctatttacccaaagtccgaatccggccagatctgtagtgattgtcggcacatggaatgcaacgctttccaacggagtatacccccacggttcataataagaagcatatacgctcaaatcctgtccgagcaatatatcataataatccttattcatgataccgtcacgaccatccaagtagcaaggaacgaatatcaccttcactttatcctccggacgattgcccattccaagatatttcagcatatccaacacctggtcatgcgtcatgttatgcagccaatgggtaatgaacggcacttcaagcggagtatcaaaactcttcttacttttcagacgttcctgcaaatcttcacgcggatcacctacccaaccggggacattgataaacgccagcacattcttatgcaagttcttatccctgttcaggcggttcaacgattccagaaatacgtcgattcccttattcttaaactcatatcttccactggttcccacaattaacgtatcatcgcccagatttgttcccaacaatttgttcgctacattcaacatcaaggtacgcgcacgtttacgctttccggtgaatgtacctcctttcggcacaaagtcatcctcgaaaccgttcataaggattacatctgccggtttatccagcaattccttacattcgttgttggtaatttcgcttactgtcgtaaagcaatccacataatgcgctgtctgcttttcaatcgaatgcttcgactgcatattcagttcctgagccatctggtcaccattgtaagcaaatagataatcatacaacggtttgttgttaccagcaattgaacggccgatagaagtagcgtgggttgtaaaaatagtagccacctcaggcacagcttcctgtacataaagcgctcccattccggtcatccattcgtgagcctggtataccaccttatccgtctctgtcaagttataacgatagaaactctctaccacttttcccgcagcgtacgaaaacatggaagcttcgtcataatcgccataagcgtgcaacgaatctacttgataacgattccacatttcagtgtatatatcgttctttttctcaaaaaaaggttggaaatcaacaagaatgactatgggttcaccggggatattccatcgtccgacacgaacagaaagttcatctttctcaagcgcatgcttcttccaagcagcacacagattatccgactcgatgaacagagggttttcctttccttgccacacatcgggacctatgaaaaaaattctgtcacgaaacttttcctgcaatgtatttgcccgggtcgacaagaccgtatatatccctcctactttattacatacttcccagctggactcgaagatataatcgggggttaataaatcttttaccatataatatattaaaactctttttagtatgcgggtacaaaagtacacattattctttgaaaaataatactttatgcaaaaaagatgagttaagaagaagaaagaaagaacctcatccagtaaaaaaagaatatccccctgcatatgcaaagctccatatacagggggattgaatgttttttattaggaatattcctgcagaaaaaattatgctaatgcactaccgatcaagaaggttgcagctagagcaacgatagcataaagttccgggaatacagcaagaatcaatgtgttgctaaatacattgtgtccctgaccgatagcagcgataccgtttgcacaaacctgtccttgacggatagccgagaacaaagccaccaagcctaaagcaatacctgcacccaaaacggcagacgcctgaatagctgtaatctcaggagttaaaataccaaaaatagtttggaacataaaataaccggcaaaaccgtaaagtccctgtgtgcccggaagggctgtcaatacaaggaagttaccgaatgcactgtcgttctttttcaatgctccgatagcagcgttacctgcaatagttactccgtaagcactaccaatgcccgacaaaccaaccataaccgcgatgccaatataggcaataaacaaattcatttccataatcttattctatttttattgtttaattcttaaaatattaattttt

SEQ ID NO: 11785 - DNA, 22666 bp, Unknown
  gut microbiota DNA sequence
ctgtaatcccttattcctgattcaccttcggcacctcaatgccactcggccaaagttccgcatccgtcttactataagcttccacatgatcgaccgttttccaataaggaactactttcgcattgttcccatgccctgtacggtctactacttccaagccggttccttcattaaacttccaataagcacacaaagcaggctcgtcagccggattaggaatatcatacatattctgataaatctgttcttgcgtacgggctacactccaaatacgggcttcacagatttcaccgtcaaattggcggctcaaatcatgagacaaggtataagatcgtccgaaatagaaattatggtcaccaccattgccaaattcatcatcaggcactttatcacccaaactgatgctagtcaggtcacttttaccatgactggtactaatgctctgcaactgcccgttcacataataagcgatagtagcagtagccaaatcccatgtcaacgcaacgtgataccactcacccgccaacaacagcttttgtttactggcatcgggaaatttcccgtacgtggtctgcacctgcaactgctggttcggaaagttagcatcaccgatacgcatctggagatacatctcaatccccataatagaggatatttccggttggaagctattcacccgtataatcgcttccatcgtcacggcactcaagttattcacaacatcagctgtcggactgcccttatcaaatcccggaacggtgacgtagacattcttcaagtttattgccgtggttatggcactggagcgacgcaccagataatacatggtacgtgagccgtccattattcccactccttcggccccactaatggaaagcggacagaggtaagtagcgtcaatctccagctcgtcgagtttcaagaatttgataccgacttcgtcggatgttatctttccggcaggaattgttacggactcctgtgacaactgataatgttcggcaggcagcatttcataatgcgtgtcgttctttgcgttatatgcaccgaccaatgaagggtctacctttaagttcaccttcacatcatcccctgaaggataagacaatttcactgtaaacgttttcgtctggcttgtcactttccggttaaacgtgaaagtttccgcatttttagtagcagccacattcaggtatgccgaattgtcaaacggtgatttttcgctgtaatccgtattgtcgcaggcaaccggcaaaaacaagagggttgcggctgcgaggcactgataaagtttatgtattctcatagcttacttagtttaatgaaccgaagcgggattcaaaaattgaatgcctccgcgagtctgtttataaataatatcagcatcgtaataatcgtccgagatattgtaaatggcaatgcctcccaacggtgcctccatgttgagagcactgtaagcggctccggcaatggcagaacgtgtcactccgttataatcggtcaatgtaccttcgggagttacagccagcaacagatgtccggcggcagtattaccgtaaccggtagccagacggacttccgtctctatgtcatattcgtcggaagcagccgaaatatccagtacgaaataacagaaaagaccgcgttgcgcttccggcaacagggaaggagttccctcaaaaataagtaagcacggtgtctgtcccaatgcatcagccagcgattgcaacgttgccgcatctaccggaacggaagaggcaagcgtaatgccgtcaaacgttcccgcccgtacggcttcggcagcagaggcgatagcagcattctgtttgtctcccggcgtacaatccacataataaagcactctcgttccgtaatcggcacgtaccatcgccatgtcttcccggtcaaaatcagtcaggcggtcggcattgcgcatggatacgatatcaatactgtccggcaaggaacggagaaaatacttttcactggtagccttgtccggagcattgtcaagccgggcataaaccacagcatgcttcgttgctttataagcccgaatgttctgcgtataaacagaatattgttccgggttctgctcctttgctccgttgacatccgtctcatgaatctccatttccgtccaatcgtcacaggaagtggtcgcagtcaacaggaaagcggtcagcagacatacattgaatattgatttatatttcataatcttatggattaaaaaaggttcttgtaaagagctattagttattctcaaccgaatggtctttcgcgtcccaccaaagaggagtgcccgcagcgtcggcaccacccaacatctgtacggctttggctatattggcagcgttggagttgtattcgtctgccggataaggcaggcggcggggaccgatagcgatatccacactgttattaggatctttgttctctacggcaggaagcaatctcggataaccggtacgacgatgttccgcccatgcttccagacctaacgggaagatggcaatccatttctgcgtgatgatgcgttccagattcctctcgaagatttcctttccagccccctgttcccaagcaatcgtaatctcgctcactgcatccgcactataagcgcccatcgggtctacgtacttcaccggcttcttttctgcatccttcacatatttatcggctcccgtagccccgcgctcctcgaacgagagagcgatggctttctcatacaacgcctgcggctcgccacccatgtcccagccacgcaatgcgccttcggcacggaggaaggtcacttctgcggcattcatccaaaggtaaggatcggtgctgctgatgatttgtttggaatacaaattaatcatgtcgtccttcttctcggtgaagataccgatacgcaccccataaaaatcattcacttcctttggttcgccatccacttccactacattggtccctttcacgaacattgcgtccagacgggggtcttcgtatcctttcatgacggaaaccaaatcggcactgatgcggtaatcgttccagttgttgaacaacagttcggaacggttctcggctacatggagcatagcattatcttcattcgcctcgatcactcctgccgctacggcattctgggcgatacgctgcgcttccgtcggattcacataactcatgcgcatggctatgcggagctgcatggaatggaggaatttgcgccatttggagatgttgccgtaatacaagtcctccaacttgcggaacgcttcggaagaaaggtctttattctcttccaacaccttgtcggcctcttccagctctttcagcatctgtgtatagacctgttcctgcgaatcgtacggaacggacaggttctctcccagattgtcattactcaacatctgcgagtaagggataggcccgtaaatatccgtcacacggtgcatgacgcagacacgcaggattttccccaaagccaaagctaccggatcatccgtcacgctcaacatcttgaggtattgagggtagaggtcggtgatagggtcggcaaacggggatttcagccatccctgttcggggttgaatgtagagaacttcattacccatgtatctacgataccttccatatagcctccgtaggcaccgcccgccatagcatccataaactggtacaaatgctcgcgcgtcgggctgacaagcccttgcatcactctcaacgtcgcaccgacaatatgattttcgcgttgcatttcgtcatcatccgcttcgtacatcttgcggttgatgtcactgtcgaaacaaccggacaagggtaacagcaagagcaccgaaagaatgattctctgaaggtaatatattcgtttcatgttcatcatatatatttagaagttaatcttaacgttgaatcctatattccgggtactcggcatcatgaagtagtcgattccctgataatagttgttggtagtagccaccgcttccgggtcgaaaggagccttgcaatagatcatccacaggttgcgtcccacaagtgaaacgttaatgtcgcacacattgcccagccagcgacggggaatggtataaccgatatgcgcttcctgcaggcgtacattcgtcgcgctgtatgtataataggtaggaagtccgctctgcgaagccactacggaatagaaactctgcgggttcacctgactacggtcatttacccatacgccgcccgcatcacgtgcggcagccgatgtctcggacactccgtacagatcaagataagcttgggtagcggagtaaacaatacctcccaaacgggcagtaaccaagaatccggcattgattcccttataagtgaagctattgttccaggcaagattggccttcggaagcacacttcccaactttatgtcacctgcgttatcaacagccgtcacattgccgtcatcatcaatcagcacattgccgttaatgtcacgttttaagtcggcatgtgtataaagatcacccaatgtgccaccttctttcagaataaacttcgctttaccgaaaccacgtccttcattggttttcagttccagcttgtcaacgttgtagatgactccggtttccggatgcacataattgcgcaccaactctacaatctcattcttattggtagaataagtaaagctggtatcccaaccaaaatctccccagcgatgattataagccaacatggcttcaaaaccgtagttacgtacatatccggtctgcacatagagtttgtcgtaacgcgcggatacgggaagttcgggatcgaacgtctggttgtacgtattggcataatagaacgaaccgctcaacttgaaatctttgaaaagcgcagcgtccagaccgatttcccaagaatcggtacgttcggggtacagtttgccgatagggaagttcttttgagatttccagtccatgttagtcgcatcatacgagtaggtaggataagtaaggaaacggggatagggattacctacggaactgaacgaaccgcgcactttcagataatccacccattccggcatttttaccatctccgaaatgacggccgacaagccgactgacggatagaagaaggaagcctgcggagaatgtgtcaactgcgaagcccagtcgttacgtcccgtcaaagtgaggtaaagcatactcttccaaccaatctccgcactggcaaagatagattctgtcgcttcacgccaaccggtctgtgtggcacgcttcttggcattatccaaatcgtatacattgaaaagattgggaattcccgtttcacgtatcggccccgcatatcccagctctttgctggtgataccactataactggctccgatattggcaacaatcgtaaagtcctgaatacgtttgttgatatttatcaacacatcggcgtatgtctgcgaattctgtccgttgttcaccgtataatgcccttgcgtgctaccatcggtcagtgtcgtactagtacttgcatacagcttgccttcatactcgctgtgggtattgtcgatgcggacacggcctgccacattcaaccagtccagaatctgataactcaaacctgccgaagccatataacgcttcttattattgagacgaagattgcggtaagctatccaataagggttctgcatacgtaaatccccctcaccctgcggccaaaactgcacactgatcttgcgcgcctcatcccaacgctcgaagttcttgattacagagaaatcatctccacgaggaaaaagataggcagaaaccaacggattggaatactgtccctgattggtcatattccggtcgttctgaaggatgtagctggcactgacatccagtttcattttatcattcaggaaacttgtcgtattgcggaaagtgaagttataccgattatacctattgttgggtaccatacctgctgaattgacagtagccaccgaaaagaaagtctgattcttgtccgttcccgtagataaagtcacagaattggaatacaccgcaccggtatcgaagaaatcactcggttcatatccggtctgtgcggccgcattcaacttcggtccccagctataaatacttgaattaccggctttgccgttgctcccggttccgtagcgtccttgaaaatccggcattttgaaaggcttcaaccattcaatgccactggagacaccgacctgcaatttccctacgtgtccctttttagtggtaatcacaatcgctccattggcggcattactaccatacatggcagctgcggcagctcccgtcagtacggagatactttcgatgtcttcggggttgatgtcggcaatggcttcggtagctccttttgaaccaaattccgtatcgcctccgcctccgaaattgtacatcggaataccgtcgatgacatacaaagcattgctgctctgctcgatggacttcgtaccacgcatcactaccctgcttgctcctcccacaccggaagaactagtattgatagtaacacccgctactttaccattcaggctgtttacaaagttggcgtctttaatttgagtcagttcatcggatttcacctgctgcacattgtaactcaatgccttttgctcacgcttgatacccaatgctgtcactacgacttcattcaatagtttcgtatccgaagcgagttgcacgctgtacttgttcgctccacccactttcaatgtcttcggagtatagcccacgtaagaaatactcaacgtactgcctaccggagcttccagcgagaagtttccgtccatatcggtgatagctcctatgctcgttccttccaccagcacattcacaccgatgagcggttctccctgttcatccagcacttgccctgcgatacgtttgacagacgcttgctccgcttctttcttttcttgcggaacaatgatgacatatttgcctttcaactgataagtatatcctgttcctttcaggatttcggtgagagagttctccaatgtcgctttttccagagccagactgatggaaggtttgtttttcaactgcgattcgttgtagccgacagaaagtttcgtctgcttttccacttctttcagcgcctcaatgaccgatatgtttttcttatggatcgtaatccgggcactgctattttgagcaaaagtggggatagaaaggagcagacagcacaaaaaaagcataaatactcggctgattgtctgcttattggctataaattcataaatttgctgcatcttcttagtattagtttatacagataaagttagattctcgaatttagtagcgtttgtgtaacgctaatagtaagaatttcgatttcacatccgggggaaggttgcagcttctcccggatattttttccgcataggcttcttgtatattttaaggttaataatcggtgttattcaaatagtccggtagcgggaacgttatttatgacgcaccgtcagataacatttgtcgcccactatcttataatccagattacccgtcacacgggcaataatatccatcacttcttctatggaagcgttctgcccgaaagtcaggttaaaacggtcacttttcaggctgtgaaagctatacacgaatgtataaggatatttgcgttcgagacgggtgaagatctcttccatcgtcatactgcgaaaaacaatctcaccgcgttgccaggctgtgacatcctgcatatccggataagtcacactacccaagcgggtgtgtttattataagccaactgttcgttgggtttcagtatctcttgctctttcaacccgttgtactctaccagaacttttcccgaaatcaacgttgccgttacctcttcctcttcgggataagccgacacattaaattccgttcccaatgccgtgacttggaaatctgccgactttacgataaacggatgtgcttcgtcacgtctcaccttgaagttggcttctcccaccagatagacacaacgactgtctcccgtaaactgttgaggatatagcaaggtactttctgaattgatcatcacttgcgtgccgtccggtaaagtaatattctgcatctcggtggtaggtatataagcctgcaacaagtccggtgcctgtctgttctgtaaagccagataaatagagccagcggatacggcaatcagcaaagccgctgcaatcttccagataaccagccgcgtatgtaaggtatgtactttttgtctcgtctttattccggtgagttctctcatcctctccaacgaatgttgataattgggagtagttgcggattcggtagctttccaaagctgactcaattcggaatccttttcatcggcacgttcgtcatctataagccatacacgaaaatcccggtcgacttccgccggatagtcatgcttgatataacggtctataacgtcacgaatataattcttcataaggtgatatttattgtttctaagaaacgtttacataattaccaccattcagaaagagaaactacggaaagaaccggaagagaataacaaacattaacactttacgaagttcggtcaatgttttgtagatgtggtcttccactgtgcgcagagggatttgcagtttctccgctatttctttgtgagacaaaccttcaaaccggctcatctcaaatatttgcctgcgtttgggaggcaattggtcgagtgtcatcttgacgaggaggagcacttctttataatagagattttcgagcaatgaagtatcttcatcacacaaatcgcctatcaactgcgctttcattatcttatcttcatattcctgttccaccttctgatgtttgaaaaggttgaagatttcatttcgggtaacggtataaagatagctcgtcatggtttcttgctcctgccaaagttcaggacgtgtccataacttaagaaatatattctgagcgatgtcttccgcatcttcctccgatttggtcaacaacttcgcaaagttcttgacacgagggtagttagccgcgtaaaaccgttcaaaacgaacatccaagtcttctactttttcactcatctattctgctttttataatgaaagccggacaaatatagccaattttaatttcagacaaacaaatgtcagtaaaaaacatcccgcctttcagttcatttgaactaaaaaggcgggataaaatcaaaaacaggaaagtcctgtcttattcttcatccatcaggatttccaaaatctggcaagcagctttcgccaccggagtacccggaccgaagatagcagccacccctgctttatacaagaaatcataatcctgtgcaggaataacgccaccggcaatcactacgatatcttcgcgacccagcttctttaattcctcaataatctgcggaaccaatgtcttatgtccggcagccaacgaagaaacaccgactacatgaacatcgttttcaacagcttcacgtgcagcttccgcaggtgtctggaacaacggtcccatatccacgtcaaaaccgcagtcggcataaccggtcgctaccactttggcaccacggtcgtgaccgtcctgtcccatcttcgcaatcatgatacggggttgacgcccctctttcttcgcaaacttctcagccagttcacaagcacgcttgaagtcgctatcgtttttactttctgatgaatacacgcctgatatagttctaattattgctttataacgtcctacgacctgttcgcaagcagatgaaatctcgcccaatgtggcacggacgcgcgctgcctccactgccagttccagcaagttacccttaccggtcttcacacattcggtaatagccgccaacgctttatctacctcagcctggttacgtccctctttcagacgtttcaggttttcgatctgttcaagacgaaccgccgtattatcaatttcaagaatatcaatcggagcttctttgtccagacgatacttgttcacaccgacaatcgtctgctgaccactgtcgatacgagcttgtgtacgtgcagcggcctcttcgatacgcatcttaggaatacctgtttcgatagcttttgccatgccacccagtttttcaatctcctgaatatgctcccaagccttatgcgccaactcattcgtcagagtctctacataataagaaccgccccacgggtcaacattcttgcaaatgtatgtttcttcctgaatatagatctgagtgttacgggcaatacgtgcggagaagtccgtcggaagtgcgatagcctcatccaacgcattggtatgcaaagactgtgtatgtcccaaagcggcagccatagcttcgatacaagtacgtcctacgttattgaacggatcctgttcggtcaatgaccaaccggaagtctgtgagtgggtacgcagtgccaatgatttcggattcttcgggttaaactgtttcacaatcttcgcccacaacatacgcgcggcacgcatcttggcaatttccatgaaatggttcgtcccaatcgcccagaagaaagacagacgcggagcaaatgcatcgatatcaataccggcggcagttccggcacgaagatattcgagaccgtcggcaagcgtataagccaactcaatatctgcggtagcacctgcttcctgcatatggtaaccggaaatggagatggagttgaacttaggcatcttctgcgaagtatactcaaagatgtcggaaataattttcattgagaatgcaggcggataaatataggtattacgcaccatgaattctttcaggatatcattttggatagtaccagccatttcttccaatttcgcaccttgctccagacccgcattgatgtagaatgccataaccggaagcaccgccccgttcattgtcatggatacggacatcttgttcaaaggaataccatcgaacaggaccttcatgttttccaaagaacagatagatacacccgctttacctacgtcacctaccacacgttcgtgatcggggtcgtagccgcgatgcgtagccaagtcgaatgcaaccgacaaccccttctgaccggaagccaggttacggcgatagaaagcatttgattcttcggcagtggaaaatccggcgtattgacggatcgtccaaggacgcagagtgtacattaccgagtacggaccacgcaggtacggaggaagtccggcagcatagccgagatgttccattccttcaaggtcttcttttgtataaacaggcttcacttcgatgtgttccggtgttttccaatcagcggagataccgttagccttttgccattcagcaccgttagcaggctgaaatgcggcatatatatcaatgtttttaaaatcttttctcatcttacttcaatagtttggcgttaaactctttcaaggtatccagcacattgacacggacatggataaagtactcaatacctgcggctttcaatgtatcggcacattccggattaccggcgatgataaacatagcacggccattcaaagctttgaaagcgggaattgcatattccgcatattcatcatcactggaacaaagcaccacgatatccgccttagcagccatagccgcctctattcctgcctcaaccgtttcgaagcccagattatcaatcacttcataaccggcacaagccaggaagttgcaagagtattgtgcacgtgcctgacgcattgccagattaccgatagtcaacatgaacgctttcggacgtttgccggacgcttccgtctcaagacgcaaagcctcgaattcgctggcagcacggtcggataccaaagtagccacatctttctcgcaagtatgttccttgccaccgccacaacaacattttgcctcaaccggtttcttgtcacccgctttttcattaaagttggggaattggttggtgcccaacaatacttcacgacgctgtgccaccgctttatgacgcgctttattgctttcgttcacagcagcctgaactgtccccgctttcaaggcagcatagaaaccaccggcttcttcgacagacaggaagagctcccaggcctgtttagcgatagagacagtcaggttttcaatataataagaacctgcagccgggtcaatcactttatcaaaatgagattcttccttcagcagcaattgctggttgcgtgccagacgctcggagaattcatcaggggtctcgtatgtcttgtcaaatggagtaactgtcattgaatccacacctcccaaagcagcactcatcgcttcggtttgcgtacgaagcagattcacatgtgcatcaaacaaagtaagattgaatgtggaagtttcggcgtgaaccgccatttttgcagcgcaacggcattcaccgttaggacctttattgtcgcaatcacgtacacattcgggcttataagaagctacgatattcgcccaaagcagacgtgcggcacggaattttgcaatttcgaggaagtaattggagctgataccgaagttgaacttgattttcttggcaacaatagcagcgggaataccggcctctgtcagttgattcatgtattcattaccccaagccagcgcataacccaactcctgagaaatataagctccggcattgttcagagataaagcatttacattcagtacacgatagaaaggaagcggttggatggcctcaatcaaagctttgcccgtttgcaccatatcgcctttttccttaccgcgagtcaacatcttattgaagaaatcatagtttatagaacctctcagtttcttcacatcataatctttcttctggaaataagctaccagcagattagccaactcaacgacgtgtccctggcaagtagagaagttcagttcaacgcactcagcttgaatatcattcaacagtgtttcaagatattccgcattgagttcctttgctttcacatggaaagaaagtgaatcgacacccttattcaagatatccaacgcctttgcattagcttctttcgggcattccactctgatttcctgacgaaccagccactcattgttgtctttcttggttcccctcagataagggaattctcctggaagcgcatcggtagtcttcaaaccctccagatcttccatccggtagaaaggtttcactttgaacccttcgttcgttttccaaacgagcttcttctcaaaatcagcacctttcaaatcggctgtaaccttctccatccattgttcggtggagactggagaaaagtctgagaagagtttttcttttttgtctgccatagtttatttaaaattaaaacaagattaatattgtctttatttttatctatctctctaaatgtccgttgttcgacttgcaaatataaccaaatagttaaaacaatactcttttttagggaaaattcgcacagcccggaaaatgaagaataggaaatgggaaatgaaaaattaccattattcatcccatatatacaataggtatagaaattcttcatttttcatttttagttcttcatttatttgatttgctccaatgttatgagtaattttgcacccgttttataaaagacattataaaaactactataaattatggattggttacaaagtttattgtgggaccctagttctgtggcacatatcgtgctcctctacgcatttgtagtggcagccggtgtgtatctcggtaagataaagatattcggagtatctttaggtgtcacgtttgttttgtttgccggcatcctaatgggacatttcggcttcacggccgatacacacatcctacatttcatccgtgaattcggattgattttgttcgtattctgtatcggtcttcaggtggggccgtctttcttctcttctttcaagaaagggggaatgacactaaacctgttggctgtaggcatcgtagtgttaaatattgctgttgcgctggggctttattacctgtggaacggccgggtggaattgccgatgatggttggtatactctatggagctgtgacaaacactccgggacttggtgccgccaatgaagcattgaaccagttgaactataccggtccgcagatcgcgttgggttatgcgtgtgcatatccgctcggtgtggtaggtattatcggttctatcattgctatccgctacatcttccgcgttaatatggctaaggaagaagagaatctgaagattcaaagcggggacgcacaccacaagccacacatgatgagccttgaggtacgcaacgaatcaatcagcggaaagacactgatcgagattaaagagttcttgggacgcaacttcgtttgttcgcgtatccgccatgaagggcacgtcagtattcccgaccacgagaccatattcaatatgggcgatcagttgtttatcgtctgctcggaagaggatgctccggctatcaccgtatttataggaaaagaggtggaactcgattgggagaaacaagacctgccgatggtttcacgccgtatcttggtcaccaaaccggaaattaacggaaaaacgctcggttctatgcactttcgcagtatgtatggggtaaatgtaacccgtatcaaccgttccggtatggacctgtttgccgatccgaatctggtacttcaagtaggtgaccgtgtgatggtagtaggccagcaagatgcagtagaacgtgtagcaggtgtgttgggtaatcagttgaaacgtctggacactccgaatatcgtaactatcttcgtcggtatcttcttaggtattcttctaggcagccttccgattgcattcccgggtatgccgactcctttgaaactaggtttggcaggtggtccgctggtagtagcgatccttatcggacgcttcggtcacaaactccatctggtaacttacacaacaatgagcgctaacctaatgcttcgcgaaataggtatcgtgcttttccttgccagtgtcggtattgatgcaggtgccaattttgtgcaaacggtagtcgaaggtgacggattgttatacgtaggttgcggtttccttatcaccgtcattccattgcttattatcggcgctattgcccgactgtattataaggtaaactacttcactctgatgggattgatagccggtagtaataccgatcctcccgcactggcttatgccaaccagacaactgccggtgacgctccggccgtagggtattcgacggtttatccgctatctatgttcctccgtatcctaacgggacagatgatattattaacaatgatgtaaatcaagcttagcttataaatagtaaagccggctctattcttttaagtagaatatgtcggctttactgttttatcttcctttattcattataccatatattacaacttcagtttcttcactacaaactcctccacaaagcgtaccgtttcttctattcctaaagaggaggagtccacacacagatgataagtagctgccgctccccatgttttataactataataattatagtattccgaacgtttcttatctgctttctccatcatttcctccgcagcctcctcatcaatatgatggatctgacacaaccgtgcaatgcggtcttctttggaagccgaaataaaaacgtttacacaacgcggatgttcgcgcaatatataatctgcacagcgccccacaaacacacaggatttttcagccgccaaatgacgaataacatcactctgtaccttaaataaagcatcattgctcaaacagttggtacacggcatagccccctcactaataaaagggaaccgcattccgaacaacccaccgataataccttgtgaagccttttcatccgctttttcaaaaaattctctacacaatccgctctcttcagaagctagattgatcaactctttatcatagaagtcgatgcccaaacgggctgccaacttctctcctatttcttttccgccactacctaactggcgaccgatattaatgacatagctaccgctcatagtacattttgttttatggtttggtagcaaacatacgaattatttctaaaactcacatcatcagacgaaagttatatttgaaagttacaataaaatatccttttatttcctgcgtccgagactcataaaacccgtcggaagtagccatacgagcataacttttccgtttgccaagaatatccgcccaataagcagacaattcggcttttctctgtttcaggaatcgccaggttgccctcgcattccacacaatctcatcatcctctcctttctggatatttgtcccgctacgcaagatatagcctgcatccgtacgcaactgtaacccgaaaggaaaatccacatagccgtcaaaacggaaattataatagcgggtataggtattattatcattcagagaattaagtgaatactgataatcccatgaagtagaaaaatcaaaccctccccaagtgggctgataagaagctgccatctcgcaattcaacccggtatcacgtgttgtgcttttctccggctgttgacttctatcctcattaatcatactgacacgattactatgtcttccggaggtactcagttttaaagaaaaatgcccgaaacgcttccaccagtcagcactgccatatgtattccaatttccattgatatttatagggtatatctcccgtccaccggtctgcacatcatagagaacaacttgtgtgacactgttcttctccatctgccatcccagattggcggatattccctttgaaggatgttgaaaactcacatgcatagtatgcataaacatctgtttcaaatccggatttccacgagtaatatacaacggatcgctattatccgtcaacggcattaagtccgataaagaaggttgccgggttcttccgttataattaagactgacacgcattttctttttccgccaactcagccatatcataggctgataatcaatcgtacgcattgtggtgtccgcataaagttttccgactttccgatcaatagtacgcttctgcggagtgacacccaacgaagcattaaacatccaagtatcatccgaataattgaagcctacattcaagtcgtgcccattactgcggctatgactcctattacttaaactatccacataccccgcctcataacctgcaggcaaatcaccgaaagaatcccggtttgtcatggaagacaattcatacgtatcacggttgtcccgttcatactgtgtattccaattatatgctgcccggaaatgcaccttcttgccaatcggttgagtaaagctgactcctaccctccactgattatttgtctgaggagactttatatattggtttcgataaagtaccgaatcattcccattcttgtcttccagcttgaaataagtagtctgagacagcgaaaagctctcattatctccccatgaatcagaatttgttacattcagtcctaatgtagttcctttctcattcaaacgcctcataatcccaatcatccaattataacgattggatttattttccgaagccgaacggttctcactacgattgactttcatatccttaggtatagattcaaaatcagcaaacagactctcatgattcacattaggaggagcatcaaaagaagcaccctgattactgctctcattctcgttgggagaaagcccgaaactcccgttgaaatgtatgcgtgtacgcttatcgactttccattcccccatcagactcgaattcatagaccggcttttcgaagtaccctcattggcagaagccgaatactgattgccactcgtcaaatattgttcccgatacatggaagtgatatttccattccggttcaagtcatagttcacatttccggtcaaagaaaacttcttgccgaacttgcgcgtcatattcagcccgacagagttattgatattgtccttataagtgctattctgatagcgattggtagaacgggccataaaagaaagattctctccgttcttattaaaatagttcacctgtccttccaggtccttctttttattatttccatatcctaccgtcgcattcgtcagccaagtcttgttcagttcatctttagtctgaagatcaagcacatactttttctctccagaactgattccggtaaactcttcttcttttgatttcttatcatatactttcagcttgctaatcaaatttgccggcagattttcgagtgccgttttcttatcccccgagaaaaaggattctccattgacattgatctcactgatagcctgaccgttgtaagttaacgaatgatctttcttattatacaccaatcccggaacacgtttcaccagatcctccagataagaaccttcgggagttttataggcagcagcattgataacggtagtatctcccttcatctctacctctttcaattttcccgtgattgtcacttcaccgatttgtatatcatcatccttcagtgtgaccacaccaacattcacagacagcgaatcactcaatatacggtatacggactccattcccatgaaggagactttcaataaatattgccttctgttctgcggctgatatttaagaacaaaacgaccgttcttatcacttgtcgtaccctttacaaaagtggaatcctccttttgcaagacaacaatactagctgaaggtaaagactgtagcttatcacttcctgcttccaacgtctgtactctgcctttgacagttctcgtctgttgagcatataaaattgtatgcatacaacataacaacaaaagcaatacaatcgtcctattaatttccatgtcgataagctagtctcttttagtagttttacgagggtaaaagtacacaatccaactatgattcaagagaaagttctgtgaaaaatcccaaaagctccccacattcttgtttacctccaaattttcatttggacattattctaataaagaattcaaagtcaatatcgacatcaaacgagataagaccgaaatttcgctatatgcgatatataaataagtagcaattttgtagaaacggaataataacatattagaaaacaattcatatatttgcacgatatgtttacaagattgttacaaccaaatgtaaataaaatgataaaacaatccatttacactttcattctattctccttgctatttttggcaagttgtatttctaacaaaaagacttctctcgaagcattcaatcaggatatatatactcctgaatatgcggcaggatttaagatattaggcgcaaccaatgtccaaagtactctgatacaggtattcaacccatggcagggagccaaagaggtagaaatgtcctacttcatatcacgaaatggagagcaggcacccaccggattcatcggttctaccattcctgccggagcaaagcgcattgtatgtatgtcttcttcctacatcgccatgctcgatgcactaggacaggtaaaccgaatcgtggcggtatcgggcatcgactatgtatcgaacccgtatatccttgcgcataaggattctatcaaggacatgggacctgagatgaattatgaactgttgctgggattgaagccggacatcgttctgctatacggtatcggagacgcacagaccgccattacagacaagctgaaagaactatccattccctatatttatatgggcgaatacttggaggaatcaccgctaggcaaagccgaatggatggttgttttgtccgaactgacggatagccgagagaagggtatcgaaatattcagtgagattccgaagcgttatctgtcattgaaagcgctcacggaatcggtcggacaatgcccaacagttatgttcaacacaccgtggaacgacagttgggtgatgccttctacaaaaagctatatggcgcaactagtagcggatgcgggtgcagagtatatctacaaagaaaacagttccaacagttcaacctcgattggactggaaacggcttacgggctgatacaaaaagcggattattggattaatgtaggttcggcaacgagtctggatgagttgaaaaccgtcaatccgaaattcgcggatgcgaaagctgtacgtgaacggacggtttataataataatttgcggctgaccccgacgggcggtaatgattactgggaatcggcagtgatacgccctgacgtggttctacgcgacctgattcatatcttccatccagaactagtgccggattcactctattattacaggcatctggaatgaaacgaacctatgcctagaagaatgatcgaatctttattcaccaaacgtactcgcaattccagatgaagcaacctcataaacataccgcccttttatttattgcattaggtatcgttgccgtactattattattgatagacatggcaacaggagatacgtacatccctgtcttgaaagtatgggcggtgctcaccggcggcgaatatgacgaaacaacgcgcaatatcctactttccatccggttcatacgggtagtagtggcggggctgataggcgtagcgctttccgtcagcggcctgcagatgcagacagtttttcagaatccgctggcagacccttatctgctgggagtcagttcgggcgcaggactgggagtggctctgtttatactaggcgctccgttgctcggatggacgaacttctcgcttctccaatcattgggtatcgtcggttcgggatggataggaacggctgtcatcctattgggagtagccgtcatcagccggaaagtgaaaaatattctcggcgtgctgattatgggggttatgataggatacgtggcaggtgccattatccagattctgcaatatttgagttctgccgaacaactgaaaatgttcacgctttggtcgatgggctcgctcagccatatcactgccacccaactgggagtcatgattccgatgctgtgcataggtctgctgttctccgtagcttgcatcaagtcactgaacctattgctgctcggtgagaactacgcgcggacaatgggaatgaacatcaagcgttcacgcaccttcattttcgcttctaccgcattgctgacaggaacggtcactgctttctgcggtccggtaggtttcatcgggctggctgtgccacacgtcacccggttgctgttcaacaatgccgaccaccggatacttgtccccggcaccatgttgacgggacttatcagtatgcttctctgtgacattatcgccaagagcttcctgctcccagtgaactgcatcactgccctgctgggtgttccggttattttatgggtaatcgctaaaaacttgcgcagattcaaatgatagagcttaaagaactgacattaggatatggacagcgtacgctgttagagatggtaaatgcccggatgactagcggacaactcatcgccctgctgggacgcaacggggcaggaaagagtacattgctccgtgccatgatgggactggaaaagccacagtcgggagaaatcatcctacaaggcaaaaaaatagcctcgttgaaaccggaaaaactagcccgtagcatcagctttgtaacgacagacaaagtacgcatcgccaatcttcgctgtaaagatgtagtgtctatgggacgcgccccttatacaaactggatcggacaactacgaccggaagacgaaatgcgggtagatactgccatacagctggtcggcatgtccgcttatgcggaaacgaccatggataagatgtccgacggcgaatgtcaacgaatcatgattgcccgcgcgctagcccaggacacccctgtcatcctgctcgacgaacccaccgcctttctcgacttgcctaaccgttacgaactctgcctgctcttgaagagactggcacaggaagaggacaaatgtatcctattttccacacacgacctcgacatagcgctgtcactctgcgactctatcatgctgatagataacccgcatatgtatacactgcctaccccagaaatggtagcgagcggacatatcgaaagactgttccgaaacgagtcggtgacattcgacgcaccaaatatgagggtacgtataaaataaacattttatcactaggataaaaatataaataataaaatatgattctcgtaagctgattttttagccaaacaagataaagttattaataaattctctaactttgtggcgttaaggtttcttgttacagtatatacactgttaaggaatgaaaagggaatgccgtgtaaaccggcaacagaacctgctgctgtaaatctccgctccttgtaatcagagagcaaaattgcaacacgaaagtcactggatagtttatctgggaaggcgttgcaaaatgggatgagtcagaagacctgccttgatgctctgatttacacctgcgggatttcgggtagtagtcaaatagaaaataagcaattatcttttatttggtataatagctatatgtccgtttgtgtagattgaattcagatctgaacaaacggattttttatacctataaaataaaagacatgctttctattcaagtccattcatacaataagcattgtatccatttacggtggatattatgtttgattctatctttatttaccacattaccggccatttcccaatccaaggttcggcatcagacttctctgtctgatacacttctcaaactcaaagaagttactatctacagtaatcggat

SEQ ID NO: 11786 - DNA, 22447 bp, Unknown
  gut microbiota DNA sequence
tgtcggattcgaaccaacgaccccgagattacaaatcacgtgctctggccaactgagctaaagaggcgggggtgggtaagctatctatatcgcgccgctacaaccaactacctttgctgcgatcaagccctggaggattcgaagggagctggccgtataggacttacccgttttgcggttgcaaaggtaggcatttttacggattctgcaatagatacgaacaacttttttcaagtaaaacaactaacagactacatttcaagcaattaaaggtacaaaaaaaatctctactagcaacttttattgctttattaactttaacaaccatattccctctatcaaccgatattatttgtacctttgtgcgcaatttataaatgaagatgacagagaacaaaagctatttacagaaatacgccatgcattttggcacatatatgggagcttattggatattgaaattcatactacttccattgatgtttgctataccttttttccaattgctatatgttattctaacgctagccgtgccaatcataggttattattacgtaaaaatctatcgcgacaaagtatgcggaggagctatacaattctcacacgctgttcttttcactatatttatgtatatgttcgcttccctattggtagccgtagcacattacatatacttccagtttatagatcacggctttatcttcaacgcccttgctgatttttggaaccaagcgatagagcaaagtcccgctttgcaagaaaacaaagaacttatgaaagatatgtttgatgcagataaaataaactcgctcagcgctatcgacattaccatgcaaatgctgtcatcggacgtatttttcggaagtatccttgccatccctaccggattaatggtaatgaaaaaagcgaaacccggaaacaatgagccgagttgattgtaatttgtaattcgtaactagtaattaaagaaatggatatatcagttgtagtcccattattcaatgaagaagagtcactacccgaactctacgcttggatagaacgggtaatgcaagccaacggattctcatttgaggtgattttcgttaatgacggaagtacggaccgttcatgggaagtgatagaaaagctaaaatcccaatcggagcatgtaagaggtatcaagttccgtcgcaactacggcaaatcacccgcactttactgtggattcgcagaagcgcagggagacgtggttataacgatggacgcagatttacaggacagtccggacgaaatacctgaactctaccggatgataaccgaagacggttacgacttggtttccggctggaaacaaaaaagatatgatcctctgtcaaagacacttcccaccaaactgtttaatgcaacggcacgcaaagtttcaggtattaaaaacctgcacgacttcaactgcggactgaaagcgtatcgcagagaggtcgtaaaacatatcgaagtgtacggtgagatgcaccgttatataccttatctggcaaagaacgccggattcaagaaaatcggtgaaaaagtggtgcatcatcaagcccgcaaatacggtacaaccaaattcggacttaaccgcttcgtgaacggttatctggatttactctcactctggttcctttccaaattcggaatcaagccgatgcattttttcggcttgttaggatcgctgatgtttctcatcggaatgatttccgttatcattgtaggtagtagtaagctatacgcaatgtacaacaatctatcatatagactagtgaccgactctccctatttttatttgtcacttacggcaatgattataggtacacaattattccttgccggatttcttggcgaattaatctcgcgtaacgcaccggaacggaataactaccagatagaaaagaaaatttgattcacattcaatacttgactatgaagaatttagttcgtatctttttcctattgataatcgttggtgccgctatcggtatccacagttcatgttcggacgaaaatgattgttctatggcaggacgtcccatgatgtattgcacgttcaaaaccaacgatccggataatgataacgccgtactcaatgacacactcgactcgctgacagtcagagcaatgggaacagactccattattctcaacaatgagaaagatgtacatacagtgatgttgccgttgcgctataccagcgattccaccgtatttatcttccaatataatccggtactcaatccagaggatgtagatacagtatatatcgtacaagagagcactccctattttcagtctatggaatgcggttacatgatgaaacaaaacatcatcagtgctgcattcggcaacagaaaaaacagtacggagaaaataacgtctatcgaattacgaaataaagaagccaattcaaatgaaattgagaatttacagatattctttaactatcgcgaccgcacaccggttacgcctgattagtctgcttctactcttttgtatcggtcttccgttactggcacaacagcagcgtcctactcatacacccaaaagagacctgaagaaaaaagagactgtcgagatagatacgattccgttttataacgggacgtatatcggtgtggatttatacggcataggaagcaaaatcttaggaggagacttcatgagttcagaagtcagcattggtgtcaaccttaaaaacaaattcatccctacttttgaatttggcatgggaggaacagacacctggagcgaaacgggtatacactacaaaagcaaagctgccccttttttccgtatcggcgtagactacaacacgatggcaaagaaaaaagagaaaaacagttatttatatgccggacttcgttatgcattcagttctttcaaatatgatgtatcaaccctgccagcaaatgatcctatttggggagatgtaattggcaatcccagcttagaagacgattattggggagggagtgttcctttcagccatttgggcatgaaaggctcagtgcaatggttggaaatcgtcttaggcgttaaagtacgtatttacaagaactttaatatggggtggtcggtacgcatgaaatacaagacaaaagcttctatcggagagtatggcgctccgtggtatgtgccgggttacggtaaatataaatcaaataatatgggaatcacctattccctcatctataaattgcctctttagaatacaatgacaggactagagatttggttgcttgcaataggtctggcgatggattgtttcgccgtatccattgcaagcggcattattttgaaacgtacccgatggagaccaatgctaatcatggcctttgctttcggactttttcaagccatcatgccacttatcggatggatgtgtgtaaaaaccttcagtcatcttatagaaagtatagatcattggatcgctttcggaattcttgcctttctgggaggccgaatgatttgggaatcctttaaagaagaagaatgttgccaactgttcaacccggcaagcctgaaggtagtactgaccatggcggtagcaacaagtatcgatgcattggcagtcggtatttcattcgcctttttaggtattcaggattacagtgatatcctttctcctatcctcatcataggatttgtttcattcgtcctgtcattaatcgggcttattttcggcattcaatgtggctgcggccttgcccgaaagttaaaagctgagttatggggaggtatcattctggtaattatcggaattaaaatattaattgagcatctatttttccaataaaaaagagttttcttattaaatagaagaacgtatgaagacaaaaaagagtttcctttggctggctttcctaattctggcaactatctggatattggccagacacaatcaacaagcaaactacaacagtattaccggtctggtgttcggaaccatttacaatatcacttatcaatatgacggtgacttaaaaccggaaatcgaagcggagttaaaacgattcgacttgtcactgtcacccttcaatgacagttccgtcatcagtcgtgtcaatcgtaacgaagaaatagtgacagatacttttttccaaaaatgcttcaaccgttctatggagatctcccgcgagacccaaggagcttttgacataacgatagccccgctcgccaatgcgtggggattcggattcaagaaaggcactttcccggattccgtaatgatagatagtttgttgcaaatcaccggatatgacaaagtaaaacttgagaacgaaaagattatcaaacaagatccgcgtattatgttgagttgtagtgctgtagctaagggatactcagtggatgtagtcgcccgtctattggatagaaaaggaatcaagaactatatgatagatataggtggcgaagtggtggtaaaaggattcaatcctaaaaacgaccgttggcgtatcggaatcaacaagcctatcgatgattctctctctgtaaaacaagatatacagacggtactcaaagtaaccgatctcggtatggctacttccggaaactaccgcaacttctattacaaagacggaaagaaatatgcccataccattgatccgagaacgggctatcctgtgcagcataacattctgtccgctactgtgatagcggaagattgtatgacagccgacgctttggctacctcatttatggtgatggggcttgaagaagcggaggctttctgtaaagcgcatcccaagattgatgcttactttatatatagtggagaaaaaggaaaattcgagacttattacacagaaggcatgaaacaatatataacggaagctccctgaccattccgtttccttgttttcacgcacaaaaaaacccatccggacttacagtaccggacaggcaaaaaattaaaatatgcaataaaaaaatgatctatttctttaccggtgaatatcgggcattcaatccgtttacgatttcttctgtaatattaaacgcgctatcagcataaagcagattatcgaaaccggtgttgctgaaaatcaagctatatccgtgagtcttattatattctttcaggaatgcgttgatagaatcacggaactgcaagctattcttattgttctcttccatcaagccattctgaagcttattgctcagctcttgcaagtcttgttccaactttaccagacggttatattcctgctgtgctctatcttgtgataggaaagcattgttttccactttcttctggaagtcctgcttttccttattcaaggagttagctttctgattcaatgtcatacgaacattctcgcttttcttcaccatagcctcattcaagtcaatacaaaaattgtatttggccaacagcgagtctatttcgacataagcaattttcattcctgacaattcagcatttgcctgaacgggagttgtagcagtttgattatcagttttgccagcgcattgtgaaaataaaacgataaacgcaagagcagccaaaccgttcatgaggtagttcattctattcataattaataagtattgtttttaataaatttaattcatactatcattcaaggccttttctaactcatcaatagaaaagcgcggcttcttctgtgcctcacgatcctgagactgagcacacccgattccctttttacgcaacgccttattcccactcacatgaccattcgggaacttcccgcccttcgtaaagaatactttcacccccaataaaaccagggaaatagcaactattaacaaagttatcagtatagtctcaaccatttctattaattttgtgaatgcaaagataggctttaatgagatatgagttcagataagtcaatcaaattaaccatatttagcaatagaagaagctaaaaccgcccttctattccttattataataaagaaacaacatggaaaaaaaagacctaaagccggccggcgtattcaagtattttgaagaaatctgccaagtaccgcgcccttcgaagaaggaagagaaaatgattgcctacctaaaggcgttcggagctaaacataatcttgagaccaaagtggacgaagcgggcaacgtactgattaaaaagcctgccactcccggaaaggaaaacctgcaaactgtagtactgcaatcgcacattgacatggtatgtgagaaaaacaatgatgttcaacacgacttcctcaccgatccaatcgaaacagaaatagacggtgaatggctgaaagccaaaggaactacactcggagctgacaatggtatcggtgtggctacggagctggctatccttgccgatgacagcatagaacacggaccgctggaatgtctgttcaccgtagatgaagaaaccggactgaccggagcatttgccctgaaagaaggttttatgagcggagatatccttttgaatctcgactctgaggatgaaggggaaatctttatcggatgtgccggtggtattgactccgtagcagaatttacgtataaagaaatcgaagtacctgccggatatttcttcttcaaagtagaagtaaaaggactgaaaggaggccactctggaggagatatccatctgggacgaggcaatgccaacaaaatcttgaaccgtttccttacccgcatagccaacaaccacgatttgtacctttgcgaaatcaacggtggaaatctgcgcaatgccatccctcgtgaagcttatgccatctgtgcagttcccgaagatgcaaaacatgacgtacgcaccgaactgaacatcttcgccagtgaaatggaagatgagctgtcagttgtagaaccggatttgaaattggttctcgaatcagagactccccgccagacagctatcgaccaagataccaccgaccgcctgttgaaagcactgtatgcggctcctcacggagtatatgcaatgagtcaggacattccgggactggtagaaacatccacgaaccttgcttcggtgaagatgaaacccgaccatatcatccgtattgaaaccagccaacgtagttctatattgtccgcacgcaacgatatggcaaataccgtacgtgccgtgttcagactggctggagcggaagtcactttcggtgaaggttatccgggatggaagcccaatccgcattcacccattctcgaagtagcagccgaatcttacaaacgcctgttcggtgtagaagccaaagtgaaagcaattcacgcaggactcgaatgtggcctgttcctcgataaatatcccacactggacatgatttccttcggaccgacattgacgggagtacactctccggacgaacggatgcttatccctaccgtagaaaagttctggaaacatttgttggatattctggtacatgtccctgctaaaaaataaaagacggataagtctgcgacaactaaagtatggtaacagtgaaacaagagtagctgttaccatactcttgtttgttatctgttcatggagcgtaccggcacaagaaaatatccagttccgtgttgcctgctggaatacagaaaacctgttcgatacccgccatgacagtctgaagaacgattacgagtttcttcccaatgccatacgccattggaattacaacagatataaaaagaaactgagtgatatcgcacgtgtcatcactgctatcggtgaatggaatcctccagcactcataggtctctgcgaagtagagaacgacacagtactccgtgacctcacccgccgttcgcctttgcaagagctcgattatcgttatgtaatgactgactctcctgatctgagaggtatcgatgtggctcttatttaccaacgggatttattcaaactcttatcctcccgctctatttccattcctgtgttcaggcaacatcgcccgacaagagatttgctgcacgtcaacggtctgctgctgaccggagatacattagatgtattcgtctgccatcttccaagccgctcaggcggagcaaaagaatccgagccttatcgactccatgccgctcaaattttacgcacagaagtggatagcgtcctgcatacccgcctccatcctcaagtcatcatcatgggcgacttcaatgattatcccaacaataaatcaattcggaaaatactcgaagcggaagctcctcctatccgttccgatagtttggatatagcaatccatcctgctacctcaccctcatccctatccccgttaaagctctatcatctgcttgcccgaaaagcaaagactgccaacttcggttcatataaatatcatggggaatggggattgcttgaccatttaattgtatccggtacattgctcaacacttccggtaatttcttcactcatgaggaaaaagcgaaagtctgccaacttccttttttgttgaccgacgacaaaaagtatggaggtaaagaaccttttcgcacctataaaggaatgaaatatcaaggagggttcagcgaccaccttcccatctatacagacttcgaactagtactcccctgacaaagctcacacaaccacaggaagtagtttagtgccaccacgttggcacaatagtgacatcgcattggcataacagtgctaacggagtggcacagtcgtgacactaacgtggcatgaccacggcattaacgtgacgtattccattcagtccgaatactgataaacctttaagtcaaacttgggaaccattgccagcaaatggtcaaagatatccgattggatacgttcgtactctttccagattttatttcgggaaaagaagtaaacctgaataggcactccgtacatcgtagcctctttttggctgataatcaaatccagatcttggttcactacaggcaagctgcacaaatagcgttcaatatataccctatatacttgggaattggtcggaaccgtcccttcttctggctgatagtctgccatcaagggaatctccttccggtaacggtccagcatttccggtgtacagaactgtaaagtagtcagatctaaggtaatgttcttcatgaccctccgtcctcccgactccgtcattccccgccaattctgaaatggcgtgctcactaatgtataaggcggaaccgtagaaattgtattatcaaaattctgaatcttaaccgtattcaacgtaatttcctgcaccgtaccattggcttcccccgaaggcagcgtaacccagtcgcccggacgtaccatatcattggcagaaagctgaatgcccgccacaaagcccaaaatagaatccttgaataccaacatcaggatagctgccgacgctcccaatcctgcaaacagactggcaggagatttatttacaataatagcgatgatgacaattccgcccacaaagaaaagaacgacctgcaagacttgaataaatcctttcataggccggttcttcatagattctttaccatcgtaaatatccataatcatcagcaggataccattgatagccaacaacagtgaaaagattatataaatggtacacgctttctgtgaaatcagcaataactcttttccacgaacaaatgccattggcaaaagagcatagacaagaaaagccggaacagtatgaatcagatgatggaacactttacgcttcatcagcagtgtattccatttatgcggctttagccgggtatactgtttcattcctcctatgagaatcgcctggcagagataattcaagccgacagcaatcgctatcatcaatatagcaataatagtttcatcaaaacggtcggcaacttccggatctatcccccaatctatcaggattttattcatccactttcctaaatctactacgagcataacttctgtcttttttaagaaataacagtctggatatacatttggtttagaaaataaaaaaaaagaccggcatccgactcataaagaatcaagacaccggtctacactgctactctctaagcattcttttacaaaggcaagccataacggccgtctactatcttttccaattgttccgacattttcgtcactattttcggattcttctctgctacgttattcttttcagccggatctttctttatatcataaagttgaggtttcatgctgttgcccaattcaatattgacatttttgttatatgcaggaccttttccgggacgcaggtatttccaccgtccatccgtcaccgacagattattctgtgcattctgaagtaccagccattcccgccctttcttttctttacctgtccatgcattcagtaacggttcactatctggagcagccccttccggcaaacggaaattcatcatttgcgcaaaagtagcaaaccagtctatctgacaaagcaacgcatccgaaacggtaccgggacgaatcactccctgccaactccaaatacacggcacacgtgtaccggcttcgtaagcactgtattttcctccacgataaacacctccgggtttatgatcgcccagtaattctaccgcctgatccttataaccgtcatccactaccggcccgttatcactagacaaaatcactaatgtatttttatccagtcccaagcgttccaatgcatccagcacttgtcctaccgaccagtcaaactcaagaagacaatctccacgaggtcccatactgcttttgcctacaaactgaggagacggcacacgaggaacgtgtgcatcctgagtggcgaaatacaaaaagaagggagcatccttgtgtccttcaataaaagatatcgctttcccggttaaagtttccgcaatcttatcatcttgccaaagagcggattttccacctttcatatatccgatacgtgagataccgttaacaatactttgattgtgaccatgggaaggatgcattttcagcagttccggattgtctttcccggtaggttcacccggaaagttctttttataacttacctgaatcggatcattcggatcaagattaatcacccggtcgttttccacaaaaacacacggcacacggtcaccggtagcggccatgataaatgaataatcaaacccgatatcatttgtgcccggtttcaaaggcttgttccaatcctgttcacctcccttgtcgccaagtcccaaatgccatttacctaccacccccgtactatatcctgcctctttgaacatatccgccattgtataacgttccggacgaatgatagacgcggcatctccgtctgcaattcccgttccttccttacgccaagcgtattcaccggtcagcatagcataacgggaaggcgtacttgtagcggcagcactatgcgcatttgtaaaacgtactcccatctttgccaaacgctctacattaggagtgtgaatcgtcttcgctccattgcaactcaaatcaccatagcctatgtcatcggcataaataaagactacattcggacggtttatctgtctttcctgagcagatgtctgagaaaccagacaagaggttaaagccaaaggcaatataccataataatattcttttttcatcttatgttctgaaataataggttatctgtattaaggagctactgtgactccgatctcattcatttctactttagcagtggtggcagcaggcgttgtagcctccagtttgatgaaacgcgcctgtacgcctttgttgaaagtaaccgtttgcggcagaggattgtgcatgatattgctaaactcaccattggtcggcacctccgcccaactctccccatccgtacttacatagaacttatactgaaaagccattgtcggttttgcttccgccttcaagggagcgtatgtaaaggctgacagctgcaccatctttcccaagtcaatcgtcaacggagaagcagccacctgtttccattctttacgaggtaagtcattccaactttccgtctgattatcttcctgcaacggtgttgcatagaacgcgccgacctgactgatatgagccgacaaccggcattcattgattttcactttcagttgactggcctttactgccggaaaacgcagcaaacgtttgtaacctacagtagtaccctgtccgacttcctgccatccctgttcggtcaacacctctatggcaaaggattcaacccgttgtcctttagcgatatcttcctgaagcattaccacattgatttccgattccgatttcaaagaataaatcttctcacttcccgaaaccgcattccactctttccgacctttcactacacgattgtctgcaaacactcttttccggtaagcagcaaaatctttcagtcgcttcacatcggcctcgtgaatcagacctctgcggtcaggaggaatattcaataaaagtactgagttatatcctaccgattggaaatagatatccgacaaatgtttcaacgacttcactttcgtatcttcttccgcatgatagaaccatcccggacgaatagaaacatccacttccgacggataccagaaaagttccgtagcctccgccaacatcgaacggcttcccaaatctttcgctttgctgaatacgcccaaacgtttgttattctcctccgaacgggtgtaaatgcccggagtaagcaccgtcgcactccattcagtttcacgtcccaaacctttttcattaccaacccaacgcacatcatcgcccattattgccatcacagccttcggttgcagacgttgaatcgttttatagaaagcttcccagtcatatacctgcttccttccgttcggtccctccccattcgctccgtcaaaccaaacttcgtgtacctccccataattggaaagtaactctgtcaattggcggataaagaagtcgttatatcggggagaatctccataacattccgcgttacgatcccaaggagaaagataaacgccaaacttcatatcatatttatcgcaagccttacgcaattcccttactacatcgccttgtccttttttccaaggagaagaagctacggaatgtttggtggtagccgtaggccaaagacaaaatccatcatgatgttttgccgtcaacagcaccatcttgaaaccagcttctttaagagtacgaacccattgttccgcattcagttcggatggattaaacagcgccggatcttcttttccatctccccattcacgtccggtaaaggtattgataccaaaatggagaaaagcagtcaactccatttgttgccaagacaactgctggggagtagggattaatcgcgcagccatatctaccttttgctccaaagtcgcattttgaggaaactcaagatgtttcacataataattctcttttttctgcgcctgtcctgccgacttcaccggataaagagtgaattcaaaactctgtttttttaacggaaccaaatactgaggcaatactccgggaccacaagtagctgttcctacgccagcctgctctgcatccaaatgcacagtcaccagtccgtcacgttccaactcattaatatgacgggctttctccaataatacatccgagaaaggaactatgctaaactggaaaggacgatttgaatcgacaaagattccttcaccggaacgatcggtgaatttcgtccaacgcacatctgtacggttaccggtagattgcggagtgacataatagtggaacatccgttcgggtgttgtctgatataagccaattttaccagactggccacggtcagcatacgtttcattgtcaccacgtcccagataagaaacttgatcgtaagtatccgccacacggaaagtcagtcccagacgtgccatagacttgacaatcgcagtatccgattggaaagtagtacgtatctttaatgcaccgttcttatcaagcatatagataaagtcggcagttcccactttctgaccttttgcattaagaagctcgatagtcgcagttgtcgtattcttcccttctttcaatgaggtcaccttttgagtcagattatccaatcccgctttacgccacaagcgagctccgttcttgtcacggttatcattatccgtagccggacggaaaagactaagagtgatcggagtagccaacagttccttaccatccaaagcaagagaagtaagcgctcccgtttctttatccaccgtgaaagccgtctcacccgctttttgcggacgatagcccgtataattcttattgccgacaataacaaactgatcgtatgccacttcccaatcttcggctatcatcggagaagcttccctacgtgtccaactaatattcagataagcctcacggactgtcttcggcagaatcacatttcctaacgacacgtctatggtagcgtgtggttcacagtctaatactttcgtaccttctgcaattttctctccagtatcagccgtcacattccaatgaagttcatattcgttcaggttagagaagtcgtaccagttcttgatacgaagtttcatgttcttcggactcagcagagttgcttttatattctgatacactttcttcacttcgagcagatggggatgtggctgacggtcggcattcaccaaaccgttacagcagaagttgccgaagctcggtattccttccggtccgtaatcaccgccatacgtccaataccatttgccgttcttgtctatttcacggaaagactgatccacccagtcccaaacattaccgccttgtgccattggttcgttttcaaaaacatcccaatagtctttcaatccaccacaactgttacccatcgcgtgcaaatattcgcaaaggatgaagggacggtaaatatcctttttcgctacatacgcttttatctcatctacactacggtacatacggcaataaatatccgtattgtaattcagttcggcacgttcatattgaacaggacgagtcttgtccaccgatttcagccaatcgtatgtacgttcaaagttgataccgtttccggcctcattgcccaatgaccagataacaatagcgggatgattcttcgaacgctcgtacatacgatgtgtacggtccatgtgcgcagtcagccaagtgctgtctttagcaagagaagcaggaccgtagcccattccatgtgattcgatgttagcctcatcaatcatatacaatccgtaacggtcgcaaagctgataccaataaggatgagtaggataatgagaattgcgtaccaggttgatattatgctctttcatcagcttaatatccagttccatcagttccttacttacggtacgtcccaattgggaatgttcgtgacggttagtcccctttaccaataccggcacaccgttgatacaaaaacgcccgttcttgatttccgaagtacggaaaccgacttcacaaccggtcagttcggttactttcccttgtgcgtctttcagctcaagcaccagtgtgtacaaattaggatattcggcactccacggttttacattaggaatcttcttctcttcaaatgctataaaattactcaatccacgggatttgatattgataacatccttcagaacggctttgccgaaggtatccttcagtgtataagcaatcgagcttgccgtagaagacggaccttctaccgtcacttcaagtccgaaaagtccgtctttgtacgtttccttatccaaagaggcattcagtttgtagtcggcgatatattgttttggtgtactgtaaagatacacatcccgctcgataccgctcaaacgccacatatcctgacattccagataagcacccgaactccaacggtagacttccaaagctactacgttctctccttcggtcaatacctctgtaatatcccattcagccgcagttttcgaaccttgattatatccgagcaatttaccgttcacccatacataataaaaagagattaccccctcgcagcaaagtactaccctacgtcctttccaatcggcaggcactttgaaagtacggcgatacgaaccgacttcattttcggcatgaggcactaacggcggattcttcttgaaattgaacatcttatcatcgaactcatacgtctcattgacgtagatagctgttccgtatccctgccgttcccaatttccgggcacattgatgtcagcccaacctcctgtataataaaaaggttgataaaagtctttcggacggttgtccgggttcttcacccaatggaacttccatttcccgttcaaagacatataataaggagattgctcatagcctcccggcttctcaatatcggaagcattggcataaggccatacataagtgtgaggagcgagtttattcagtcctacagcatactggctttgccattcgggcaacggctgtttctgtgccgaagcaaaaacagtagcagtcagtcctgccaataagagtaaaaaagttcgtttcttcaggttcttcatggttattgttatgactatgttgtactattcaataatgatctcatcaaaatatactctcgattcctgtcccggacgaacatggtcggcaggacattcccccgctccattcaccgttacacgaatataccttgcctccgttcctttcatatccatagaaaggtcttcaatataggtgccttcacggaatatttcttcaggagtgtagttcaatccggttacgtcacgataagatttattatcgtctgatacagctatacgtattgatttcggtttatgtacgcccataccatagttcgtgatacaaccgattgtaaaagtattcattttttccttctgctgcaaatctatggtaaaagaaataaggtcgttcttgtcccaacagcaccattcaaagtcagtctgtttcaggcttccacgaacaccattgagcataagcatctcattctgtttatttccaagtatcgtcttagcagtcgctttgttccacgtaatcggcaatacaagcgtctttcccatctgcacaccttctgcaaaggtagcacatttaatgagttgagtccctgttacaatcagtgagtctgaatacacagaagaatttgccacaggttcactgccatcaatagtatagcgaatctctacatcgggacgaatacattccagatttaacttcaacccaccattttccggtgttactttatgctgaatattgtacatcgaacgggcatagacaatacctttttctgcaatatgcccgttataccggtccatagcttgcaggaacgaagcccaatctttcttttccggttgtgtccacgctacttccgccaccgctaccagacgagggaacaaaagataatccacatcttccggtttattgcagaattccgtccacatagaaccttgtacccccatcagcaatgaagcatattccggtttccagtctttttgtaccggttcatagtcatatacatctttcaatgtattattgccgaaatatgtcaaaggttcgaaccattgcggcccttgataacgaatcagatacatgatacgtgccggagtcataatgaaacggtgtcccttttccgcagctttcagtgcagccttgccatatccctgccaaccaagaataatagagccttccggcaagaaactactgttagtcagttcatcccaaccaatcacttcacgacctttactacgtacatagtcacttatccgctgcataaaatagccttgaaggtcttcttcattagccaagccttctttcttcatacgagtctgacacaacggacattttttccaatgtgtcttttgagcttcatcgcctccgatatggatataacgggaagggaataactccataatctcatccatcacattctgcaaaaaagtgaaaacactgtcatttccggcacaaaagatgatttctgagtttcgtcctcccaaaccgggcaatacaccgatatagtccttcactaccggacaagccaatttcggataagccgtcaatgcagcgttgctatgggcaggcatatctatctccggcacaatctcgatctggcgttcggccgcataagctaccatttcctttatatctttttgcgaatagaaacctcctatcggagtcggttctccggatttcggattacgtcgggccggaaacggaacgtccatacgatccactctccatgcgccaacctcagtcaaacgaggatacttctttatttctatgcgccagccgttgtcatctgtcagatggaaatgcagtttatttatcttcaacatcgacatacagtcaatgatacgcaaaacgttctctttaggaataaaaaaacgtgatgcatccagtaacaaggcacggtactcaaaacggggttcatcctgaacattcatgacaggaatgctccacttctcttttttatccgacagactttctctttcgatagatgcgggaagtaattgccggatagtttgcaaagcataaaagaatcccttatcaccggaagccttaacgataatttcctctggagaaacttccaatgaatatgcttcgctctttaaagaagcatccgttacaaaccgaacatcccccttttccgtagcgcccacaaccaacttgggagtaaaaccggctgcattggtaaatcgggaaataagactggctgccacagccgcctgttcctcattctccaccacaaatacagttttgtctgagaagagatagttgccactgcccggcaccaaatgtgccggacgtggaaccaagggtatgtcatgtgtcaagttagtatcagtacatcccgtcgtaactggtagtaaaaaacctatcaataagataaagatatatttaatcatgctgatgtattttatttattctttgtctctgtccggtgaaaagcgaacaggatcattgtattgttcttgcaacttttgcaattcttctttcagttcgttcactacggattcatattcaggttgtccgtaaaggttgtgcatttcgctcggatccgtcttcatgtcatacagttcccaccaattaatgtcattgtaaaaatgaatcagtttataacgttctgtacgcactccataatggcgttttaccatgtgttctgccggatattcatagaaatgataataaagggcttttctccagttttccggctgttttcctttcaataaaggaaccaacgaaactccttgaatatccgatggtatctccactcctgccaattcgaggaaagtcggtgcataatctatgttctgtaccatttcagtaatatctcctctacgatcgaatcctttcggtagacgcattatcaaaggagtacgcatggactcttcatacataaagcgcttatcgaaccagccatgttcgcccatatagaatccctggtcggaggtatagacaacaagagtattatccaacagtcctttttctttcagatagtcgagcacacgacctacattatcatcaagagatttcacagttttcatataatcacgcatataacgctggaatttccagttggcaagttcctttccttgcagattttgcttatagaaatcttctataatcggagcatagaatttatcccatgcggcacgttgtccctcgtccatccgtcccaaaaatttctcataaagagatttcaggcgtgaatttttatccgaccgcaacattttaaggtcgtagatcatatccatatctttcacgacactcatttcctgagcagccgctgcaggacgtccttcatagtcgtcaaagaaattatccggcaatgggaaagttttatcttcgtacaaagccagattacaagtatccgccatccaattacgatgaatagccttgtgatgaatcaacaagcagaaaggtttctccgggtttcgcttgtgttccatccaatcaatggcattgtccgttataagattggtgatatatccatgtttctgaatcgtatcatttttttgtgtgatgaaatccggattataataatctccttgtcccggaacgatttcccaataatcaaatcctgacggcaaactctccaaatgccattttcctaccaatgcagtctgataaccggctttctgcaaaagttttggaaaggtttgttgggaactatcgaaaacacaagtcgtattatcatagaatttattggcacagctatgtttacccgttatcatacaggcacggctgggaccacttaacgaattggctacaaaactttgagtaaaacggacgccatcggcagcaatacggtcaagattcggtgtttccatatagcgagtatcataacagctcatcatctgagccgtatggtcgtctgtcatgatatagacaatgttcaggggaggctgttcagcaggcttttgtttaccggtgcatgaagcaaaagaagcaagggtagctactcccgctaaagaatagaataagtttgattgcagattttccataataaatttgtgttagattgagaaagcaaagatagggagggatccctatcttcacttccacaaatcatcaattaaaatccaatatttttcaatgtagtccatataccgaaaatgtatcactcacctacaacaattttacagtataagattgatcttaagttattaaagatggtttgaaaaatattagtagaaaggataatactttccaggaatcgtttccttatagtccctatttaccagctcgttagattcacgtttataattatcattgacatagaaacgaatccagtctataatcattctcggaccttcggttgcatattttgtaggatcaattgattttagctccgtatcccagcccgcaggaaggtcaggagaaatagtattgctttctccaaataaatcccatcgcattattaaataaagtcccttcgctcccactgaagtacctgttgaggcttttgtaaaaggccatgaatttagcatatcttttgatacttctaaagtagtagaaccattaatacctaattttattgtattttcatctactaattccatccaatagatattataatcttctactttaggaatagctgttacaacacttttcacatcactaattgtttctcccctaacagactgtgtgattgcagttccagaaacattcttaaggatacatattgattgtttagcctctttactcgtagtagctgtcgatgggtttttcacttctatcattggtacaaatccagtcctattgcctcctaagcggactttcacttcaatacgcatacctggatagatgcgagtaacattctgagcccacatttgagctaaagacttacagcaatgtattgccgccgtcccatagttagtaccttctacaccaacacatatattcagttctccttcatttgtaacctgagcatattttgtccaattaatattcaatacaggctgtctattagcatctgttgcattacctaattttaaataatccccagatattgcattattatggaactcaatagcataatcaaacttccactggttacctaattccgcatttggatgtgccataccttctgtgatcttaacagtttcttgtccagtaaaccaatcatcatcataagaaataaacataatgtttggattctcatatacttttgttatatcatacaaattaggatcagctatagattccaaatcagtcattgtaatagtcagtatagattctgtcatcggatttataggagaattactttgtaaattcaatactaactgtaaatctcctgtcatttcataatcctgtttaatagtaacagcggcactttttaccgaagttcttccggcaggaatcgttaaagtaggaggtaagttctcatacaagtcttcttccccttcttttggagtaactgttatttcaagaggaacagaacttggtttatcaattttagcaaccaatacaaactttccaccttcagtcaccacattctccgtgttattctctaatgacattgatatccgataataatcggatactttaattgcttgactcgaatttgccattttataaccacgcgcgaaagcaacaaactccatcgcagtactccccgtcaatccggatttcttcactggaaaatccacctgaatttgtttttcaccttttggaaacgtaacaataccgctaaatggttcaaatacacccgatacatcttcagtaccagctttagccgtaaagtaaatatcaaagtcctcgttagctaccatctcattcccatctgcatcagcatccacattgatatttactttcagattttctcccatcacaaatgccttttcattaatgctcatagtcaacggcactgcttccggcaaaggacgatattttgtttcatcttcacaacctgtcaaacctatagtaaacaagcatattggaagcattctatataatatgttcttcatatctttaggtgagttctatcaattcaatttatcctcttgtatcagacagcagaactctttaactgcccaatttgtgagctttagtcttgcaaatttagcgaatattttctaccccccccccc

SEQ ID NO: 11787 - DNA, 1336 bp, Unknown
  gut microbiota DNA sequence
aacggcagttgtctgatgtgttctatttgcagcctttgcccgtcccgtttcccgatattgtagattgatgaaacggtgatgtagatagacaagccgccgaaaaagaagaacatcacgaggataaccgccagccttttgcccggcgtaatccgtccgcacatccggcgcaggcggtcgtccgcccagtcccgcaccttttcgatgtaatttcgttttctctccataaggctatcttttaatggtctgcaaatccttgttctcggtaatggtgaacgcttcgatgatgaagccgtgcgggttgttgtcgctccgtgtggcgttgagcaggcggcacgaggtcacaaggcttcgcaccgtcaggctgctttcccggacaatcaactggcgggcatacgtgttcaccttgtaggggtactggtcgaagtcgcacttcacgctgtcaatctccaccgtctgcgtgacgtttccggaaatcacccggttgtagtagcccttttccgccaagtccttgtaatagttgaaagcggtcttgtcggcgaggaacagcgagcgtttgatgttgctttcgatagcccccttgtcgggtgagagcgtgaagaaaagttcgtggaaacgccgcacgtgcgacttggcttccacgggtctgttctgcgccatgtcctgcgagagtgccagcatcaggcttttgccgttgtcgaggacgtatatcttctgccgctgcttttcggcgaagctgtacgagttccacacggcaaagcccgtcaccagtgcgcacaggcagatgaataccagcgcaaagagcctgatttgccggaaactcgtttcgatgttcgttaatgacttaaattccatatactaaatattgatgttggttatttgagtagtttcccggttactttcccgcttgccgcaccgaccgccgccccggcgattgacccagcccgtgccacgttgcggttataggcagacgtaccgccagccgacactatccagcttgccaccgttggaatggtgaagtagcccacgatgccgataatcataaagattacatacacggtgctgctcccgtcaggaatgaaattcgggtctgaaagctgctcgatgtctttttgtagcatcagggtttgtatgcgtgccagcacgctgctgaacaagtccgacacgggtagccacaggtaaatggatatatagcgtgaaatccactgggtcagcgtgctttggaaaccgtcatagacggaaatcgcaaacgccagcggacccagtatgcttaacacgattaggaagaacgtgcgcagcgtgtctataatcagccccgccgcctgaaagagcatttcca

SEQ ID NO: 11788 - DNA, 1456 bp, Unknown
  gut microbiota DNA sequence
tttttgcaggtgcgctatggaaattttgaagcgacggaagaacttttccggacaatgcgggctttacaggaagaaatagagaaaggaggcgtctcgtgaaaggaagccgttggtttattatctttatcgtagtctttttgttggtcatgtttgcggtagaatatcatttgccgaagaaatttgtgtggaaaccgactttcggtcattacgacaaacagcctttcggttgtgaggtgttcgatagcctgttgttgtcctgtttgccgcatggatatgcgctgtcgaagaaaagtttctatcagttggaacaagaggatacggtaggacagtgtaaaggtatattagctatagctgatgacttgatattgtcgagcgtggacgtgaaggctttgctgcggatggctgatcggggcaataaaataatgttagtgagtactttatttggcacaaatttggaagatacgttggacttcagaacttactattcttatttcagtccgatggctttaaagaaatatgccgcttctctgttggcaaaagacagtatatgctgggtgggagattctacagtgtattcacgccggactttttatttttatcctcaattctgctcgtcctacttttggatggattcgctccggagtgaggtcttggcacaaagggtgattgactcgaacgagtttcgctatgagaccgaagcggattctttggtgacggatagtctttcgtgtatacctgtcgcgatgtcctatcggcatggtaaaggagagattattttagtttccactcctttactttttacaaactatgggatgttggatggaggaaatggagcctatctcttccgtttgctgtcgcacatgggagatcttcctgttcttcgcacggaaggatatacgaaagaaacggtgcaggtgcagaagtcccctttccgctatttcctttcgcagccaccgcttcgctgggctttgtatctgacgatgattgccattcttctctttatgatatttacggcaaagaggcggcagcgggttatccccgtcatacgtgaaccggcaaatagatctctcgaatttactgaactgataggtacactgtattttcaaaagaaggaccatgacgacttggtgcggaagaagtttacttattttgccgaagagttgagaagggagattcaggtagacattgaagaggtggcggatgatgaacgctcttttcaccggattgcccggaaaacggggatggaggttgaagagattgcgaagtttattcgtgaagtgcggccggtgatttacggaggacgcaggattaatgcggagcaaatgaaagtgcttattgataaaatgaatgaaataatcaatcatatctaaagaagaaatttatggaagagaatacagaacaacggttagatttaactcttttttccgagaagatacaggagttgaaggagcggatt

SEQ ID NO: 11789 - DNA, 13505 bp, Unknown
  gut microbiota DNA sequence
tattcatatattatttcaattaattttacaaaatcaaaagaatatttactataactctatcaattcatcctcttcaaaatcacgaacagcaacagtaccaagaacattataccattccatgggactaacaccatttccaggacgtttacaagtaagattttgttctgtaagaagttcgcctttttttattgcagtacgagcaacgatcgacttacgagctatatttatattacgtctctccgattcagtaactttttttcccccttcaccagcaataatttcaatacgtcgaacattttgacatagctccttgagttcatttggtgttgcagacgctttatgatcaggacctggaaggttcttgtcaagtgtaaaatgcttttcaattagcacaatatctttcatacaagctccaattgccgctacgtaaccaacagaatgatcagagaaaccaattgctatacctgggaattctttatggagtgtatcaatagcactaagatttacatctttatccggtgtagggtactctgtattacaatgaaggatgattagattttcaggtttctcatatttgcaaatgatatctactgcctgatgaatttcttctactgtacacataccagttgaaaggattatcttcttacccgtaatcttaaacttagcaatgcgctctaaaaaaggaagattagtcacttctccagaaggaattttccaaataacttgtccctttttctccagaaagtcaatagaatccatatcaaatggagtagagaaagtatcaagaccgagactaatagcataatcacgaagcttaataaattcatcatatggaagttcaagtttacgtgtcatctcaagttggttctcttcattaccggttgttaccttttgatagtcggccttaggggcataacgggagataagttccgctgccttaaatgtctggaatttaacagcatccacaccacaagccttagcttcatcaaccattctttttgcaagttcaaaatcaccacaatgattacaaccgatttctgcaattatatatatatgtttcatcttcctattctcaattgtatttatgatttgttgatcgtatttctttggctggtacgcctacaactgttgtatgaggtttcacatctttgacaaccactgcccctgaacctactagtgcccaacttccaatagtcagttgaccattaataacagtcccactccctacaaaacttccctcttcgcaaataacatctccattaagagttgcgttcgttgaaacatttacatgatccattacatggcaaccatgttcaataagggcacgagtattaataacacagttatcacctaccgaactaccatgattgagaatagcaagtttgccaataaagcaaccttccccaatagatgctgcatgagatacaagtgcagacttgtcaattacattaataagtgaaagattacgttttttgagtttatcgaaccaaactttacgcttagcattatttccaatagcgacaaagtaaacatactcattaatattctcaatacaatctatactattcccaagaaccggaaatccctgatgatcaattcctcttggtttcacatcatcaatgtatcccatcattctgaaattcatatgatcaagagaatcaagaacagactttgcatatccgcccgctcccactattataagatttttcatacattttttttagtattcaaattagtccccctttttaggaactttataagtgactataaactgaaatatattaagaataaaaaacgttatcaactattggatgttagcaatcagatttgaatatgtttcagttttgtcattccccctctgtcttccctttactcatgctatgctcctgactccaaaatgattcttgttggctaactagagttttaaactaacaatccactaacaaaatcaattattcatccaaacttttcttcaaacggttgaccataggtttaaaagtccaataagttaatcctgtagatataggaactccaattaatggtattactttagaaactcctctcgcaaatgtatcttttgttaattttattccaatccattttgctacttgtttagaggtattataaatagcatatctagttaatgtttgtctagggagcctaatcgccacttgctcagcaaaagccttagaaattttcatagtttccaatgccacttaagaccccatcattcctccagtaaacagtgttaaaatatacgctgcctcatcattcaacttcccttcttcaccctgcaaatcaggccaaccataaagataaagcagtttttacatcaacgcaaagatatgtccatagaactgagcaatatccgcaggaatagtcccattcaaaacccatccaccgggtaatcctgctgaagcagatgtaccacaaaccaacatcaaatgatactttatacatccgctagcaattcttgatatttgtttttaatgcaatactttcaatggagattccttaatgccaatatccaacatatcatgattgcaataaagagctaattctttacgtaaaaaagactccctatctactttcacaaaaggaagagctattgccctcgatagtattttattccacaattcactttcgtttcccatatcatttcatttttaaatattatgttgagaaatcacagtttctgattttcctacttttttctccacaccattttgtttaccacccccgtataactctgaataatcttcaccaccttgttggcaacatcctcaacatacacaggtacaggtatcccgttatccccttcagcattcatagcaatggcagtatcaacagcctgaagaagggatttttcatcaataccggcaaggataaatcctgccttgtccaacgattcgggacgctcggtactggtacggatacagactgccgggaaaggatgtcccacactggtaaagaagctgctttcctcaggcagagtgcctgaatcactgattacagcggctgcattcatttgcagacaattgtaatcatggaaaccgagaggttcgtgacgaattacacgcttatccaattggaaaccactcttctctattcggttacgtgagcgaggatgacaactgtaaagaataggcatatcgtacctctcagctatggcattgatagcattaaacagggaaaggaaattctcttctgtgtcaatattctcctcgcgatgagcactaagtaggatatactttcccttctccaaaccaagacgacggtgaatgtcgctagcctctatatcagcaagattggcatgcaatacctcagccatgggactaccggtcacataagtacgttctttagggagaccgcattcgtgaaggtatctccttgcgtgctcgctatatgccagatttacgtcactgataatatcaacaatgcgccggttggtctcctcaggcaggcactcatctttacaacggtttcctgcctccatatggaaaatagggatgtgcaaacgctttgccgcaatggcactcaagcaagagttggtatcacctaatatgagcaatgcatcaggcttgattgcattcattaatttgtaggagcagttgatgatattgccgaccgttgagccgaggtcatcacccacagcatccatataaacctccggagcggctaatttcaaatccttgaaaaataccccgttgagattgtaatcatagttctgaccggtatgcgccaatactgtatcaaaatacttgcgacacttggtaataactgccgcaagacgaataatctcaggccttgtacctactatgataagaagtttcagtttgccgttatctgcaaactttacgtcgctataatctgtcttaatatctgccataattgtatttattctacgggtaagaaataagtgtccggacaattgggatcaaatgcctcattcgcccacatgagggttaccaaatcgcaagtatcagagaggtttatgatattgtgagtatagccgggcaacatgtgtacagcctctatcttatcaccgctaacctcaaaattcagtacttcatccgtatctatcctacgttgctgaatgagagccttacccgacacaacaataaagaactcccatttcgtatgatgccaatgctgccccttggtaacccctggcttacttatattcacactaaactgaccgcaatttaccgtcttcagcagttctgtgaaactgccgcgctcatctacgttcatcttcaacggaaagacagccttctccttgggcaaatagctaagaaaagtactgtaaagcttcttggcgaatgaattttccggtatctcgggcattagcaatgtttggggctgtgctttaaaagattcaagcaacgaaactatttcacccaaagttgctttatgggtaacaggtacggcgcaataacggccattggcggtaagaacagtcttcacaccgtcaaattcacagtgatgttcattaccctgcaaggcacttatcatttcttttacaagatcatcgatataaagaagttcaagttccacacaggaatcattcacctgtatgtcaaggttgttggcaatgttgttacagaatgtggcaaccgcgctgttataatttggacgacaccatttgccgaaaagattcggaaaacgatataccaatactttagcacctgtttctctaccgtactcaaagaacagctcctcacccgctaacttgctcttgccgtaatcgctcgtaccataacggccgatcagggttgcctgaatactacttgacagcatcacggggcaagtgttcttatgagctttcaaacagtcgagcaatattgatgcaaagccgaagttgccgctcataaactcgctattctctttgggacggtttacacctgccaagttgaagacgaagtcacagtcagaacagtaaacatccaattcctccggattactgtctatatcatattcataaacagcatcaataacaaggccgccataacagcgggcctttccttcctttatattgttgagctcggcacaaagattttttcctacgaaacctttggcgcctgttacaagtatcttcattattcggaacggatttcttttgatttggcacgctctatcaaaccgagatcctcctgaataaagcgcaaacgcataagctgttccttcatcccctcaacatctagacgtgcggtgttgtgagagtgataatcctcaattgctgaaaccttctcattaccttccacaaagaacttgtcatagttgaggtcacgactgtcgcaaggaatacggtagtagttgccgcaatcaatagcttttgccatttcttcacgagtgacaagagtctcataaagtttttcaccgtgacgggtaccgataaccttgacttcggtttcaccgtatttgggatcaatcttagaataaatctgcttcaaggcttcagcaagcacatccaaggtcgcggcaggagctttctgtacgaagagatcaccattgtgaccatgggtaaaggcatagataacaagatccaccgcatcatccaatgtcatcatgaaacgggtcatattaggatctgtaatagtaatggatttgcctaacatgatctgctccacccacaaaggaataaccgaaccacgtgatgccattacattaccataacgggtacaacagatagttgtctgcgcaccttcaccaagttcacgccctttcgcaatagccaccttttccatcagagccttagaaatacccatggcattgatgggataggcagccttgtcagtagaaagaacaaccacattcttcacacgatgatcaatagctgaaagcaatacattgcttgtgcccatcacattagtcatggccgcttccatagggaaaaactcacaggaaggtacctgcttcaaagcagcagccgcaaacacataatccactccacgcatcgcaacatccacagattcacggttacgaacattaccgatataaaacttcacctttgacgcttgttcaggatactgtgcctgaagatgatgacgcatatcatcctgcttcttttcatcccgtgaaaatatacggatttccttgatatcacttgtgagaaaacgacggagtacggcattaccgaatgaacctgtaccgcctgtgatcaacaggactttgtctttaaacactgacatatctttgatattattattgattaattagccttgtattttatcttatactccccataaccataatgtttaccatagccataatacttgccatatttgccataaccatagtaataaccatatttcttcttctgaagatccaagccattgataacaatacagagattaggcagtttattattctcggcaagttcattgatcagggtaaactccgttttacgggtgtaatcagcacggcatacataaacagataagtccgctacacgtcctataagcaaagtatcagttaccatacccacaggtgccgtatccaatatcacgtaatcaaaattcttcctcaagatttcaacagctttctccaaaccgtcacgagccaacaactctgttggattagggggaactgttccacctggaagaatatataaattcttgtttatatcagaatgatgcaccaaatccatcagatttacagtggaattggtaaggaattgagtgataccatactctttcttaggtaggttgaaaactttgttcaatccgggcttacgaatgtcaaggcctactatcacgacttttttccctaacaaagaaaggctgatagccagattggcggatataaaagattttccttcaccactaactgtagaagttaccaaaattacattcttaccattttcaagcataaactgaagattggtacggacattacggaaggtttcgctcatcaaattgttctgattctcaaatacggcaatagctcccatcttttcatctgccaatggaatatcaccaacaacagggagcgaagtcaatttttcaacatcagcacgaccttctatcttaaatttggtcagaccgatcaaataaataacacctaccggaatacctattccaaataccaaagccgccaaataaatcgtcatccgtttcggggaaatcggagtactgtccgcctgtgcctcgtcaataatcttggcattattggctatggcagccaagacaatggcattctcctcacgcttctgaagtagcatcagatacaaaccggacttgatttcttgctgacgggcaatactcacaaactgacgttcctgagtcggagcatcactgatacgacgggaataacgactcgcttcacgaatcaaatcagctttcgttatttcaagtcctttcaacgtggcatccagagtggtctgtatattactgcgcatcgcacggatactggtagtaagattcacaattgccggattgctttccgttgatgtacgtaacaggcgtttacgttcggccaccatctcattataccggtcaatcgcccccgctaccccggcatcctgcaaaccgacattcgcaggcagcacttcgtattcactaccctgcaaatattttttcaaatccattacaagattaatctgtgtctgattttccacccgcttcttttcatattcggcattaccagttaaggcaatctgagcctcacttgttaaatcagtgatacccgcactacgcttgaaattctccagatcgcgttccgtgctacccaattcttttgagatgatatcaatacgctcatcaatgaactcgcccgttctctgggctacctcattcttgtcattgttagcattgatattatacatctcaagcagtttgtctatatagtccttgccacgctgggtattagaattcttaagtgaaacggtcacgacggaagtcgccttcgaggtaggggttatcaacagggaaccggcataacctttcgctacagcaaaaggcctgttaatataagccgtaatatgacgttctgttgttacactttccggacgaagtgatgacaaagtatcattgttcgcaaaaaaagcaaccgtaccttcatcggtaggaaatacggcaggcaatttctcaagatgtttccggtactccttttttcccaccttgacctgcacatccattgcaccggcaggttgcagaagcatatctatctccattgtctgcggaagcctgtccgcttcctgaggggtcagactgaccaaaaccggagaagtacgatacaattccttgtttggaaacttatcttcgtccatataggtcacaaacaagcctaaagaactgactacctcccttgccaatgttctggattttagcacttcaatttcattctctatattacttgatgaagagacaaaaccgtttagccccatcttttccagttcggaagacatattcgcaccgccacccttcttttcatccttaatcagaacagtggcagaaatattatatacaggtgttgtcagacgtagatatccccatgctaaagcaacacaaactattaccgaaactacgaaccatggccaatgaatcagatagcggaaaaggatttcctgaatattgatctgttcttcggattgtacccccgttttttcttttctttcctcaaccatacgatgttattatctgaagattgttactaataaacttgccaatgaaattaaaatagaagtagccgaaaaccatatacttgtactattactgatatccgaattgcgagcctttgccttattcggagtcacataaacaatatcattctgctgcaaccaatagtaaggagaaagaagagtttcagccttattaagatccagtgttatgatttgttgtttaccattggcatcttcacgaatcaactttacattgtcacggattccataaatggtcatatcacctgccatggccaaagcttccaataaattcactttctcattgctgatagtaaatgtaccgggactagcgacttctcctaatacggagattttgtaattgaccatgcgtgcagtaacaatcggagtttcttttatgtagggtttcaacttttccactatcatttgctctacctcctttttggtcagtcccccgactttcaatgtccccaatacaggaaaattgatattcccctcgttatccaccagataagtctgttgggaggattgggaagcgccctgtgaatttccggcagtcaaaccagcagaaccagtcattccgaggttgaaaggagccgccaattcagggttcgtacatgataccatgatagtaagttgatccttaggcattattctggcatcatacagggtttcctgttgggtaacctgtcccacaatttcagaatcctgcaggtagggaactttcttgtatgactggcaggaagcaagcaaaaagagtgcaaacaagcagggaagtatcccaccgacttttttctgtatacttgtagcaatgcaaaatgaattgttcataatatattctagtttattattctttatccaacacctcaaacctcggagaattcttcgatttgaactcgggcaccaccttcttcatcaaccggacggtatccatgatcttgacggcacgggacaacctctcgaactcagaataagtgtcaaggatatcggaatattcataccggcgaaccttagcgatcatgatctttttattttcagtcggaatcgtattctccttatcgctcaggacctcttcgtaaagcttctcaccgggacgtaaacccgtgaactcgatctttatgtcttcaccgggacgatagccagccaattcaatcatacgggtggccagatcgacgatcttgactgccttgcccatctcaaagacaaagatctcattgccctcccccatagtggcggcctccatcaccagacggcaggcctcgggaatcgtcataaagaaacggatgatatcaggatgggtgacggtgaccggaccgccattctctatctgttccttgaaacggggaatgacggaaccgttactgcccaatacatttccgaaacgcgttgtgatgaatttggtacgcccttgcactttcccctcacggatggcacaacccagactctgcacgtagatctcggcaaggcgcttggagcagcccatcacattcgttgggttaacagccttgtcagtagaaaccattatcatcttctccgcaccgtattcaacggccatgtccgcaacctggcgggagccggtgacattcaccaaaaccgcctcacaggggttttcctccatcaaaggaacatgcttgtaggcggcggcgtggaagaccacctggggatggtaattttcgaataccatacgcacgcgctctttaacacggacgtcaccgatgacaggaatgaaatctatatcgggataattcttctcgaattcaagacgcacattatgcaaaggggtctcagcggaatcaaacatgacaagtttacggatgcccagaccgacaagctggcggcaaagttcgctgcctatgctgcctgctgcaccggtcaccaaaacgactttaccacggaattccgcagccacctggcgaaggttgatattgatttccgcacggcccaaaaggtcctcgatcttgatgggacggacccactggtggaagttaccgtcagaatcggcctcactgatcgtcggggctatcagggtcttgagatcattgctcttgcagtattccaaaagacggttttcctcaagacgggtatcctcataacgggaaaacaaaatacctttaatgccacgcttacggatgatgtaatccacatcggaatcgttttcaaaataataaatgggaagatcggccaaacggcggcggctgttgttcctgccataaacataaaagcctgccaccttgtaatgggaactgtccctgagacgaagcttcagcgccacactctcctcgtcggtgccatagataaggatacgggtgttcttcttgttcacccagtccagcaatagatcgtacgtgatgatgagtgaaacacgaaagactgtcagcgcaaccagggtcagaagaccgtcgagaagaaggcaggaaaaacggtatttatcgaacgcggacgtttcggggataacccagaaagaaacggcaagcaggcagacagacttgaacaatacggcacacatgacacgccagagctcacgggcctgggaaaaacggatcgtgttacgatacgtgtggaacaacaaagagccgacaacactacccagcaaagaaacgagaacaaactgacaaaaaacccagtcactcacaggtatatgtgccatataatgaatgacagcataagcgatcaatgaacatactactgatattgtcgtgtcaatacccaaaataatccaatagctcaaatagttcttacgagcgtattgagctatcccccttaatgtcttttccattatagtataaacgataaattgtgtatcagagatacaaagaaatataatcagatactaaaatcaagatttcaccgattctacataaccgataggcatatccacacatgcacagcctaacagattcagtcgcacggcaatcttagtcttaccatctacattgaccagttcacccaccagtccggtcagaggtcccttgatgacacgtactttttcaccacgcgccaaaggggagctgttcatgcaaacagcttcttcggaataatcaagcataaaacggaaacgagccatctgctcatcgggaatcactgccggtgtgctctcaccccgcatcaccatgtagcgactaactgtagaaaaactaaggacttccatacgctctttcggatcaacatggacaaataccatcataggaagaagaacggcctctacttttttacgccggtcgctccattgatgaatctcctgttggacaggaacaaaattttcaatccccattttgtccaaacgctcggcaactttcttctcatgatgcatacgcaccatagctacataccagcgtttagagtgtgctacgccttcccctgtcccattactaggcccagcatttactgatttttggcttgttaaaatcatgtttttttaccccatatacatccgttactttttaggtaacggataaaatgcatcagaacatactctataacgaaaacggaaagaatacaagtataaggaggggccaaccggaaatttgcttgatgttcagcaaaatgaatttaaaatcggacaataaaaagtatagggcatgaaaatgagttcttttcatgctccgggattttcttatactaaaatttaaataaaacgaaaaaaaatgtagaattgcttgtttgctatttatgtttttggctatctttgcaacaaattttacatccgttacctaaaaagtaatggatatagtttatcactgattaacagttgattatctttaattatcctttcacattacaatttctgatgtaagataaatttcctttattcacttctgtcctttcttccagtccgaagcctttcaaataagtctgtgtggtttttatggatttatgtcccaacgcctcgctaatcatttcgatggacactccccgatacttggcaatagtagcccacgaatggcgtaatgtataagaggtgaccggagatttcagatgcaacgccctcgccagctccttcaggctgttgttaaaccagcgaagggcagactgatattcccggtaagccttttcatccttccgtgacttatcaccacaaagaatatcaagcaaataatccggacaaccgggttgggacttccgaacgctccgaagtcggtcgatcttcaccatagcactatccaacacttctacactcatcggcgttttcgtcttgatacgattatagcgaagtatattattttcaagagccgatttttccaaatgtgccagatcggcaaacgacattccacaaagttggaacagcagggaagcaatgtcctgaatgcgacgcaaacgttccgatcggggatcgtcaaacaaaagcctatgcagttcagcagcagtcaaagccctcttctgacaaacatcgattcccgtataagcctcatgaaacaaccgcggcacaaaaggggcattacccgcttccaccccacgattgtaaatgctacgaagcatacgcatatacgtagaaatcgtattaagcttcaatccattctcgtaaagatactgcccgtaaagccgcaggctctcacgggtgatttgcctgaacgacacattacacgtaccacaaaacacactgaaagaaaaaagagcattcttatagacatgcgctgtagaatatctgccttcttcacgtaaacgatcgatgtagagctcgccacaccgactaaaaccttttttgttcgtcatttgcaccattagttatttgattattataccattattggcaagcaacaaaagaacgaatcttttcgaagatagatcgcactctacagagaaaaaagatataatgtattttaatacattctttatttattatatatattagttgccggatggggtgccg

SEQ ID NO: 11790 - DNA, 2485 bp, Unknown
  gut microbiota DNA sequence
ctgcaagaactacttgtctgacacccgggtgtcagtacaacttgatatcctatatcaaaaatgaattaatgtagagttttctcctttagttctttatatctctctatcgcatgtttgcgactcataaggatttgccagcgatatacccaacaggtggtaaggaagtaaatgcctgcctgtaaccataaagctttatattcaaaggctacttcgcttagagtagctcccatattattgattttcacgaaaccattgataccgaaagtagacgggaagatgtaagatacatatttccaaaagggaggtatggcggctcccggccatgaaattccggagataaataataaagggacagatgtaaatacaaaaatcagcatacacgtttcccggttgcggatggcgatagaggcagtcattgcaaagaatatacaggcggctaaataggggacaacaaataacactaatgagtccggttgtcctatttggttgaggctgaatattcttgggacaatatacagtacataaaaagctaccaatatataaatcaagaagtagctcagaccttttccgagtacaatccgtaaagtaccgttgtaatgccggttgatgggaacaaggtctttgaaacggttgttttctcgggcagtaccggcagccaagccaataccgagcaataaggtttgctgaatgattaacaccagtacggcaggaatcagaaaagctgcgaatccggcagtaggattgaatatggaaatttcctcatactctatcggataagcggtgatttcatcctgacggtcagtagtattgctactacgtgcaattttgatatcctgattcatatccagtgaaacggctgtattggctatgagcatggatttataataaagtaatccgctcatatcacaataaatgctgacttgcgtctgttttcctttagctatattatcactaaagtcagagggtatatagataataccatacgcaagtcggtttttcaacatctgtttggcttcctccatatcggcacagtatgaaacaatttggatatcaggcgtagcgtctactttgcgcaggtattcgcggctgagagatgaatgtgagtcatccacaacgatagcggggacctcacgcacaacttcattatcgtaaatgaaactgtataatagcggataacccaatggaacgagtataaagaatatcagtaccccttggtcgcggaaagttgtctgaaactcccgtttccagatataaaacaggtcattgataccttgtactatcttatcttttaattttatatctttcatttagggaatatatttataataaataagtgcttctttcaagcggtgaactaccagaaaaggaagcagcatgaatatcagtaatgccatatagttactccaagaataagccatgctgtacccattgagcgcttgatctacataaataaggaagtagtgacgcaacggaaacagattgctcaaagcttgtaaaacaggatgcatcgccattaccggaaatgaaaagccggagatggagaatgatataactccccataaggaagcgaaactcagtccaagccgcaaagtcggtaaggttcctatcatgacaacaccgcagcattgcgaggcgagaacgagacagagtgttgcgaatatcatcggaagaataccgctattgcaaggaaaatgtaggaaaccatacaggtatacattatagaatatgcccataataaaaaagataaccgtatggggcagtagttttcctgccaatgcaatataaatcgagttattgctcatacgtaaccattcacgtgcggtacggtccttgatttccacaccgattgaatagacggtaaccatgaatataagcaacataagtactcccggtatcaatgtgttgcacagatataccgaatagttcagccacgggttgttcagaggatgcgtatcaatcacaataggttgcagaaatcccatcgcctggccttccgttgcccctttggcgtataaagcggttcgtgcggcggcaccggaggtgagttcccccatcattttcatgtctctgaaaagcaaggagccggcaatcagataagaataattggtgtagaaagaaatcttaggttgccgctggctttgcgcttctacggataatcccttcgggatgtagaaaaatccataaattttcccttcctgtacagcaattcgagcatccgtcacattactgtaatgcgctacgacacccgtctgtgagaaggcatccagattgcgcacgatgttgcgggaagtcgatgagtcgtccatatccactacaccggccggaagattttgcggaagtcccgaatccattaatgtagtgaagaagatatagcagaatagtggagcgataaccatacagaaaaggtagagcggacgtgaaaccaaccgtcggcattccctttgtatgacttgccacaaagctatatatttcttttctctttctt

SEQ ID NO: 11791 - DNA, 30656 bp, Unknown
  gut microbiota DNA sequence
gaattccatcgtcagctccaccaattccgaaacggaaaaggtagcgcggggaagatcgttgctacgacggttgacgcaataggcacaatcgtaaatgcaataattggtaagcatgattttcaatagcgagatacatcgaccgtcctcggcaaaactgtggcatatcccccatcctcccacagtgtttcccagcgttcccggcttattggaacgcaccgtaccactggaagaacaggaaacatcgtacttggcagattctgcaagtatcttcagtttagctaagacgttttcgttcatcattcccgatcttgattcttttcgcaaatatacgattaatattaagaatacaaaaaacagactttcacaagcccggttttcagtacataagttgcaaaaagagaagcttaaaaaataaaaagaggatatatcatgataatataccctctcatttcttctgatatcttagtagtttctaatcttactttttagaagcttccaaagatgctttacggaattctttcattgctttttcgatttccaaagaagctttacgagcgcgagttcctgctgctttgttaccattttcaatctgagcgttagcatcttttgcgaagtcagcatacagagctgctactttttctaccaattctttcataatccttttatttttttcgttaataatgtgtcgcaaaaatacactgtttcccgaaataaacgcataaaaacaatcttttttttgaaatattctttgaaaataatgcaaaaaaaggtcttttcgccatttttacctacctttgtagccatgaaaccgcttacagataccgattatatacatactttgattgctgaaggagagcatcaacaacaggacttcaaatttgaaatttccgatgcacgcaagatagccaaaaccttgtccgcttttgccaacaccgacggaggaagattgcttattggcgtgaaagacaatggaaaaatagcaggcgtacgttccgaagaggaaaaatatatgattgaggcggccgcacaactttattgtgtacccgaagtggaatatacaatgcaaacatacatagtagaaggacgacaggtattggtagtcactatcgaagagacccttcacaaaccggtgtatgccaaagacgaaaccggaaaaccgctcgcctatctccgtatcaaggacgaaaacatattggcgacacctatacatctccgcgtgtggcaacagagcgacaatccccgtggcgaactaatccgttacactgaacgtgaacagcttttgctcgatcaactggaacacggtactctactatcactcaaccgttattgtcgtcagacaggaatctcacgccgtgccgccgaacatctgcttgccaaattcgttcgttatggtattgcagaacctgtattcgaaaatcataaattctacttccggatgaaaagtgaatgatcgcaattacattagagactttatgctaaacaatgatggtactttccggctcatcgcagaagaaagtcggcattcagaatcctgttttcagaaaagagacaatgccggatattgaaaaggacttggaatgttggtgaaacccaactgttttttgtacctttgcacacgaaatatcagcttggttggtatgcaacaaagcaatcacacacgttcaattagtaaattgtaaataataaaattgtaaatacaacaatgggcttatttggtttattcaagaaaaaatccgatgaaacaaaagtcggcaatgtagaagatttcatttctctgacccgggtctatttccagtcagttatcgccactaaccttggtatcacaaatatccgcttcctgccggatgtagccaacttcaaacgtttattcaagatacctacgcaaaacggcaagttaggattggccgaaaagtcagcttcgcgcaaaatgttgatgcaggactatggattgaatgagagtttctttaaagaaatcgattcttccgtaaaacgcaactgccgtactcagaatgatattcaatcttatctgtttatgtatcaaggattctctaacgacttgatgatgttgatggggaatctgatgcaatggaagttccgcatgccgtctatctttaagaaagcactttatggcatgactcagaaaacggtccacgatgtttgcacaaagactgtatggaaagctgatgatgtgcacaagactgcagcggctgtacgtcaatacaaggaacgtctgggatactcggaacagtggatgacggattatgtgtataatattgtcttattggcaaaaaaagagccgaaacgcaagaatgatgacacggaaacgaaaaaataagttgctctaaaatgttagaaaatcgtaaagattagcacgatagaaaaagcggaagtatgaaacttccgcttttttcgtatctttatataccattaaatagagagattgcttatgaaacaaaagaaaatgcttacacttactttttcacaattgaaacaaatctataatcaagaaattccggaagtggtggagatggctgataaaagctcttctgttgaggagtttaagctaaaaatgcaacgatttctggagacttgcagaatggagaataagactgcgaaagaggctagggagcaaattcgacttttactccattatgatggacaggatgtccatgaactgtctacgggacaggatatgtcaatacagacaatacggttgctttatgaatttctgacgggaacattagaaaacatggaattaccgacagacttattcatagaactctttcaaatgttcaaacgattgaaaggggatataatacctttaccgtctccgcaacgtatcaaaaaccggaatgaccgttgggaaacaggattagatgaagaggtacgggaagtgcgggatgagaataaggagcggatgttgcatttactgattcaaaagattgaaaacagaaagtcgaaaccttcggcacgttttcattttgaagaagggatgagttatgaagagaaatacagactggtgagtgaatggtggaatgactttcgctttcatttggcaatggctgttaagagtccgggagagttgaaccgttttctaggaaattcactttcgtcagaaacaatgtatttgcttcatcgtgcccgaaagaaaaggatgccgttttttgccactccttattacctgtcattactcaatgttacgggatatggatataacgatgaagcgatccggagctatattctttactcaccacgactggtagaaacttatggaaatatccgcgcatgggagaaagaagatattgtagaggcggaaaaaccgaatgcagcaggatggctattaccggatggacataatattcatcgacgttatccggaggttgctattcttattcccgatacgatgggaagagcgtgcggaggactttgcgcttcttgtcaacggatgtatgattttcagagcgaacggttgaattttgagtttgaaacgttacgaccgaaagagtcatgggaacgcaaattacgacgcttgatgacttattttgaagaagatacgcaattgcgggatattcttatcaccggaggagatgcgctgatgagtcagaataagacacttcaacacattctggatgcagtatatcgaatggccgtacgcaaacagaaagcgaaccttgaccgtccggagggtgaaaaatatgcagaactgcaacgggtaaggttaggttcccgtttaccagcctatttaccgatgcgcattaatgacgagttagtggagatattgcgggaattcaaagaaaaggcttcggcagccggtgtgaaacagtttattatccagacccatttccagaccccattggaggtgactccggaagctaaagaggctattcggaagatactttccgctggatggatcatcacgaaccaattggtgtacacagtggcagcttcgcgacgaggacatacaacacggctccgacaagtgcttaattcattgggagtgatgtgttactatactttttccgtgaagggctttaatgaaaattatgcggtgttcgcacccaacagccgttcaatgcaggaacagcaggaggaaaaaatatatggcagaatgacaccggaacaggcagaagaattatataagatattggaaacgaagacgggagcagaaaaagatatgaaagaaaaagaagaggttgccaaacagttaagacggttcatgagaaaacatcacttacctttccttgctacagatcgcagtgtactgaatttaccagccatcggcaaaagtatgactttccaattagtgggacttacagaagaagggaaacgcatcctatgttttgaacatgacggaacgcgccgccacagtccgattattgaccggatgggacaaatttatattgtagagaacaaatcgttggccgcttatctgcgccaattggctaaaatgggagaagacccggaagattatgcttcgatatggaactacaccaaaggggaaaccgaaactcgtttcagtctctacgaatatccggatttccccttccatataactgacaaaatgagtaatctgagtattgaagattaatctttctcttcttttacacgtattactatattggcaattattgcagtcaggcctccggtagtgattcccgatgaaaagatacttcgaatcgcttcgggggcttgttgcagtacgtccggcattaattctactcccaagccaagagaaaggctgaccgctaataccaacgtttctttacgaccgatttcctgagaagagacaatgcggatacctgcggcggctaccgtaccgaacataagcaaggttgctccacccagtactggatcgggcattaatgaaaaaacagcccctacaatagggaacaagcccaaaagtacaagcattgcagcaatataataacccacatagcgactggctactccagtcagttgaataataccgttgttctgcgcaaaaatagagtttgggaaggagttaaaaactccggcaaggaaagagttgaatccgtctgccattactccacctgaaactcgtttcagataagaatcaccttcaatcggaagaccggatatcatagaattggcagtcacgtctcccgtcgcttcaatagccgtaatcaagtaaaccagcccaatagctataaaagaagaaacattgaagtcaacgccatatttaaaaggttgaggaatattgaaactcatcagcattcctacattcagagagctcatatcgactttccctaagacaaaagccaaaccataaccaagacaaagcccaagaacaatggaactcatgcgcaggtatttatttccgcaacgattgaaaaacaatacacttaaaagcaccagtgcagcaatagatagattttcccaagttgcaaaggttccgttatccatagcagaatatccgcctccgcaagacacgatcccgacttttatcaggctcaatccgataagtagcacaacaataccggatactaacggagtgatgatattacgcaagtacttaaaagtacggctgacaatcatctcgatgggcgcggcaaccatacaggaaccaaaaattagaggtaatccaccgacaagccctgtggcaataataggcccaataaaagagaaactggttccctgaatacagagcagccctgctcctatcgttccgaaacggcgacattgaatgaaagttgatactcctgaagcaaagagagacatagagaccagaaaactcgtcttctccacatccagtttcaaagcactcgcaatgataagtggcggtgtaatgatggcaacaaagatagccaacagatgttgcaaagcggcaaacagcgcatctttaaaaggaggacggtcttcaacaccgtagattaaatctgttttcatttaattcaatgtccattttagggctagtgtcgggattgcataaaagccatcacgattaccgaagttattacttaattccacttccgagcctatacttaagttgaaattcttatttactcctttaatacggttcaggtttacccaaaactgtggttcggtaaggaagatcgttttcccataatccgtttcctcacgccaccagtcggcaaacccggagaaagtcagcaagttatggcaaaaattaatgtaccaagtacctgtcaattggaaattgttaggtgatttatgcttctgaatgtacttatacatggcactcacagtgaaaccttttgagaaagaagcattgttataagtataggtagcaccggccagataagcattattgtaagaaaatccttttgccaaaccaccgttatattcgagatgtgcggaaaaaggagctttccagaatttcaactcacgggcaatctcccaataagcggaagctaccccatcggaagtataatccatatcaacaaagaaataggtacttccccaagcatcgggatggaatttctctacagtagaagtcagcaaaggacgaccttttaaatctttatcatacagggaacgtccgaaatcataatgcaactgtatgttttgagcccgcaatcccgacacgggccaaagcaacatacaaaggaaaaaagcagcaataatctgtttcatgaataaatgtgttttttaatgaaagcgcaaaattagtcaaacctgcacatatacacacattacttacacagattttttattccaaactattatttcccgtatcccaccataggtatgtaccttcgtgatcttctccatccaaagctttcacaagggcagaatattgctccggatcttctgtttgcaaagtaccgggaaagtgaagtcggcgtaccatcgtctccgaatctatacatccgttcctgctatgattgaaacgtacgggaaacaagcggggatatcccgtacgtcgttgttcagcccaagcttcacagccttcgggaaacatggcaatccacttttgggtaataatcttctccagctttttctccttatcatccgacggattccattttggtgataccttacaacgagcttccacattattctccgtttcataagtgtctacaaaattcgaagctatccgttcgctcttcaagtaatcttctactccatagacaccccattgttcgaaagaagtcatcactccgttccgatagcagttttcttcattttcgtctgtccaaccgcgtaaagcggcctcagcacgtaaaaaccagacttcagaagccgtcatcagaggtgcgtccgtagcctgtgtgaccgacaatcgggacagccctgcataatgattatgtgcaaaacaagttccctgacgaatgccacgatactctcccctaaacttttcatccgtacaaggaacgaaataggctttgagtcgaggatcatcgtatcccgtaagtatagactccattgaagcattcatatacgtttcattccacaccaaattaagttctcccaacggattaatatatcccgattttgtagaaaccgcaactttttccgatcctctctcaaagaaaccgtaatcattatcctttatcttctctatttccaaacgtgccttgtcgggagcgattgatgcaagacgcatagccaaacgcaagcgcaaagaattggcaaacttcacccaagaggaatacttgccatccagcagaatgtcaaaccgggcgaacccattggattccggtttttcttctatataaccgataagagcgacaacggcagaatccagttcattaaagaattcataatagacctctttctgcgtatcaggttgataatgcttttccgcattcgcaaaatgcctgtaaataataggaccatagtaatccgttacccgatgcattacttccactttcaatattttcgtaataccaaacagggctggatgagtatcacgggtagcattctccgactgatatatctgtggaaaaatatacgaatacacatgtgtccacatcgcactgttccaaccatcctgcatattataatcggaattattggaaccaccgttcagaggtttggcatcatgcatatatccactgaacatatccgcattcaaattctgtatcaactggaaaggccaattcttcccctttccgtaatcataattaaaataaatgccttgttggataatccccagacggattccataaccattatcgtcaatgttcagatcttcattcgtaatgccggacagatcggtattataatcgcggaagttacccgtgcatgctacgcaaaaaagccaccatcctatcaaatataaatatatgtatcgtttcttcattttcccttttcagcttttaaaactcacatttcagcgtaaaacccaggctacgggtagtaggcattccgaacacctcgataccttgattatcatttcctgtagaaagtaccagatccgggtcaaaaggtgcttccttatacaagaaacacagattacgggctacaaacgaaagttgcacattcttcaatactttagttttctgcatccattccttagggaaattgtaactcagcgacacttcacgcaaacgcagattagtggcatcatacatataatattccgtcactccggcacgtccgcctaccacattcttataaaatcctttcacattgtctatccgttccccttccagcataacatatcctttatcacgagcatctgcagttatttccgacactccataaagatccatttccgcctgcgtttgcgaaaggactttaccaccataacgccagtcgagcaaaaagtaaaaactgaatcccttgtaagaaaacgtatgattccatcccattaaaaagaccggattggcatttcctactttcaccgtattaccatctccttccaccaacggcagccctttatggtctccttccgtcccataaacaatccttccctgatcatcgcgcacaaaagcttttccatatatatccccgatagaaccgcctttcaccaatttcatagcatagcttgaagaaaaacttgtaggtccgtaaacgaactccttcaagtcatcatgcaacttcacaatcttattcttattggaagaaaagttgagcgacgtcttccatgtgaagtcagaagttaacaccggagtagcattcagcgtaatttcccatcccttgttttgaatatttccagcgttcacataccgataagcaaactcatcaccggcgagagcaggaagcttgaaaaactgattatacgtatttgtgcgataataagtcaggttaattcccaaacggtgtcggaagaacttccattccgttccgaattccatagcatgagtcatttccggttccatttctttaaaaggcgcagcatcatttgcctgtacctcaccaccggcattgacgtgcgaagtggaatttgtgatgtacagagggatatcatttcccactttactgtaagccccgcgtaactttgcaaaagaaacccattcgggcaatttcagccatttatcaagcaatatggaaagaccgacggacggataagcaaatcctgatttctcatgtttggtataggataacgtggacgaccagtcattacgggctgtcaaatcaagaaatatcttttccttataacctatctgagccgtaccgaaaaatgattgcaactgccggtgtgcatctatcttctgatcaatactggcagagctgttcatcacgatattggcaatattaaacacattggcgtatttcaaagaagcattcttcgagtcgtaacgggttgagttcaccaccttatcattgatactgccgccaatagccgcatccagagtaaaatcaccccatgttttcttaaacatagccatcacgtcaccatacatctgcgtttcctgatagtccatctcaagataacgcccgttcactccgcataaagctgttgcggtagaagcatagaatttctgacgcaatttatcagcccaataatccatattgccacgtgcttgtatcgtcagccaaccattcaccttgaaagtgacggaaagagcaagaatgacacgtgtgcgtgtttccctgctttggatacgattcactatccaatatggattctgctcaaaatcttcggtaaacgtatgccaattctgcacattcaaattacgctcttcattataagtttcaaaatgctccttataataagacagatcttcgccacgcggaaaacggtaaagccctactaacggattcatataaaaacctcctgagacgggcttattctcaaccgtttgtttcatgacattgacattgccatccaacttcagacgtttgttgaacatggcagccgtttcacgcagattgatgttatgcttctttaatttattcccttcaataatgccccgtccagtagtattggcataagaaaaataagtttgcagattttcatttccgtgactgacggatacggaagtcatggaagtaagtccggtacggaaaaaatcattcagattatcatgcacctccaaactttccttttcaccccaactatctatcacatcactcaccccatagctattttgcatctgaggtaagctgaaagccttttcaaaagtaagtccggtagagaaatggatacttcttttccctgtagaatttccttttttggtagtgatcaggattactccattggcagccaaacttccatacaaagccgctgctggggcgcctttcaagatactgatactttctacatcctccggattcagattggagataccatctcctccatctcggtttccggcatttgccgttccgccaatcgccgaataagcctgttccggagaagtgttggacatcggtacaccgtctattacataaagcggctgattatctccggataccgaacggactccccgaagagtgattttggcagaaccacccataccggaagaattcttgttgacctgcactcctgcagcttttccggcaagggctgttatcatatttatctcctttacccgattcagttcttccccttttattttctgagtcgaataagccaaagtagattcatccttttcaagccctagagcagtcacaattacattatcaagcatgaccgtattttcccgaagggagatttcaagcattgccctacccgttactttgacttccactgtctcataaccgataaaggaaacttgcagaacagcgctatccggaacggacaaaaagaagctaccgtctatatcactgacagttccgttcgctcctcctttctcacgaatggttgccccgataagcggctcgccgttggtatcgacaacacgtccccttaccgttgccgtcgcattatccgtaggggtttctataaacgtaacttgttccgaagcgtaaccattctcgcttaaaaagaagaatgaactcaataaacaacttacaacaacttgaactctcaatgatattataaaagactgtctattcattatgccacaaaaatacgtaaatattttatatattgcattttttcacattgattttgaacgaaataaacattatcactatttttgcatgaaattaaaatgatacataatgatggaaatcgagaaacatccactagaaccatttcttccggcaaaagccaaactgttaatgctgggaagttttccaccgcagaaaaagcgttggtccatggatttctattacccgaacctgaataatgatatgtggcgcattttcggtgtgttgttttttaatgacaaagactactttctaaatcctacacggaaagcgttttgccgtgaacggattatagactttctaaatgagaaaggaattgcactgttcgatacggcctcatccgttcgccgactacaagacaatgcgtccgataagtttctggaggttgtggaagccaccgatattcccgcaatgcttcgtcggcttcccgaatgtaaggccatcgttactaccggtcagaaagctactgacacactccggcaacaattggatgtagaagaaccgaaagtcggcgattattcggagtttgtttttgagaaacgcgcaataaggctgtatcgtatgccttcatcatcgcgagcatacccattggcattggataagaaagcggctgcctatcgaatcatgtatcaggatttacagttactaccctaaatgtgaaacaacaaatatcaaataataaattagaaatgagtatgatacctttatttttgcagtacccggcatgcagcacatgccaaaaagccaaaaagtggttaacagaaaataacattgagtatacaaaccggttgattgtagaagaaaatcctacagtagaagagctaaaagcatggattccccgtagcggtctgcctataaagaaattcttcaacactagcggactcgtttataaagagctgaaactgagtgagaagttgccaagcatgagcgaagaggaacaaatagaactgttggcaacaaacggtaagttggtgaaacgtcctctagtagtaacagacagtttggtattggtcggtttcaagcccgacgaatgggaaaaattaaaatagttcaaaacttatttacccgaatgtttggagattcagaagtttctactacctttgcagccgcaaacacgggagtagctcagttggtagagcaccggtctccaaaaccgggtgtcgggagttcgagcctctcctcccgtgcaataagaaaaccgcaaatagtcgtcaagccatttgcggttttcttattattgcctcacagataagttactactctcggctcagtttgaaaactctctcttatactaattcttactcgtcttttccaatcctttagcagcctcaaccagtcggataaactctcttcgatatcctctttcatcattattcaccccctgtttagctagcttaatgactttgtcataatcggcagttcctttaaagtcagaatcacgaagcaactgtccgaacatggctactgccgaagcgaaacggaagtcggaagaaacactatctcctttgttatctacaaaaggaagttccattttcctgctgacatccttatccggagctttgtaacgcaatttcacagtaaggagttcatcagatccggtcggtttcagcgtcattttttctttcttttggtatttcaagtcgtctactttacctacatattcattcttcacacctgcgggaatcacttcataaaaagctgttaccgtatgtcctgctcccatatctccggcatctttcgcatcattattaaaatcttcgtctttcagcagacggctttcgtaaccaatcagacgatatgcctggacttgagaaggattaaattccacttgcagtttgacatcttttgccacagtatgcaatgtagcaccaaattcgcctactaaaacacgattggcttcctgcaaattatctatataggcatgattcccatttcctttttcagccaatacttgaattttcttatctttgtagttacccattccatagcctagtacagtaaggtgtacgccacttttccgttctttttctatcaattgttccaatccttcggcggaagaaacaccgacgttgaaatcaccatcggaacaaagtatgatacggttattgccatcagagataaagttctttttagctatttgatacgccaaatgaatgcccgcgcctcctgcagtagatccgcctgcggtcagttcatctatcgcttcacggatcttctgtttatcaccgcccgaagtagcttccagcttcacaccggcactgcctgcataagtcacgattgccaccttatctttattccgcagattattcaccaatagtttgagcgatgactttaccaaatccaaccgattagccccccacatagaaccggaaatatcaatcaagaatacaagattggacgccggcaactgctccgtcggaatttctttagctttcaatccgatacgaacaagccgatgagctgtattccaagtacaagttccggcttccacagttatcttcacaggatcgttgcccgttggtttcggatagtcgtaagaaaagtaattcactaattcttccgtacggattgcatcggcaggaggcaattctcctctattgataaaacgacgcatattgctataagaagcagggtccacatcaatagagaaagtagaaagcggagtatcggctacacttttgaaaccattctcctgaatccggtcatactcttccgtattcattctcgtatccatatcatacatggcagtcggacacaccgctacatacgcaccggtcattgcctttgttttcattgtaccgtatcccactacgacacactcctccaacgccacatcatcagtcttcattttaacatccagtttggccgacttaaccactcttttttcttctttatacccgataaaccggaataacaatacgtcccctttttgggcctgaatggaataacgaccgttcacatctgtgattgccccacttttggaacggttattcactaccgaacaaccggtaatcgaagttccatccgctgcgtccgtcacaataccggtcacggtaatagtttgcgcattcattgttcctaagcaaataactgccatcagcagtacgagcatgattgctctgaattggtttgttctcataacttcattattttaaaatgttactattcatcgcttttactatagagatgcagatttcacacagattccataatttgcctgaactttttttacccgagcggaaaaaagtcacttaaaaattcctacttattcctttgtaactcttaatatgatatgtatatttgccaaacataaacatatcataaatatgaaaaacgaagttgatggaaggcgggaaatagcctcacgaaacacggtctgggccactattatcgcccgcaaactaactcgttggggtatcactcccaatcaaatttccatgatgagcatattcttcgctatggtgggatgccttctgttgatcggcacagtcattgatcccggttttaacaagtatgtagcctacattctgttcatcgtttgcatgcagtcgcggttactctgcaacctgttcgatgggatggtagctattgaaggagggaagaaaagtgccaacggagatctctacaatgatatgcccgaccgctttgctgatgctttgttcatcattcccatcggatatatagcaggtggattcggtattgaactgggatggctagcggcccttcttgccgttatgacagcttatttccgctggataggagcctacaaaacgcaccagcatttctttaacggtccgatggccaagcaacaccgcatggcattgctcacgcttgcctttgtagtagccacctgcaccattcacgcaggatacgaccggatggtatgtctcatagccctgataattataaatgtcggccttgtcgcaacactgatacaccgtctgtacctcatgtcacacacaacaaacaatgaaataaaatgaaagaactactggataccatatttcctacgctaagtgatgaactgattatcgtcatttcgctcatcatcggactgctcattacggcaagccttattcttttttttgtaaagaagatctttccaaaaacaaatatcagcgaactctccgcccgcacacgttcatggtggatcatggcgggcatgtttatcggcgctgtatttatcagctataacatttcttatttcttccttgcctttctctctttcattgctttcagagaactgtattcggtgttgggattcagagaggcagatcgtggagcattattctgggggatactggccattcccattcaatattaccttgcttaccttgcctggtatggagcattcatcatcttcatcccggtagttatgtttctcgtattacccttacgactggttttaaaagaagacactcacggaattaccaagtcgatggctctgttgcagtggatcctaatgctttcggtattcggtatcagccacctcgcttatctcctgtcacttcccgaactgccgggattcaatgcgggaggacgaggcctgttattgttccttgtattccttacggaaatcaacgatataatgcaatttatctggggtaaacttctcggacggcataagatacttccgaaagtaagtccgaacaagacatgggaaggatttttaggtggtgtaatcagcactaccgtcattggttactttctcggtttcctgactcccctctccgctcctaacgttcttctggtaagcgctcttattgccattgccggattctcgggggacgtagtcatctccgccatcaaaagggataaaggaattaaggatatggggaacagtattcccggtcatggaggagtattcgaccggatagactctctgtcctacaccgctcccgtcttttttcatttagtttattacattgcatattaaaatggaaaagagattcatgcaagctgctatcatgcagattatatataaaggtatatgccaatggttcttgaaactgatcgtaggagttcagttcaccgattgccgattcctcaagaaagaaaagcagttcatcattcttgccaaccacaacagccatttggacactttaagtttattatcttctctgcccggaaaacttttatggaaagtcaaacctgtagcagcagaagattattttggtaaaaaccgctttcaggcttccataagtaactatttcatcaacacactgctaatcagaaggaaaggagaaaaagattcggaacatgacccgatccgcaaaatgcttgaagccatcgatgcaggatattcactgattctttttcccgaaggaaccagaggaaagccggaacagatgggaaaaattaaatccggcatagcccgtatcctgtctctgcgacctgaagtaaaatatattcccgtattcatgaccggcatgggacgttctctgcccaaaggcaaaatgatactgttgccatataaagcatctatctattacggtatgcccacattggtaaagagcacggatatacatgaaatattggaacagattgcagatgattttgaaataatgaaagaaaaatatcaagtcattattgacgacgaagaagaataggcattgttttttaaaagaaccatatccaaactatcggacgaggagctactcacacactacgctcagtccggtgatacggaatatttcggtgaattatacaaccgctatatcccgttactgtatggactgtgcctgaaatatctgcaagacgaagaccgggcacaggaagcggtcatgcagttgtttgaagatttattgcctaagctgggaaattatgagatcaaagtgttcaagccctggctctaccgggtggcaaaaaatcattgcttgcaacttctgcggaaggagaataaagaaattccgttagattacaccattaatattatggaatccgatgaatttctgcatctattaagtgaagaggaaagttcggaagaccagttaaaagcattacatcactgtctcgaaaagttgcccgaagaacaacggacgagcattacacgtttctttttagaggaaatgtcgtatgcggatattgtcgagcagaccggatttactctgaataatgtaaaaagctatatccagaacggaaagcgaaacttaaaaatctgtatcaagaaacaaaccctatgagactatcggactacatacaaggactccgcaaaggaaaagaagcacatcggttggaaaaagagtcgatgaaagaccctttcctggctgatgcgatagatggatacaaccaagtggagggaaatcacgaacaacggattgagcaactgcggatacaaatctctgcccgttctacaaagaaaagaaatacctacgctatcatttggagtgttgccgcctgtctggtgatcggattcggaatcagcagttatttcctgtttccgaaagagacaccagagcctgtcattccgataattccacaaaaggaaatcgcactagttcccacaaagacaaagacggattccactcctatttccccagtttccatgaaacaagcggataagaaagatatcatcgccaaaagccggactaccatttccaagcctccaagtgctcccattacaacaatgcctatggaggaggaaacttcggatcaaatggttgcagcaacagacgaagaagtaataatgacaacaggagcttctgatcccgaatccgtcaaaaagatgagaatagctaaaatggcagttattcccaccaatgatataatcaaaggaaaagtgaccgaccaaaaaggggaaccgcttatcggcgccagcgtaatgtacaaaggaacgaatatcggaaccgttacagatgtgaatggagaattttcattactcaaaaaagcagagaacaagcagttgacagcacagtatatcggatatgacccggtagaagttccggtagataccagccggacaatgctcattgccatgaacgaagaccaaaaaggactcagcgaagtggtggtagtgggacacggagtcaataaaaaggcaaataaagataacactccgcaacccgttgacggaaaacgtaaatatctgaaatatctgaaaaagaatctggtccgcccaacggacgaaacgtgcgcacaagtgaaaggaaaagtagtattgacctttctggtcaatagggacggacggcctttccacattaaagtaaagaagagtctctgcgaatcttccgacaaagaggcaatccgtctggttcaggaaggaccggactggacatacgggaacaagcaggcggaggtaaccgtcaaattcgattaacgcaaaccactaaatccaggtacccttgcgccataagaattcaagtggtccttgcctgtgtcgaacaagccaccaacggctgaagaccaactgaacggtaaagataagcaatgcaataagcaggcttgccgttgctccggcatatttgtacatagacaacccgaatccataatagatagtgactcccataacagattgggaaatataattcgtcagactcatgcgcccgtaaggaatcagcaggctttgccagctatatcctgtctctttcttaaaccaaagcagggtgaagagagaaacaagaatcaccatgaacgcaaaattagcataagacggaacagctatattataaggaatcagtgcggaggaatccgtaataaaatccggaacaaaaattctaaggcaatagagaggaatgaaggcaatgacagcacctatcaacattcttttccagaaacgtacggactcttcactctttatcaaatatttccggcgtcccaacaacatcccgaacatgaacagagcagccgtctggaacaagcgtccattttccacctgccagatattgctatacaactgtccgtcaatgatattagactgtaatacatcaaagaaactgccgttggctgtcgctgcctcagcacgcatagcataaggaataaaatgaccggtcaccgccacataatccggatttatcagcgcatagatggcacgtccccactcgtatggctgtaaaagcagaatcaaagcaatccagaaaaccgtcttatccttcaacttacaaaccggaatcagtgcaaacccgactactgcatatagcaaaagaatatcaccgttatagaacaatgcgtgcaactgtgcaaacaggagaagcaggcacatccgccatgcaaatcgtcccctgaaatcgattccccgtttctccgcattgtgaaactgaatataaaagctaaacccgaacaacaatgagaaagtcgcataagcctttcccgcaaacaagaaaaatatagtatcccatgcatacttatcaattgtttgcaaccatgcgggtacattctccggcataaaaaacagattgtaatgctccagattatgtaataatacaatagctaacaaagcgaacccacgcagagcgtccactactccaagccgttcagtcgttttcagtgtttgagtcattagatacaattatttcagattaattcaacaaccgcaaaaataaaagaaatacctgaaaaacaaaagcttacgagtgttaaatattaaatcagttcataactggccatttgtatcggcatatccagattatggagtactttttccaacaaaataccctcgcggttatcatactcatatccgaaagtagcgcgaataccctgtagaataaactgcgtggcacggtccaacgccattggcaaactgtcaccctgcatcaaagaccccgtgataacacttgtaaaagtatcccctgtacccggataatgggcaggcagataaggacaagtcaccttccaataacggtttccctgacggttataagcataaacagaagttttatgaggttcaccatgtacgggaacactagttatgataaccacatcaggacctttatcagacaagagccgaagatattctttcaactcctcatctgtattgtccgctttataaggcttgtccaacagataaaacagttctgtcaaattcggggtaactacatccgcttttgtaatcaagtgacgcatctccttcaccatctccccatcaaaattagcgtacaaccgaccgttatctcccaacacgggatcagccacgattaaactatccggctgccggaagtccctgataaaatcggaaacgatctgaatctgcttcggagagcccaaatatcccgtatagatagcatcgaactgcacttccagttttttccattcggcaataatcttcggcatttcgtccgtcagatcgagaaaagagaaaccgggatattgcgtgtgattggaaagcacagccgtaggcaacggacagacttgaaagcccatagatgaaagaatagggataacgaccgtgagagatacgcgtcccatccccgaaaggtcatgaatggcagctattttctttactttattggcatacatatcatttacatttaacaactacatcaatatcaccaatacgtcccttgctccatgtgctcccatcaccaaagcctgttcgatatcagcagtctttgaaggaccggaaataaacgtgccgaatttatattcctgcccgtccaattcacggtaagcgtcatacatcgtatctactattttatttcggtcgagcaaaataaccaacttctctgaaatgaaataaacagctttatactttactgtttgcggaatccatacagccccgttctcagcaactccgatttctcctttcaccacagccacatccgtgccatccaactctttcgggtcatccagattatcgggattgaacgtcgcgcacgaaatatccggcaacacggaagcaatgcgcatagcctccggataggtccggcgaatcaccgcattcacatcttctccctcacccaatacaacagccatacctcccaccgcacggctgatagcacaaaactgttctattttatcgggatatgacaaccgtttcatatccgcaatatccggcttatcataacgaacttgcatatttttgcggatactggctaatatttcttctctactgctcatttagattcctcctttccctgcactttgttcttcttccacatctcattaaacgattctttggcaaattccggcaactcgcgtccctttccccaatcattgaaatcattgtatttcataaatcgtggcaggctgtttatcatcggagccgcccacaaagcagcattgaacaatgccggacgctccatcaggaacttcattccaccggacatgatcttctttcccgtattcgccttgcccagtccgtccaaatcctgacgccacttataaatctgttcggcaagatccactttcaccggacagacatcagagcaggacatacacagagagcaggcagaaagattatcataatatttctccggatcatgggccatacccagattgatcccgataggaccgggaataaaataagtataagagtatccaccgcttcgacgatatacgggacaagtattcatacacgcaccgcaacgaatacaattcagtgtcttgatatggtcggtcttggacagcaatgcactccggccattgtccacaataatgatgtgatattcacctccttcgcgagggcgacggtaatgggaagtgtaggttgtaaccggttgtccggtagccgaacgtgccagtaaacgggtaaatacccccaacgcctccaggtccggcacaatcttttccataccgaaagcagcaatattcaacttcggatatgaagttcccatatcggcatttccttcattggtacacaccacgatatcaccggtcgaagctacggcaaagttagcgccagtcatggcagcttcagcattcagaaaaagatgacgcaggttcttacgggcggcatgagtcagataagtaggatcaaagttacctttttccgttcccatctctttctcaaaaagttcacccacctgttcccgtttgatgtggatggcaggcaacacgatatgactcggttcgagatgcatcaattgcagaatacgctcgcccaaatcggactccacgacatcgataccacgctccatcaggaaaggattcaacccacattcctctgcgagcatggatttacttttgataaaatgatgcacattatgttcattcagtatctcgtacacaatggcacaatattcatcagcgtctttcgcccaatgcacgatagcgccattggcggtagcattcttttcaaactccagcaggagctcttcgagatggctgttggaatatagtttcagttcacaggccttgttgcgcaactcttcccactcgggaacttccttactcatcttatccctcttggcacggaccatccaaagggtttcgttatgccatgctgccatcttgctgtcccgcaagaacttctcggcagcctttgaatgttttgtactcatgattgcgatgctagaatttctacaatatggataatctgaatgggcagatgttcccgtttgataacgccttgcatatgcattaggcaggaactgtccgctccgacaatatactcggctccggtagccatgtggtctttcaccttatcgcgtcccatacatacggaaacagcctgctcttctacggcaaacattccgccaaaaccgcagcactcgtcaatgtggctgggttcgaatacctcgattccttctaccagattgagcaaatcacgtaatttattgtaataagggatatttaattcgctgggggcggagttgaacaattcacgcacaccgtgacaactgttgtgaatactgactttgtgcggaaagcgtgcaggcagtttcgtgggtttgatcacatcgtggatgaaatcgcaaaggtcataaatctttcccgcactttgacagacatgaccttctttctctaaaatacccggatgattctctttcacaaaagcgacacaactggcggagggaccgacaatgtagtcatattgttgaaacaagtcatcaaaacggagtgccagcttcattgattcatcttcaaaaccggcattcgccatcggttgtccgcaacaagtctgatctaacggataatcgacgtctactcccagactttttaatagcttatacgatgccactcccacattgggatatatagcattgatataacaaggaataaacaaacctactttcataatatatcatgtaataattaagcttcttccactgcattgtttatccaattgagcagtattattacaacaaggccggaggaaaaaatgttcgccaccgcacatatacttttatgatattgcagaatcccttttttacactatctttgccgcatgaagactctatatattgttataggaacgatttccctggcactcggcattctcggcatttttctgccgctattgcctaccacgcctttcctgctacttactgcagccctttatttcaaagggtcgtttcgtctctataactggctgctcaatcatcgttattttggtccttatatccgcaactaccgtgaaaacaaagcgattcctctccgcgccaagatagtttccctcgtactaatgtggggaaccatgctttattgtattttcttcctgattcccctgatatgggtaaaggttctcttgggactgattgccgcaggaatcacttatcatatcctttctttcaagacattgaaataatcagatagcccctggcgtgcatctgcaagtttatcttcccaatgtttcacagaattctgaccgatgatgtctgtcacgtatttcacggaaataaaaggaatctctttcgaacggcaaacgaatgcctgtgcataagcttccatatctacaacgtctccatttatatgggttaattccgtcaggaacccgtctccggtattacaaatcccgttttccgtccaatgcttacagaaacctttttcttcgagcagagccgatgaatcaatctcgcactccaatccgaactctttcatcttctgcatatcacgatccacaaacttacggcagacaaaaatatctcctacctgatgattgactgtcccggcacttcccatattcaacaccaaatccggctgtacctggcgaattgcttctgccagatgaaaagccgattttacttttccaatgcctgtgcgcacataatacggttcgacatcaggccattttatctctacaaattcgccttgaacggcgtaggtcactaatattttcaacatatattctttaattcattccattactcactatatatagacaaagatatgaaaatcacactagatacacaagtagataaaatattatctattttacatataatataataatgaataatagtaacctacataataagaaaagtcctatctttgtaccgtcgcaaccgacaagatgtttttaccgactcataaggaagatttaataaattctactgaacagattaataacttccccttatcttttagcaaaatcatccgcacgaattaatctgttgcacttgagcaaccatccagccgcacttgtgcaactctccagctacacttgtcctactcggaagttactcaactgcaaacaagtagtaaccataaaaaacgatcactcgtgagcatactttataaatcaacccgttttgcagatacctttacgggtaacaaagaaacgaacgtacgcgtacaactcctgtcatgggatacattggacaccaaagccttcgttgagtacctggcggacaagaacaatctatcgaaaggggatgcctacaaaaatcttactatggtattggaaggtatagaagctgttctgaaaaacggaaacatcctcaatctggacgacttcggcagtttctcactgaacggcagtttctgcaaggacaaacaacccggcgaaaatcatcgggcggaatccatagaaataaagaatgttgtattcaaagctgaaaaacaactgaagaaacgtatagcaacggccggatttgaaaagtacaatcccgaaagacacaacaaacgcaaatactagaacaaaatggaatacaccagaacttactccatccggaaaggcgaatactttgcggatgcgttgaagcgtgccgggaaagaatttataccgacaaattgtatcatcaacaagctactgcccggactgggtgctacgcattgcgaactgatagctccacgaaaatcaatcattatcgagcctaatgtgcctgtcatcgaatcaaaagctaaaaaacataagaatgcattagccgtctacaaaggagtgactgtccggaaaattatagatttcctggaagataaccacgacaggcattacaaactgctgactactcccgaaggtttcgccaagataaaagaggcgatgcaaacggtgggcatagatatatacgaggaatgtttcattttattcgacgaatgtgagaaattagtgcaggacgtacactaccgtgactctatccgtgaaccgatgaacgattttttcctctttcaaaataaggcgctgatttccgcaactcccattattcccgaaaaagacaatcgtttcgatggcttcgcacgggtactaatccaaccggactatgcataccggcagaaattaaaactaattactacaaataatgtgctggagacactgcaggaagtaatcgaagccaaacgaggaacagtctgcattttctgcaacagcattgactcgatagacagtttctaccgtctgattccggaactgagcaacgcctgtaccttttgcagtgaagacgggcaatataaactttggaaaggcaaccgccggaaaaagtcaatgatgattaccgaactggaacgttacaacttcttcacctcaaggttttactcggctgtagatatcatctctcccaaccctccgcacgtgattttcattagcgatttgtttggtgctacccaatcggttatcgatcctgctaccgaagcgattcagattatcggtcggtttcgtggcggagtaaatagcgtgacacatattgcttccatccgtccggatctggaatgtatgtcatccacagaaatcgacgactggattcatggcgcttccaccgtctacaacaattggaaattccaactggcacgtacctctaatattggcgaacggactctattgcaggaagcgatcggagaaaattcatacctcccctatctggacgacaaaggcaaaccggatccgttcctgattgccaacttttacgaaaaggaacaggtgaaacgactatacacttctactgacctgctttgcgatgcctatcggcagaccgattattttgttttctctcatgaagagcgtctaatgcctgtttccgacaatgaacgcatggcgatacaacaccggctagcaaagaaaaaaagggcggaacttatcgtccgcaaactggaagagatggagaagatgagcaggacaactgacaaaaagttacaaaaacgctaccagcgtatgctaggcaacctgattacttcgactgccgacagatacatatacgattgtttctgctgtttcggagcggattttatccgccaatccgattataacgagaataagttgcgcacggcattgaacgcaagcagcgaacacaccatcaagaaatcggcacaaatgcgtatatctatccaacgaactttccccataggctccgaactttccgttcaggaagcgaaaagtatgctgaagcaagtatataaaaaaatgggactgaacacgggaagaggtatcacgacaaaggagttggaacaatatgcggagatagaaaataaccgaaatcgcacagaaagaacaattaaaatactgaaattcaaataattgactataaagtgcaacttttctagcggaaaaaatctgattctcttatagttttttgtaaacttcgcttatttgggggctattttaggtactaattaattgattagcagcgatgtgacatttttgtttttccccgtataatacttaaaataaaaacaaaaatgtcacaccgaactaccacacattcaaagtctatatctttcacaccctaacgctgaaatacaactaatttgagctaaaaagaacattttatcccgaaaagtttttgtaatatcagagttaatcgtatttttgtgtacaattttggtgtagtaatgacagaagaagaaaaaaagttattgaatacctttgaaacgcggctacggcatttgctctatttgcatgatgagttaaagcgtgaaaatgtcgagttgaaaaagcttcttgatttcgaaaaactgaaaaatgagaagatacaggctcaatacgatgaattggaagtcaactatacgaacctaaaaacagctacggcaatcagccttaacggcagcgacgtaaaagagacgaagctgcgattgtcaaaattagtgcgtgaagtcgataaatgcatcgctttgttgaatgaataagaaagaaaggatgtatgagcgataatataataagaataaacctgcatatggcagatgcgtgttatccggtatttatcaatccagagaatgaggagatagtacgggcggccgccaagcaggttaataccatacttggtgagtaccgggaaaaatgggggcatctgaatttggaaccggaaaaaattatagttatggtagcctatcagttctcattagagaaactgcaattgttgcaacgtaatgataccgctccctatacggaaaaggtaaaagaactgactgaattgctggaggattatttcaagaaagaataaattttatccggttattcgctgataagagaaaacaaccacgcactgcacaatatccgagcaagaacttgcttagatatttggtggtgcgtttttatttatatacttaaattaaatgtagaatgatagtaataatagcaacagcaattgcttgcttcatcgtaggtggagtactctcgtacatactgttcaggtatgctttaaagtccaaatacgacaatgtcctgaaagaagcagagacggaagcggaagtaattaagaagaacaagctactggaagtgaaggagaaattcctgaacaagaaagcagatctagaaaaagaggtagcactcagaaatcaaaagattcagcaagcggaaaacaagctgaaacaacgcgaaatggtactcggacagcgccaggaagaaattcaacgcaagaagatggaagccgaagctgtcaaagagaatctggaagcgcaacttgtcattgtagacaagaaaaaagaagagcttgacaaactgcaacagcaggaaatcgagaagttggaagcaatctccggattgtccgccgaagaggcaaaagaacgcctggtggaatcattgaaagaggaagctaaaacacaagcccagtcctatatcaacgacatcatggatgatgcgaaactgactgctaacaaggaagcgaaacgtattgtagtacagtctatccaacgggtagctacagaaacggctattgagaattccgttacagtattccatatcgagtcggatgaaatcaaaggacgtattatcggacgtgaaggtcgcaatatccgtgcattggaagctgctaccggtgttgaaatcgttgttgacgatactccggaagcgattgttctttctgctttcgacccagttcgccgtgaagtagcccgtctggctctccatcagttggtaaccgacggacgtatccaccctgcccgtatcgaagaggtagtggcgaaagtacgcaaacaagtggaagaagaaattatcgaaaccggtaaacgtacaacaatcgacttaggtattcacggtctgcatcctgaattaatccgtattataggtaagatgaaatatcgttcttcatacggtcagaaccttttgcaacacgcacgcgaaactgccaatctttgtgcagtgatggcttcggaactgggattgaacccgaagaaagctaaacgcgcaggtttgttgcacgatataggtaaagtgcccgacgaagagccggaattgccgcacgcattgctaggtatgaagcttgcggaaaagtataaggagaaaccggatatatgcaatgctatcggtgcccaccatgacgaaacggaaatgaccagtttactcgctcctatcgtacaggtttgtgacgccatctcaggtgcacgtccgggtgctcgccgtgaaatcgtagaggcgtatatcaaacgtctgaacgatcttgaacagttagctatgtcttatccgggtgtgacaaagacatatgctattcaggccggtcgtgaacttcgcgttatcgtaggtgcggataagattgacgacaaacagactgaaaacctgtctggtgaaatcgccaagaagattcaggatgaaatgacttatccgggacaagtgaagatcaccgttattcgtgagacacgtgcggttagcttcgctaaataaaaaaaacagagaataatttcaccacagattacacagattctcacagattattttcattaaaaaacaatagtttaatgattaatctgtgagaatctgtgtaatttgtggtgagtagtcttattaaactatgaaagagtatcaattcgaggtctgtgccaattccgtagaaagttgcctggcagctcagacaggaggtgccaatcgggtagaactatgtgcaggtattccggaaggctatgggcggaaccgtaaatattgacgaatacgaacgaaacgtaactaccgtccggagaataatgactacaatccacgaatgttcttcatcagttgctcgccaagaccgatagtatacccttgcgagacaaagactacccgattgaatgtgtcggcaataatgaatacggaataactctctgtaaataaatgtaatgcatttgtaatatccaccgtgttcggacctcttataaaaagtttttttaaaggataaagaagatttttatgttttacagcatataatccaaaaacatttcgtacctttgcagtgttaataaagaaaacaagatgtaaaaccgctcttcaaaacgtggagggcaaaaaagaggaaacaaattatgaaaaagaatgcaaatgaaaagattatgatgttacagtaccgtatcaaacgctatcaagcaatgggaaacggcgctatgtgccaaaccttgaacggtaaacttcaaaaactgctgtcacagcaggtagccatgtaaataaacacactaattatattgaaaaaagcgaggaactttcgagtatcctcgct

SEQ ID NO: 11792 - DNA, 239 bp, Unknown
  gut microbiota DNA sequence
agtcagacaggcttttggaagtggctttcgtacagggtgtttatctcgtcttggtactgctcgaagtggcgcagcagaatgttttccacgtagctgcttaccgtcacctttcgcccgcctatcaccgtcacgatacgcatcagcttctcatgcgtggttcggctcacgtacaagggctgtcggtctgccagttccactttctgaaagtaggtttcccggtagtcgcccgaaccgccctt

SEQ ID NO: 11793 - DNA, 16201 bp, Unknown
  gut microbiota DNA sequence
cttttagtttgtagaacctcacagatatcacccgtcctttccaattggaagcaggacaagagatagagataagtgtggaatatagtcaaaatgctcctccgggcagtgtacaattagtatggtcacttcccaactcggcgagcatctcaccacagcatttgcttgacagggtgaaaaaagacggaactacactaatactcctcaaatcagccgagtcgtggatggatgccatagcacaggctaccggatgtgtctataaaggattttactcggtaggacgcaattggataggtggcattcacttcgtaaaagaacatcccctgtttaatggactgcccaccaacacagctatgggccttaccaagcattggtgcacgagggagataagaaattagggttctatttggaaggtgatgaaatgattgtaggctcctatcgtactccccccccctttgcctaggttctactttgggaatcattccttatggtaaagggagaataatctactctacacttgatgttgtagacaacttactgtcacaagaaccggcagccgaagtggctagaaaacttttttgcaatatgctttctattagtaactggtaaagtaatctgcaaactaaaagatgggtagcctgctcagactacccatctataaattattaatgtaaacagaaaacaatcttcacctatttagcggaaatctttcaattcttcctgtaacctctgacgagtaaagaaaatacggctttttactgttcccaaaggaagatctagtttttcagcaatctcacgatacttaaatccggatacgtgcatagcaaacggaactctatattcttttggaagggcattaaccacacggcgcatctcttttaaatcataagcgctctccgtactttcaaatcctgaatcttgtggcaggtttatatggtagaggttatcagtctgatcgacgaacgtttggtctcgtaccactttacgatagttattaataaagatgttgcgcattatagtgtacatccatcctttgaagtttgtatcgggggtatatttatcttcgttatccaaggcttttaatgaagtttcctgcaacaaatcgtttgcttcttcgcgatcggttgttaatttataagcgaaacggagcaattcttcctgtactcctaccaggtctttctcgaagcttaaacttttcatatgcgttacttttaatttgtgaatacttgtttcaattcgatgatgcaagtttacgagaattcgatggaagcaatgaaccgagaataaacattttttaggggaaaatctatccgccgactatttttaggtcatttctgatagtttttgggtggtgttccggtatgccacacaacaaaaaatcccattttgaagtcacacttgactcaaaatgggataacacaaacaaacaatattagcgattttcacaaacagctgtcttttttatattctaaaattcataagactgatttagattatgttactagaacatttttattatggatacaaatgtattactttatcagcacattacaggtaggaaggagaaatagttataaaaaaaaatccatccacatataaagaatagtacatatacacaaataattatatacaaggtaggactatcacctgagaatgaatatctaaaaatcgcccatttcatcggaagaaaacgggaataaattatattttagatatagcctcatttgcaagctaaaagcaaaaagagtatctttggcatacaaaataaaaagtataatgatgatgctgaaatgctatctgcctattctctacctactactaacatggttcccgtacatttccggagtacccccaagaacccctcaacctaaaaaaagttcgatggctctatacatggattctctaggattgataaacgttactgagctagacaatagtcttgctgtacagctaatgtacacacaggatgataacttcaccggggaagtcctttacgataatctgacagaagcttatttgcacccggacgccgcatatgctctcgtgaaggcacaaagagctttaaaggaattacacccgtcttatagcctcatcatttacgatgccgcccgtccaatgtctgtacagaaaaaaatgtggaatgtagtgaaaggaacctccaaatacaaatacgtctccaatccgaatcggggtggtggactacataattatggcttagccgtggatatcagtattctggattcatttggacaaccattgcctatggggacgaaagtagaccatctgggtgtagaagcccatatcacacaggaaaacgagctggtacgcaatggaaaaataagcgagacggaacatcagaaccggttactactacggacagtaatgaaaaaagccggatttcgtgcactccccagtgaatggtggcatttcaattattgcagccgggatgtagctaaacagaaatataaattaattccatgaccggcaccccatcattaatcacattatcgtatcatataaccatatctttatgtatatctcctctgaaacccgactttttatccgcgaacattcaacagacgatgtacgtactcttgctttacaaagcaaaaaatatccggatgtagatatgccggttgctatcactcagattgcaggacggcaaatcgccgcagaaaagattccatcgtggaaaaagatagaagatataagatatcccaagcacctgtccttagaacaatgttcttcggagatcaccgcctattacaaagccggtctcctgcaaggagattccttaactgatctgaccggaggattcggggtagattgttcattccttgccgaaaaattcaaatccgtcacttatgtagaacgacaagaagaattgtgcggaatagccgcacacaacttccacatattgggcctaaaccacattaatgtaaagaacgaagacggaatagctcacttgaaagcaatgtctccggtagactgtatctttctcgatcccgcccgccgcaatgagcacggaggtaaagctgtcgctatctccgactgcgagcccgacgtagccgcactcgaaggactcttactaaataaggccaagcaagtaatggtaaagctctcccctatgctcgacctttcattggcactacgagaactgcaacagacacaggaagtccatattatatccgtcaataacgaatgtaaggagttactgctgattctcggtcagacaataccgcaagaaatcaaaatccattgtgtcaacctctccaccaaaggagagcaagaaggacaacactttacattcacccgagaacaggaacaatgcagccaatgcaactacacagattctttagatgaatatttgtatgagcctaatgcctcccttctgaaagccggagctttcaaaagcctgtcatccgcttttcctataaggaaattacaccccaacagtcatctttacacctccgacaccttgattgataactttcccggaagaatattccggattgtcaatcaatgcagcttcaataaaaaagaaagcaaagaatgtctggccgacctcaagaaagcaaacatcaccatccgcaacttcccggctacggtagccgaactccgtaaacggatcaagctatcggaaggaggagatacttatctatttgccagcacattaaacaacgaacagaaagtcctgatccgctgcgagaaaatcaagtagacatctcacatgccgtaatataaacgtaacatatttgttatgcgttcttcaaccaactgtaaaaagcaagaaacgtcacccctctacttttgcagcaaataattaacgcacgctaacatttatgaaacgatttatcagattactctcattagttcttttaattatgagtacaagcggtaacactcttgcagaagaaaaagtgaacgtagtcaaacaaggtactatccgcggacgcattgtggatacttccaaacagattctgccgggagcctccatctatattgaaaaattacacaccggagtaacaagtgatatcaacggttactacacatttgccaatcttactcccggcacatacaccgtaaaagtaagttatgtaggttactctcctgtcgaaatgaagataaccattcctgccggaaagacactcgaaaaagatgtagtgctcaacgaaggattggaactgcaggaaatagtggtaggcggtgctttccaaggacaacgccgtgccatcaatgcacagaaaaacaatctgggaatcactaatgtcgtttcagccgaccaagtcggtaaattccccgactctaatatcggagatgcgttgaaacgtatcaatggtatcaacgtacaatatgaccaaggagaagcccgcttcggacaagtacgcggaacttccgccgaccttagttccgtaaccatcaacggcaaccgccttccttccgctgaaggtgatacgcgaaacgttcagctcgacctgattcccgccgatatgatacagaccattgaagtgaataaagtagttacttccgatatggacggagacgctatcggaggctccatcaatctcgtcacgaaaagcactccgtacaaacgtactttcagtgctactgccggaaccggatacaactgggtcagtgaaaaagcccaattgaatctggggcttacctacggtgatcgattcttcaataataaattaggagtaatggccgctatctcctaccaaaacgctccggtaggatcggacgatgtggagttcgaatatgatgtcaacaagaaaggagaagtagtcatggtagaagcacaaaaacgccaatactacgtaacccgtgaacgccaaagctactcattggccttcgactacgatataaacccgaaccacagactgacattgcagggtatctataaccgccgtcatgactgggaaaaccgttaccgtgtcacttataaggacctggacaagacaggactggatgacgaaggtgaaatgcaacaatccgcacaaatagaaactaaaggaggcacacccaacaataaaaatgcccgtttggaactacagcagactatggatttcagtctgggtggagagcaccaattcagcaaactatctatggattggggagcttcttacgcacgtgccaccgaagatcgtccgaacgaaagatattttaacctgaaacaggactttctcggattcgacgtcgtagatgcaggcgaccgttttccatacgtgacaacagatgtaagcctccacaatggaaaagcagacggtgaaagaggaaaatggaaagtaaaggaactgaccgaaagcaatcaggaaatctatgaaaatgacctgaaattcaaagtcaacttcgaactgcctttaaccaacggtatctacggcaacagtctgaagttcggagccaaatatgtttccaagacaaaagaccgtgacgtaatctgctacgactacgcagatgcatataaagacacctacgatacagaatacatgaacaatcttaccagtcagatccgagacggcttcatgcccggcagccaatacaaagctacggatttcgtctccaaagaatacttaggatcactcaatctggccaatatggaaggcgagcaggttcttgaagagtcttccggcaattaccacgccaaagagaacgtcacttccgctttcttccgtttcgaccaaaatctcggaaagaaaataaagatgatgttaggactccgtatggaagccactcatatcaaatacaacggctggaattggaacgtagatgaaaacgaagatgaaagcctcgaaccgaccggtgagcataaaaacgactatgtcaactggctccccagcgtcttattcaaatacgatgtaaacgacgatttcaaagtacgcgcatcttttacagaaacattaagccgtcccaaatattcggcattgatcccgtgcgtgaatatcaaccgtagcgacaacgagctggtgatgggtaatcctgatttaactccgactatatcctacaacttcgatttaagtgcagattattactttaaaagtgtaggtttggtcagtgcaggcattttctacaagaaaatcaacgatttcattgtagaccaggtaataggagattatacctaccagaataacgaatacaaaaaattcactcagcccaaaaatgcaggtgatgcagatctattaggcgtagaacttgcttaccaacgtgatttcagtttcattgctcccgcactgaaatgtatcggattctacggcacatacacctatacccacactaaagtgaacaactttaacttcgaaggacgtgaaaatgaaaaagacttgtctcttcccggttctccggaacacacagccaacgcctctctctatttcgagaagaaaggattcaacgtacgtctctcttataactacgcctccagttttatcgatgaaatgggagaagttgccgcactagaccgctattacgatgctgtcaattacatggacttgaacgccagctatacgtttgggaagaaaataaagactacgttctatgcggatgccaccaatttgctgaaccagccgttgcgttattatcaaggcgtcaaagaccgtacaatgcagtcagaacactatggagtgaagattaacgccggagtaaaagtcaacttctgatacgggctgatttgttccttttaaaccaacagcccctcaaaaatcaaaacaattgcatacatttacaaacatctaatatacaacagaatatgaatataaagattaaaggtttattgattctagcattgatttccgtctgtacattcgctcaggcacaattgacggattattctatatttgatcagaagttcaacttctatatagcgaacgacttgggacgtaacggatactatgaccaaaaaccgattgccgaactgatgggtacgatgggagaagaggtcagtcccgaattcgtcctggctaccggggatatccatcatttcgaaggagtgcgcagcgtgaacgaccccttatggatgaccaactacgaacttatctattctcatccggaattgatgattgattggtttccgattttgggaaatcacgaatatcgcggtaacacacaagctgtattggactacaccaatattagccgccgttggacaatgcccgaccgttactacacaaagagattcgaagaagaaggtacaaccatccgtatcatttggattgacacgactcctctgatcgacaaataccgcaaagagaatgataaataccccgatgcctgcaaacaggatatcaacaaacaactggcatggctggattctgtgctggctaatgccaaagaagactggattatcgtagccggacaccatcctatctacgcatacaccccgaaagaagaaagcgaacggatggacatgcagaaacgtatagaccctctcttgcgcaaatataaagtagatatgtatatctgcggacatatccacaacttccagcatatccgcgttccggaaagtgacatcgactatattgtcaattcctctgcatcactggcacgcaaagtaaagcccatcgaaggaacaaaattctgtagtcctgaaccgggtttctccatctgctctatcaacaagaaagaacttaatctacgcatgatagacaagaaaggaaatgtgctttatacaatcacccgaaagaaataagttctcttaaaaagataaattctactctcagaaaaaacacacgacatagggtgtctctttcgtgatgaaagggacactctaactatatatatctatcggtcacagtcatttcggcttactttcttgggcagtcttatctgtaggacttgtatttctcaaatcatctttcggaatcgtcgtctcattaccatcccgcatagccatataatgcggtgacatgatttcaatacccgcctcattaaatttatcctgaatattctgatgcaggtttgaataaatctgaggcattttatcagcttccttgatataagcattcacctgatataccggataccagtcacttaaagaagtttccagaacaaacggacgcgggtcgtccactacaccgggagtattcaatgccgcatcaatcaacaattcatttactttccgccaagggatatcataaccaatggacacctcagaatgaataatcagcccgtattcacgtgctgacgtgctataattcacggtatgagacgacatgacgaaagagttgggtacagtgaccacctcattcttaggcgtacggatacgggtgacaagcggagttttctcaataatgttccctgtagtatcattcaactgaatccgatctcctatcttgaacggacgcatataagtaatcaccaatccggcaatgatgttgccgataaccgtactcgaaccgagtgagacaatcaagccgacaaacaccgatattccctgaaacactccggagttggaacccggcaagtagggataaatcatcgcaatcataaaggcatagagcagaaaacggataatatggaacgtcggcattgcccaatccggataaaagccgttgatcttaagacgccctccctctacttcacgtgccagatacaacacgaaacgcaccagatatttcactgcataccagatcacaataatggtaaacagtttaggaatgtagtcaatgataccgacaaagattccacgaatcggattccagatataaccgagcagacgataagccaacccttccgtctgtgggaaaataataaaaatcagcggtacggtaaacagtaattgtaatcccataaggatataccgccctacactggctagaaagactaacagattcgcctgcttctgtgcgtccaacaattcatatccctgaatcgacaccggttttatcttcgtatctttcaagcgtagaatgcgtactttcaacttacggaacagccaattggtaagacggaacaaaaaatactggcctacaatcaccaatacaaaatagagaatacgttttgccattcgccaaatcccgtgttccgccttcatctcgtgcagtttgtcaacaacgttctgccgtctctcattcgccagagaatcgcgggaaacgccctcccataaagcgtcctgatccgtaagggacagcaacaccttattgccatacatcaaatcggaaacaatatccgaatggtctacagaaaccgaatcgggacgaagattgaagcgccttcccaattcttcaatggcgctaccggtcatttgcgccctttgttgaggagtatacccaccccgttttgtataaagataaaataaagtgtcgccatccgccactacaggaatacctttggtaaactgacgcaaagaatcgatgcgttgtcgttgccgggcatacttcactgaatcggctgcggccatctgaagcttcatctgctccatctccatccgcatattcgcctcattaagccgggcagtctccaatgtcttttgcaaatttgccacataagcagagtccgatccctgtttcatagaagcatgtacaccggttatactatcccccgcaaatatctttttgacagcctgctccaactgcgcctgtgccccaattgttgcaaaagacatcaacaatatcagcaccaaccgctttattttatttatttccatattctactattcaaatgattacaaattaaggttaatccacttcttttttactaaaacagagcaaacatacggattgtttttgacattacaattcctaaattgattatctttgcaattcaaacagaaaaagctatgaatatattatttcttataggaggacttatcctcattcttctaggtgccaacggattaacagacggttctgcctcagtagccaaacgctttcgcattccgcctatcgttatcgggcttactattgtcgcattcggaacttctgccccagaactgacggtcagcgtttcttccgctctcaaaggcagtgcggacatcgctatcggtaatgtagtgggaagcaatattttcaatacattgatgatcgtaggctgcaccgccctatttgccccgattgtcatcacccgtaatacgctcagaaaagaaataccgctctgcatactctcttcaatcattttactggtttgtgccaacgatgtctttctggacaaggcatcagagaacattctaaatagagtagacggtctgttattgctttgctttttcgccatctttatgggatatacatttgctatcgcttcctctggtccttccaagcctataacggacaatgcgcagccagccgagcactccgccgaagaagaggaaatcaaatcgctcccctggtggaaatccactctatatatcatcggcggtctagctgcacttatatacggaggacagttatttgtcgatggagccactggtattgcccgcagtctgggagtcagtgaatcgattatcggcctgactttggtagcgggaggcacttctctgcccgaacttgccacttccatcgttgccgcattgaagaaaaatccggagattgccatcggtaatgtaataggaagcaatcttttcaatatcttcttcgtattgggatgcagtgcaagtatcaccccgctccatcttagcggaattactaacttcgacttattcacattagtaggttccggtatcctgctctggttcttcgggctattcttcgccaaacgaacgattacacgaatagagggaagtatcatggtggtttgctatatagcttatacattagtattgatttacaatacctaaaccatccgtcaatttttggcagctcatcccccgtacacagtttttgccgtcctgcgcgttgtaatttaaagattatcacgtatctttgcttcctgaatcataaatacgagatatggctattacaatcaagaaagtctctacgaagagagaacttaagaaatttattcgtttcaattacaggatgtataaggataacccctattccgtgcccgacctgtatgacgatatgcttaacacattcaacaagaagaaaaacgcagcgttcgagttctgtgaagccgattacttcctcgcctaccaagacgataagatagtaggtcgtgtagccgctatcatcaacaaccgcgctaacgaaaaatggggttccaagaacgtccgtttcggatggattgatttcatcgacgacccggaagtatcctccgcactgataagaaccgtagaagattgggggaaggaacggggcatgactcacattgtcggacctctcggatttaccgacttcgacgcagaaggtatgctggtggaaggtttcgaccaactcagcacgatggccaccatctacaaccatccctactatccggtacacatggagaaactcggtttcgagaaagatgccgactgggtagaatacaaaatctacataccggagaccatccccgacaaacataagcgtatctccgaactgattcaacgcaaatataacctcaagataaagaaatatacctccggaaagaaaatagccaaagactatggacagaagatattcgaactgatgaacgaagcttatagtcccctctacggatattcacctctgacccaaaagcaaattgatcagtatgtaagaatgtatctgcctattctcgatttgcgcatggtaaccctcatcaccgacgccaacgacgaactggtctgcgtaggaatctccatgccatcccttgccgaagccctgcaaaaatcgcacgggcggttgttgcctttaggatggttctatctgctaaaagcattattcatgaaacgtcgtgccaaaatgcttgatttactactcgttgccgtgaaacccgaatatcagaataaaggtgttaacgctttgttattttccgatttaattccggtttatcaaaaattaggttttatctttgcagaaagcaaccccgaactggaactgaacggaaaagtccaggcacaatgggattactttgatactcaacaacataagcgccgccgtgcgttcattaaagagataaaataaaagctatggaagagaacgaattgatacctgtagacaacaacgatgcagtagagtacactgacgacaacatccgccacttgagcgacatggaacatgtccgcacacgtcccggtatgtatatcggtagactgggcgacggcgcgcacgccgaagacggaatctatgtcctcctgaaagaagtaattgacaacagtattgacgagttcaaaatgcaggccggtaagaaaatcgaaatcattgtcgaggagaatcttcgtgtcagcgttcgcgactacggacgaggcattccgcaaggaaaactgattgaagctgtcagtatgctgaatacaggcggcaaatacgacagcaaggctttcaaaaaaagtgtcggactgaatggagtcggtgtaaaagctgtcaatgccctcagttcccgtttcgaggtacgaagctaccgcgacggcaaggtacgtatcgccactttctccaaaggagagttgctggcggacgagacacagaacaccgaagaggacaacggaacttatatcttcttcgaaccggacaatacattattcctgaattacagcttcaaacccgaatttatcgagacaatgctgcgcaactacacgtatctcaatacgggacttgccatcatttataacggacaccgtattctgtcgcgcaacggtctggtagaccttttgaacgacaacatgacggcaaccggactttacccgatcatccatctgaaaggggaagatatcgaaatcgccttcactcataccggacaatacggagaagaatactactctttcgtcaacggtcagcatactactcaaggaggtacgcatcagagtgctttcaaggagcatatcgcccgtaccattaaagagttcttcaacaagaacatggactataccgatatccgcaacggattggttgccgccattgccgtcaatgtggaagaaccgatcttcgagagccagaccaagaccaaactgggttctaccaatatggctcccggtggtatcacagtcaacaagtatgtaggtgatttcatcaaactggaagtcgataacttcctgcacaagaatgcggacatagccgaaacgatacaacaaaagatacaggagtcggaaaaggaacgtaaagccatcgcaggcgtgacgaaacttgcccgcgaacgtgcgaagaaagccaaccttcacaaccgcaagttgcgcgattgccgcattcatctgaacgacccgaaaggaaaaggactggaagaagaatcttgcatctttatcactgagggagactctgcaagcggctccatcaccaaaagccgtgacgtgactacccaagctgtattcagccttcgcggtaaaccgttgaactcgttcggactgaccaagaaggtagtttacgaaaatgaggagttcaaccttcttcaagctgcccttaatatagaggatggtttggacgggttgcgttacaacaaggtaatcgtagcaaccgatgccgatgtggacggtatgcacatccgtctgctgatgattactttcttcctgcaattcttccccgatctcatcaagaaagggcatgtatatatcctgcaaactcctttgttccgcgtacgcaacaagaaaaagaccatttattgttattctgacgaagaacgtatcaacgccattgaagagctaagcccgaatccggaaatcacacgattcaaaggtctgggagagatctcaccggacgaattcaagcactttatcggtaaggatatgcgtttggaacaggtaactttgcgcaagacggacgcagtgaaagaactgcttgaattctacatgggtaagaatactatggaacgacaaaactttattatagacaatctggttatagaagaagacttggcatcatgagaaaagcaatatttccgggtacattcgaccccttcaccatcggacattattcggtagtgaaacgtgcacttacctttatggacgaaatcgtgataggaatcggtatcaatgagaacaaaaacacgtacttccccattgaaaaaagggaacagatgatccgggaactttacaaagacgagcctcgtatacaagtaatgtcgtacaactgtctgactatcgattttgcacaggaagtaggcgctaagtttatcgttcgtggcattcgtacggtgaaagacttcgaatatgaagagacaattgccgacatcaaccgtaagctggcaggcattgaaaccatcttacttttcactgaacccgaacagacttgtgtcagctccacgattgtacgcgaattattaacttacaacaaagatatcagccagtttattcccgaaggaatggtgataagttgagagttgagaatggagagttgagaatgatgtagacgtatccggcaattatattatataaagtaagattatgaatagaatgaaaatatacgtcctcttagtttgtctggggacaatacttacagtacaagctcagaacttcggttcggctgctatgcgtaagttgcaaatggcagagtttgcaatctccaatttctatgtggacaaagtagatgaagacaagttggtagaagaagccatcatcaagatgttggcacaactcgatccgcactctacttactcggatgcagaggaagtgaagaaaatgaacgaaccgctccaaggtaacttcgagggtatcggagtacaattccagatgatagaagacaccctgttggtggtacagcctgtcagcaacggaccttccgagaaagtcggtatccttgccggtgaccgcatcattgccgtgaacgacagcgctattgccggggtgaaaatgagtacggaagatatcatgaagcgtcttcgtggcccgaaaggttcgaaagtcaatctgacaatcgttcgtcgcggtgtaaaggagcctttattgtttacagtaaagagagataagatacctatccttagtctcgacgcctcttatatgattcaacctaaaacgggttatatccgtatcaaccgcttcggagcaacaactgccgaagagttcaaaaaagcaatgaaggacctccagaagaaaggaatgaaagatatgattcttgacctgcaaggaaacggaggcggttatctcaatgcagccattgaccttgccaacgaattcttgggacaaaaagaactgattgtatataccgaaggtaggaccgccaagcgtagtgatttctatgccaaaggtaacggagacttccgtaatggccgcctcatcatattggtggacgagtatacagcttccgccagcgaaattgtcagcggtgcggtacaggattgggacagaggaattattgtaggccgccgttctttcggcaaaggcttggtgcaacgtcctatcgatttgccggatggttctatgattcgtctgactatcgcccgttactatactccatcgggacgttctatccaaaagccgtatggcagtacggtcgattacaacaaagacctcatcgaccgtttcaatcatggtgaactgatgaatgccgacagcattcacttcccggattcattaaaggtacagactaaaaaactaggacgtactgtgtatggaggtggtggtatcatgcccgattatttcgtaccaatcgatacgacattgtatacggattatcaccggaacctggtaggcaaaggggttatcatcaaatttaccatgcagtttattgaggaacaccggaaagaattagctaacaagtataagaagttcgaatcattcaacgagaagtttgtcattgacgataatatgttggctactttgcgggagatgggcgagaaagagggtgtgaagttcaatgaagaacaatatcagaaagcactcccacttatcaaaacgcagctcaaagcactgattgcccgcgacctttgggacatgaccgaatatttccgggtaatgaacacaacgaacgaaagtgtacaaaaggctttggaaatactgaattcggatgaatacgggaagaagttgaaataaacaagaacttcttctctcctatatagaaaaatcacttttctctatcacctatcaccgacggcaatcaaacaccttattcatcggggtttccggcggtgataggttgttttttaacctatcacctatacctgtcacttatcaccgtccagtcactccgccaaccaccgttcaatgttacgttgttcgtcactgaagcttacacctatt

SEQ ID NO: 11794 - DNA, 1131 bp, Unknown
  gut microbiota DNA sequence
ttgtttcaccacaggataccagaagttcaagcaaatgaaactaaaggttcaagcaggggaaactaaagtttcaggcagaggaaactggagtttcaagagggggaaactaaagtttcatacgcaagaaacacttggtgaaaagcaggatggcaaagactgtgcgtaaggataagtaagggaaagtgtaaggatgagcgagggaaaggggtaaaacacaccgcatctgcaaccatcccacaccactatcctacaccctattaatatactaatattcaacaacataaagtgaaactggtgtaggatggcagatgatttgtctattcaaactcatagggaggagaatacaaggacatctatcgagggatattctgaaaaataactggcgagaaccaattgccggttataaatgctctacgctaaacgagaattttatgcattgagtaaaaatttagtttagcgtagagcattagaattcccacaaaaacactctttctgttaaaaccggcagacctctaaaacaaaaataagttcagactgttacatagtcaacttaaatatattaacctaaacattaaattatggctagagaaagtgtaaaaatcctacaagggaaattagatgtggaaagtttgatttcacagttgaacgcagcattggctgaagaatggttggcatactaccagtattgggtaggtgcattagtagtagaaggagctatgcgtgccgatgtgcagagcgagtttgaagaacatgctgaagaagagcgtaaacacgcacaattgcttgccaaccgcatcatcgaactagaaggtgtcccggtgctcgatcctaagaaatggtttgaactggcgagatgcaaatatgatgctccacaagagtttgattccattagtttactaaaagacaacgttgcttccgaacgctgtgcaatccttcgttatcaggagattgccgactttaccaatggaaaagatttcactacctgcgacatcgcaaaacatattcttgccgaagaggaggaacatgaacaagatttacaagattatctgactgacatcaccagaatgaagaaatcatttcttgataagtaaattctaaaataataatgattagataagagagggcgtatcc

SEQ ID NO: 11795 - DNA, 18003 bp, Unknown
  gut microbiota DNA sequence
tgtattatttatcgaggaatactccccaaaatagctggcgaaaactgggtaccggttattaatgcaatataccatcaaaagagcaggcacactcaagcttccacaatccacttttcaatattgcgggtttccgcactgaagtttaccccgatttgaaagagtttccgtccatccgtcgcgaaaggaagggcgtaatgcttatcctttatctgtcgcaaagcctcttcagcactcccattcaatttaaattccatgatataaatgaatttatccgtctgcaagacaaggtctatgcgaccttcgctcgtatgatattccactttggtatagaagccgaccagcttaaatacaatgaaaaggacattctcataatgtaattcctggtcgcgaatcacctcgtaggtggtatcggcaaagaaactctgcaggcggcgaaagaaagaatcataatcaccggaacgtacttcacggacaaacttctgaatttcaaaaggggactccaccttattgacattcgcataataaggaagcataaaacggacaaagccctcttccacttcacggttcgggaaacccaaacggtagattccaaattcttcatcatatcccttaatggtaagatatccgctttgataaatcacaggaatgggattggtggattccgagtctatgctgttcagcacttgggcatctgtctcctcgtgtgccatacgttccaggtcataatgatgctttttcagcagactcaccagataagtaggcgtacccgtctcaaaccaataactaccgaactccttgtacttgaaagcattgagaaggctgaaaggattgtacataccaattgaattgtgtgtaaaatgatagccatcataacattctttcaattccgcacagagtttatcatacgtcacgccacgtacatcagcaaattcatgaagctcagcatctaaagtatcatgaagttcacggtcacttacaccgcaaagctcaacataatcctttcgcatcgatatatcatccagattattcaagtcactgaaaacgctgaccttaccaaatttcgtcacaccggtaagaaatgcgaacttaatacaaccgtccattgttttgagtgccccatagaatggtttcaaagcattccgaaattgtctctgtaattcttcattgccgatagcctgcaacataggcttatcatattcatctacaagaataaccacacgctgccccgcctgtttacaagcgcgttctatgataccggcaaaacgtaaggaaaaagaacgttctgacggttcagcaccgtaaagtttttcccacgcagtcagagacttatcaagtatattatccagactatccggagtgtcatatttctctatattgagatccagatgcaagatgggatatttcacccaatctttttcgagtttttctaccgccaatcctgtaaagagctccttcttaccttgaaagtacgcctctaaggtggagataagcagactttttccaaaacggcgcggacggctcaggaagtaataactacccgtctttaccatttgatacattaacgccgttttatcaatatagaaataaccatcctgacgaatcttctcaaagttctgaataccgatcggataaattttactgctcatactctcttctttattataacaaagatacctttcttacaaagatatgaattttttataatattcgttcaatctcttgcagttcttcttctgcaaactccaaatgctccaatgttttcagattgtccgccaactgctttacggaacttgctcctacaatcaccgatgtcattcgttcatctttcagtacccatgccaaagccatttccgccaaagtctgtccacgacgacgggcaatctcattcaattgccgggcggcttctactttttcgggagttacttgcgaacgctggagaaaaccggaagaacgtgcagcacgggaaccttccggaatgccgtttaggtatttatctgtcaacagtccttgcgccaaaggagaaaaagcgatgaaaccggaaccatattccgccgccaaaggaagtgattcagcctccactgcacggtcgaacatactataccggtattggctgataagacagggggcaccggcttttgccatcatctcataggcgatacgggcttgttcggggggatatttagagattcctatatacagcgctttcccttgcttcacaatatcaatcaatgtccggacagtttcttctaccggagtcactccgtcataacggtgactataaaagatgtcaaaatactccaaacctgtccgacggagactttggtcaatgctcgccatcagatttttacgggaactatttccgccataaggaccagcccacatttcatgaccggccttggaagaaataatcatttcatcccggtagccttgaaagttctctcgcagaatcctgccgaaattggattccgcacttccgggaacaggaccgtaattgtttgccaaatcaaaatgagtgattccatgatcaaaagcaaacttaatcatgtcggtcgctacctcgaaattgtccacactgccgaaattatgccacaatcccaaagagataagaggaagttgcagaccacttttgccgcaatatttataaggcatccgttcgtaacggtcggcaacaggctgataattgagagaattttccataaggcgatatttttataggtttcaattagaactataactggaattagaactgaaaataaatgaacggttgtatttccgaactcttcatttgaataacaagataaatcaaagccaccatcaacacagctttgcctacgaacggcaggcgaatcactccccgacaaactgcattttcccagctatcgggagcaaaatgaagcaggaagccaagcagcattagcgcgaatactttccaatagccttcaagtaactgagggaacagttggggacggaaagtcgtaaatatctgccccagcatatctaccgaattctgaaaatcggcgttacggaagaatatccagcagaaacagacaaagtggaaagtaatgataatgccgaacacacgtcgccaaccgtgactttgttctcctttcctccgtccggttatcgtcatccagattttatgcatcgccagtgcaacgccgtgaaatgtgccccaaagaacaaaattccaggaagctccatgccacaaccctcccaaaaacatggtaataataaggttcagatattgccggatcttccctttccggtttccacccaaagagatgtataagtaatctttcagccaactggacaaagagatatgccaacgacgccagaattcggtgatggaggccgacttgtaaggagaattaaagttaagattgaagtggaagcccaataacagtgcgataccgatagccatatcactatatccggaaaagtcgcaataaatctgcaaggcatagccgtatactcccatcagattctcaacacccgaatagagcgtcggattatcaaaaatacgctctacgaagttaatactgatataatcggaaataatggctttcttgaacaggccggaaagaatcaggaagataccccgtccgaacatctcctgcgagacaaaaagaggtttcctgatttgcggaataaaatcacgggcacggacaataggacctgccaccaactgcgggaagaatgatacgtaaaaggcataatcgagcagactcgtcagtggctggatttctttccggtagacgtcgatggtatagctcagcgactggaacgtgaagaaagagataccgaccggcaggaatatatcaagtgccgtgaactctccccccatcagggacgcaataatacctcccaagaaattggtatatttaaagtaagccagaagtcccaagttgacacccagactcaaggtgaccaaccctttgcgtttccaatatccttcggtgcgatacatcagttgcgccaacagaaagtcgcaaaccgtaacaatggcaagcaggaaaaagtaagtaccgctacttttatagtagaaataataagaaaaaagggtgacaaacaagatacgggcggtatatttatgttgcaacaatacgtacaccaccataaaagcggcaaacagccaaagaaagataccactactgaatatcatcggtgcctgtggatcgtagataagcacctcttttaatctactgaaatctatatcaatgggaaacataatcgttgtatgctttgataagggcttggtataataaatttccttgcaggatatatccttcgggaagataatgcacatgatcgggacgcatcagcttcgcttccgtccaattcttacaggcacgttttttgccgccgactacatcatacatatcccacaccagcagacgatggtccccggcatagcggcgaatggtttccaccgcagtcgccgtgcggggattgacggcatacgtacgtctccgccttctttgacggaaactctcatacgaaccgggcggagtagtcagcaggataggcacatcatggagtgcggcacgcaggagtctgacaagttcatccatctggttgtaatgcacattactattgtaacgcctgttatgactctcattggttccgaaagagagaatcagcaattcgggtttgagcgccgctatctcagcgatgcggtcgggatgggtgaaagtaagacaagtggcgccgttcactcctttatctatataggaaacagcaccgaaggtttcggccagccgcataccggtggtttgaggatagatatgcccgcgaatatggctgtcgccaatatgtacgatacgcaccgtatcttcggacagtcccgcacgtacttgacggagtcgttcgagcacaggtgtcagcagggcaatactgtcgataatttcatttcgcccggtttcacggaaagcggacggaaaggaagtctgcacagggatggtatcattcgcccaaatcatttcccgcaaaggtttgacgcctttctgcaccttgttcaatggaggacaaacggggatacggtcttgcgccatcatcctcgaaagagaacaaggagcaaacaaaatgcccgccaaaacaagcacaaagaaggacaacaggctattctttctcataagcacgcctcctgtcgtattgttctttgccatacatcaatgtctcatagagaagtcccgccaaatgtttaccgccacggaagttgatatgtgtataatcatagtttgccatagacggtttggcatggacaagttttgccatactcccttctcctcccatagcctcgaacatattccagaatgcgataccgctttcggcggcaatattctgctgataacgaatcaggttcttgactcccggcatggtgcggaggtcaccgttttcgttcttgtaatcacggtcgcccacgctcaacagcaggattcccgcctgcgggaaacacgttttgagatgtccgatggctgccaacagccctttctggtagttatcgtaattgcgtccgcgttccgttgcgacattcaatccatattcaagaataatcaggtcgtaaggacgctggcggttaaactgtttcaacatttgctgcggaatgccgcgcagggaaagtccggaactgccgcgcagcgagaagttatcgagaattattccttgctttccatccatcgccaatccatagaagagcgtagagtcggcacggtccactgtccaacgtatggagccgatgcgtccgtcaacccgcacttcctgcaaaccgcccgaaggggacagcaaatagttatggctttctcctttgttcacacgggcggaaagatgaagggagtctttattgtaaaagaagatggaagcacgctgacaggtatcaagcaacgaagcgtatttgtcttgtccacgcagttccacgtatgcgccacttcggggaacgaaataatgtccggaaatcccctgcttcttcctatcgaaatagacgctgtccgtcaccgcatggctggaccatccgccaaatgtatgccgcaccgtaggacggtaaccgcttgtcatggaggtgatggtcacgaagccgacaccgcaacctccaaatcgtttttgaagcatttcgcggagatcggccgtaaagatatcagcttctataaaggaatcgccgaatacagctatacgtaccagattgtcgtcttcggaaccggaagaaaggcgattgagagcttcataaaaaggagccatgccccgatgagtggaatcactgtaatcttcaatgcaagtcattccggcacggcaggtatctacaaaaaccggttttatcacaggtggcaagggtatactgtccgaatcggcagcaacggaatccggttccggataacgaaggtcgctcaacaagtccacgcgacgcatcgtatgtccgtcgatggtaatggccggaagccaatgaagccccaataaggctgcaaagacaaccaatacaaaccacaacgaatatttcaaatagttctttattatctccataatgatctaaatcccaaacgaccgcaaagatagataaaagcagtaagaaaaagcggtgtcggaaataataattaaacgcggattaacacagattttcgcaatgattacattcaatctgcgataaatctgtgttaatccgcgcttggtcaactgaaagtagacggatatcaaatagttcgctcaatgttccatacaaacgcgcgcaaacccaattgctccgtttccagatccatcttatgcagcgtatccagcaatggatctactttgtgatcttcgactaccgtgatgatggccgagcacatactaggccaggcgtgacttccgaaatgcgggtcgcccgtcttcgaaccacgtccctgcactttctcaaggtaggtgaagccacgacatcccaaacggtcgagcaatgacatgattcgctcataataggcctggtcgaatgttatcagtactgatttcatatttctttcttgttatttcttaataatatcatttttatgctcctggaagtaagtgtccaattcgcgttggcgacgaagcttacgacgttggttcttgatgccggttcctgcaaagacacaatacaaagtaggaatcagaatcaatgtcaacacggtcgatattgtcaaaccaccgattacggcaattgccatcggactccacatctcagaaccctgaccaccaccgatagccatcgggatcataccgagaacggttgtggctgtggtcatcaataccggacgaagacggctcttaccggaagttaccacagaatttacaactgccagcccgcgttcccgacaaagggtaatgtagtcgatgagcacaataccgttcttcaccacaataccaatcagcatgatacctcccaacagactcataacactcaatgtactgcccgtaaagaagagtgccatcaagacaccgctaaaagcaaatggcagagagaacatgataatgaacggataggtgagtgactcgaactgtgcagccatcacgataaatacaagaatgactatcagaataccaagcgttcccaaatcgcggaacgaatcctgctggtcttcgaacgaaccggcaacctgaatagtcacttctcccggtatgtccatcttatcgatgatctcgttaccggcagctactacgttgcccaacggcgcaccggagattacagcagaaacggtcacgatacgttcacggtctttacgttcgatagtaggaggtgcaaaacgctcgactacccttccgacatctttcacacggacgggttgtccttgcgcattataaataaggatgttctccagactttccagacttgtacggtattccggcgcgtaacgcactttaatatcatactcgtctccgtcttcacgatatttcgaagcaaccgcaccattgatccggttacgcagatagttaccggctgtcgaaaggttcagtccatgcattgccagtttctcacggtcgaagtccacctgatattccggctgataatcgctacggctgatattcacctcactcactccgggaactgccagcaactcacgcttcaggtgggccgccacgctgtcggtcactgtcatatcatatccatacacctcaaaatcggcactggcctgagcagacatccccgtgttgctacctccaagtataacttgtgccttgctgaattccggataggctttcaaatcttcacgcatctcgtcacagacagcttccaatgtgatatcacgatcacccggatctaccagactgatattgaatgagatgatatgcgaaccgttgtcctgcatagaagcccatgtgttgtccgaatcggcctgccctacggtatagttgcagactttcataatgtctttatacttcgtcagccattgattggtcagtttctgcgaaagctcctgagctatctcttttcgtgttccgataggcaattccaactgtacggcgatacgggcattatcttgtgccgggaagaactccgtaccaatcccctttgcacacagcaagctgacaacgaagaaagcgatacatcccgtaatgactatcggacgatggcgaaccgcccaattcaacatcttgccataccaagtgtcgagtccatccaacgttttttcaatcggagtgaagaagagcttgaacagctttgacggctttttttgcaaacgaagcaactgggaacagagcatgggggtcaatgacaaagcagcaaccgtagagataaacatgatggcacacatcatccaaccgagttgtttgaaaagtacaccggacataccactcaccatagtcaacgggaagaacacggcaatcatggtcaaggtagaagcgattacagaaattgccacctcattggttccgtgcacggctgcctgtttcggatcggaaccacgctcaatatgggttgtcacattctcaagtaccacaatcgcatcgtccaccaccataccgatagcgatggaaagtgacgaaagcgaaataatattgatcgtgtttccgctaatcgccaggtaaatgaacgaggctatcaaagaaagcggaatggtgatacagataatcaacgtcgcacgccagcgtcccaagaagaggaacacaacgatgacaacgaacagcaaggcgtagacaacggtttcggtcaaactgtcgattgtattcaggatgttgtcggaggtatcgacaatgacaccgatctttacatcgctcggcaggttcttctgaagtctcggcagcacttcggccactttcttggagatttctaccgaattggccccagattgtttctgaacaacaatcatggcgccttgcacaccgttattataggtttcctgcgcgcgttcttctacggtatcgactatccgggccacatcacgcaagaagacgttcgctccattgtgagtacctactacgacatccgccaactgccgggaatcatcgaactctccttccactcgcaacgcgtaggtttcactaccgatatcgaagttaccgccgggaatgttcttgttctccgctccgataatggagctgatggattcgatggtcaggttgtatgcttccaacttgttagggtcgcaatatacctgaatctcacgctgcggagcaccactgatggacacggttccgactcccggaatacgcgccaaggggttaaccacacggtcgtccaatattttgtaaagcgccgactggctctcattggcctgtatggaaagcagcacgataggaatcatatccgtactgaacttgaagatgatcggattctcgacatcgtcgggaagctgcgagcttaccatgtcgagtttatcgcgcacatcattggtcagaacgtcaatatcgttaccgaactcgaactccagcgtaatcaatgacatattttcggaagaacgggaggtgatatgtttcaggttgctcaccgcattcaaagtgttctcaagcggacgagtaacgttgttttctatatccgaagcacttgcaccgggataagcggtcatcaccataatcgtatttgtatcaatatccggatacaagtcgataggcaatttggacaaagagaaaagaccaaaaatcaccactgccaaaaagcagagggaggtcataatcggtttcttaaccgcaccttcgtataaactcatttttgtaagggattaatttgttagtgatttatttctcaactgccacttccatgccattcaccaaacgcgactgaccggcaactacaacttgagaattatcgggcacaccggatttcaattcgtattccgtacccatacgccgacctaactctaccttattataagatactttaccatctttatatacaaagacataacggtcgccggaacctgcctgcttaacaatggccagatcaggaacaaccacgttgtccgctgtgccgaagtttaatgtagcacgggcaaacattcccggacgtacacgctgatctctattatccagcttgatttctacctggaacgtgcgggtagcagcgtctatcgtagggtaaatcagactgatatttccggtgaatatttcgtcgccgtatacatccagcttcacatctacgggcgcgcctttcttcactttggtaaagtaagtttcggaaacattgataagaagtttcaccggagtgatctgctctacaaccaataccgggtttccaccactatacatatcaccgttatcatagttgcgtgcagtaaccacgccattgatagggcttagcaaagcggtattctccaacagattcttataagctgtctttttcacgtcgagctgcatcttcgaagcatcccattccgatttggaagcgccacccactttataaagttcgtcgatacgcttaaactcgatttcctgattatccagttgcaatttggtttgtttcagattagccgcatccatctgcactaatttctggcctttggatacacggtcgcccacttctacaaagatctggtcgatacgcacgggagaggaaggggctatattgtttttcacttccgcttctaccgttgccgtgtaatcctgtatctgatctacgggacggacttttacatctgccagtttcacaatgggtttctcgtccgcttgtgctgccacagctgctttgtcttttccacctgtacacgagcccatgaacgctgccaacagcaaggctactaattggataccttttttcatattccttagttgtaattttttagttgtctatctttattcttttcctaacacctgatcgagatctgccttagcaaccaagtaatcgtatattgattgattgtaggtgagttgtgcctgcgtcaatgaaacttgagagctgttcagttcgagcaccgtacctttacctacgtcataacgtttctcggcaatcactaccgctttcttagcctgcatcacattttccttattgctgaccacttgctctgtgctcgcgctcatattgttacggcaactgacaatctgcatattcaactttctctccgtatcgatgcggttccaatcgagctgacgcatttgtatacgggcggattttacttttgtaaagttgcttgccttatacaaaggtatgctgatgttaaacatcaggttggaactgttactccaactgtaatcaaagaagttgatgttcggattgtacaaagattgatatttgtaggagaagctcattgaaagggtcggtataaagtttgttttcaatgacttaacattcttctccaacaacttcatgtttaagtccaactgctttatcgtggtattgttatccaaattcacatcctcttctttcagctgttcggcaaacatggaggtctcatagttagtcagattgtcattaatcttaatctctacatcggcagtgatacccatcaaaactttgagctgcagtttagccaaagtcactgcgttggccgccgatatcaagttgggcttaatactccgcatctgcacttccgcactaatcttatcgtattcgctcacttgttccctgctgatatttggcattgacaacattgtagttatcttccgccagtttataacttccttgaagtacttcgtaactgtcctgcgcaagcatcaactgataataagccttgctcacctgattcaccagatccagtttggaagcgcgggatttctctaccgcaagttcaatatccgtctttgtcatcgacatagcgcgataaactcccggcacaaataaaggcaggtttatgttcaatccggcattggcagtattggttccgtcttgccccatcttgaaggacatatcattcaatttcatctcagccgctttaatggtatggtccaccgacccggatatgctggcttccggcaacagattttgccaagtttccttgctggctactttttttaaagcgatctcttctgcagccactttcattgtgggattttcatccaatgctatttcgagagctttgtctaaagttaaggtcagtatctcctttgccccttgggtattctgcgcctttgcaaagccgaacgtgcagagtaccgcaactgccagaagcatcttctttcctgtcaattctttaattttgttcataaactggtttctaatttaatcttaattgtttgtcaatggggtacaccttactctctcggtgttccaatacgatttttacgatattcttgtataaagtcttccagaaccttcgctcctttctctgtggaaatgccacgaatataggtgaacatgatggactcatacacttctataaaaggatattcattgcagatatccgtattcaaaagtacatcaaactgttctttcactaacatattgacaatgccaaagtttacgtccgaacgaaaaattccctgttccacacccgccttaaagaaggacatcgttttctccgagtcgctgtcctgacggtctctcattaaactgtatactttcggatatttcttgatgtcttcaaaaaaacgcttgttcgtctgatggaacacttcaatgctcttctgaaacactgccaatatcacttccagtacattgtgagactgttcatatacttcctgtaaataagcctccctatcggactgtgccttcaaaatacattccttcagcagcgattctttgtccgagaagacctcataaagagtacgtttggaaatacccaatgctgctgcaatgtcgtccattgttatactcttaataccttttgaagcgaaagcttctgttgccgtcaccagaatccgttctcttagctctgcccgttgggaagcgtcttttccatgctctgccatcgtctgttttcaattttataaaaatacagttttcattttatattcgtttccaaaggaaaaacagaacaaagatacatagaaaacttagttaataaattaagttttctatgtatttatagtccatttgggaattattatcattcaatagagcaatatgaaaacaagtgttaattaggaaatatagaccaaatagggtagaaagatagaaagtataaaaactagaagtaaagttttatcgctataaaaggggaatgcattttgacacactctcaataatcagtatctctattaacgtaaaataaaagcttattattaggggttatggtttctgttgctccttcaactccaataggtatttgaatgtgtattttgcttcctgactatcctctttgagataggctttctttagttcaggagatttcttcaacaattcaaccattttgttcttatccagaaattctatctttccggtctcaccattaagttcataacaaacccgctttgtcaccagactcgaggcagcaagagcgtcccctatattcccacctaacttgacatcatcttcctccacaaaatttgcaccgacaacagatcctaaaggcatagcacaaaaatagatcttcttacctaactgaacagccggtgcataccaagctccaaaacgtaactttttatatcgcagtttacggcagttcagatataagtctcctttttcatcacgcacagcaagacaacgctttttcaaacgccgacacatggactcgtcatttccggccgttatccggtaatcagctcctcctgtcaatagtatctggttcttggaacgtctctctacacgcaacacggcaacagtatcaccgtcttgagccaacagttctttcaaattagaataaatgatattctgcgcaattaacgggaggctaatcacgctcatcaacaacaataagatacatcctttcttcattggtcttcctcctttcctgtctaaacgcatttttcgagtggaaagttatacattttagcggataaatgcaagggagaaaaagaaatatttaaatatactttgattacctttgcgaaaaagtattgagtttattatggaaaaattggaacagatcattgaaacataccggcttaccattcaaaaagctgaactggagttacgaaatgctcggaaacgtatctattatatcagtcttttgcgactcgttttatttgtgggagccatagcaggaactatcattttctggccggacggctggctgtatatttccatatttgctattttacctttcattttatttatatggttggtcaaacggcacaatttctggtttcaccgaaaagatttcctgaaaaagaagattgttatcaatgaacaggagctgcgcgctattcagtatgatttctccgattttgatgggggaaaagaatatattgatccgggacatctttatacttttgatttggatattttcggagagcattctcttttccaatatataaatcgtacttcaacgcctgtcggcaaggagcatctggcagagtggttcaatgcgcatttggaaaataaggaggctattgaacaacggcaggaggctatccgtgagttatcgacagatctggagtatagacaacaaatccgtttatcagggttgctttataaaggaaaacctgcagatacctccgaaatcaaggaatgggcaaatagtccaagctattatcggaagcataggcttttacgtatgatccctgccaccgtaagcgtaatcaatctgctgtgcataagtcttacctgcctggatatccttcccaccagcattgccggaggcgtatttgcttgctttgtagtattcaattctgtcttttccaaaggaatcactaaattgcaggctacctatggcaaaaagctacaaattctctctacgtatgctgaccagattcttctcaccgagaaaaaagatatgcacagtcctgtattgcaagagttgaaagctgaacttaccagccggaatcaaacggcttctcaggcagtacgccgactttccaaactaatgaatgcactagaccagcggaataatctgttaattagtatgcttctcaatggacttatattttgggaattacgccaggttatgaaaattgaacaatggaaggaggtacacgcttcggatctaccccgctggatagagactgtcggtgaaatcgacgcctattgctctttggcaacatttgcctataatcacccggaatatatctatcctaaaatcaactcgcattctttccatatgcaagcgaaagcattgggacatcctctgatggatcgtaacaaatgtgtgcgtaacggaatagacatcgacaaacggcctttctttattattatcaccggagctaatatggctggcaaaagtacgtatctacgcactgtaggcgtaaattatcttttagcatgtatgggtgcgcctgtctgggcggatgaaatggaaatatacccggcacgccttgtcaccagtctgcgtaccagcgactcattgaccgataacgaatcttatttcttcgctgaacttaaacggctaaaattaatcatcgataaactggaagctggggaagaactctttattatccttgatgaaatcctgaaaggtacaaattctatggataaacagaaggggtcttttgctcttatcaaacaattcatgagtatgaatgctaacggtatcatcgctactcatgatctccttttaggcactttaatagaagcctttccggaaaatatccggaattattgctttgaagcagatatcacaaataatgaacttaccttctcttatcagaagagaaacggggttgcccaaaatatgaatgcatgtttcttaatgaagaaaatggggattgccgttattgacgactaatccccatcccacaacatataaaaatcaaagttttctctttatgcgattgctaactcaaataagtgtgcctataccttaaatcttgcttttggaaagaaatgcaacaacagcagacgcactttcattggtatagtactgtaccgatgttataggctgataattataaggtacaaattggaatagctgtaccgctgcaaactttttgtcctcagaaagtataatatccattcgtatgttaccgttagactcactctttatttcagaatctgcagaaaaagaaccggaattcactatgttcaccaacgaatccatatgttttaggtcaaagaatacactatgttcttttgcaacactgcctgtcggtaaataaaccacctcttttgatttccagaatagccggaaaatacccataagaaacagccctgttcctagaaccattaaagccatactgactgtcgaagatttgtcttccagtccgaaggtggaagcaaatgctataacaccgaccaccaacataacggaggatattaatacacctgaaaaactagtacgttttgcgatatcgggatgtgaagatgcaaatatagtagcatcaatagcttgagtagttgccataatatttaaagtttaatttattagtaaaaatataaaggtgataggatgaccggtagataatagttataccagtaatcttaaaagaaataatgccaataaataaactgctaaataataatacgccttagagcaaatacataatactcgctggacggttgacaataatacgtagtattataaatctttcccaaatgctgggagagagaattctcatagtctgcacagcactgtaacagattctttagagtagagaaatattcgccaagttgtacacgctggacacgagttaccgaagtctgataactttgcaaattatttaattcagccacaggagaacaagggaactccggttcactgatctgctcatgctgactcatcgaatatgttacggcatactttccctgctccactgcttttccagtgaaaacattgcctgctaccccgtgaagagtaaccgtcaacaacagaaacaatataacctttacaaattttgccataatctcgtacaaatataacagattctatccaggtaaggttcattgaagaaatcttttaatttatcttaggattagtaacaggatcataacaaaagaggctactccgttaccggaatagcctttatattcgatatgaacaatcgttgaattattctgcagactctgctttaggttcttcagccttaggagcttcttcagttgcaggagcttcaacagcaacaggtgctgcagcctctgtgctcttcttagaacgacgagtacgagtagctttcttagcaactttttccttagccatgttttcattgtagtcaactaactcaatgaagcacatttcagcgttgtcacccaaacggttaccagtcttgataatacgagtataaccacccggacgatcagcaatcttaacagagatttctttgaacaactctgttactgcaatcttatcttgcaagttgctaaatacaacacgacgagagttcgtagtatcttctttagacttagtaatcaaaggctcaacaaactttttcaaagcttttgcctttgcaacagtcgtagtgattcttttgtgcttgatcaaagagcaagccatgttagataacatagcgcttctatgagaagcagtacgacctaaatgattgaattttttattatgtctcattttttattctttatctaatttatatttagaaatatcggttccaaac

SEQ ID NO: 11796 - DNA, 37351 bp, Unknown
  gut microbiota DNA sequence
attgacccactatacaaacggcaattataaaaaatattatcaaagctccatacaagtacaaatgattaagaaaaaagtaatatctattttctacttgaaatatgaataaaattattacttttgacactcaaatgaaaagaggagtaacccttattaaaaaataaaatatgatgaaaagactacttacagttactgcaatcggtctggcactgctaacctggcatgatagctgcacacacccacctaaaactcaagcagctttcgttcccaaagtggcaactcctacccgccccaccgaactgaacagactttccatcgagaacaattcatctccggctgaaatccccgttttcacacatggcggatgaaacaaagtaaatacatttatgaagacagctattccaaaaccctccaaacagagcattatccgtgaagccagagattatgtaatgattgccgtcggcatgattttgtacggcatcggttggacagtattcttactacctaacgatataaccaccggaggagtgccgggtatcgcatctatcgtatattgggctaccggcttccccgtgcaatacacgtatttcgccatcaactttttcttgcttttgcttgcccttaaattattagggttgaagttctgtatcaaaacgatctttggagtattcactttgaccttctttttgtctgttattcaaaagatggcgacaggtatcagtctgcttcacgaccagccgttcatggcatgtgtcataggagcctcgttttgcggaggtggtatcggtgtagccttttcatccaacggaagtacaggcggaacagacattatcgctgccatcatcaacaaatatagagacatcactttaggacgagttgtattaatttgtgatatgattattatctcttccagttattttgtcttaaaagactgggaaaaagtggtgtatggatttgtaactctatatatttgtagtttcgttcttgaccaggtagtgaacagcgcacgccaatccgtacaattctttatcatatccaacaaatatgaagaaatagggcggtgtattaacgaatatccacatcggggagtgacgattatcaatgcaaccggtttttatacgggacgtgaagtgaagatgatgttcgtattagcgaaaaaacgggaatcacctatcatattccggttgattaaagatatagacccgaatgcttttgtttcacaaagtgcagtcatcggagtgtatggagaaggatttgatcatataaaaataaaataaacaagaaatgaaaaaccaatattgaaaaacatgaaatttcgaccaacccccaagttattaacaggcattttcatgggaatcgtttccctgacaacatttaatgcgacggctgaaaacgctgtaaagccttattggcaagacgtgcaagtagttgcagtcaacaaagagtacccccgtactgtgtttatgacgtatgacaaccgcgacgatgcgctaagcggcaagtttgagcgaagcaaatattaccgcttattgaatggaacatggaagttcttttttgtagattcctataaaaaacttcctgataacattaccgatccgaatatcagcacagaatcgtgggatgatattcaagtacccggtaactgggaagtacaaggacatggaacagccatctacacgaaccacggatacgagttcaaaccgcgtaaccctcagccccctactctgcccgaagcgaatccggtaggagtataccgccggaatatcgacattccctccaattgggacggacgggatatctacctacatctagccggagtcaaatccggtgtatacgtatatatcaacggacaggaagtgggatatagcgaagattccaagaatcccgctgaattccttatcaacaaatatgtgaaacccggcaagaacgtactcaccctaaagatcttccgttggagtacgggttcttatctcgaatgtcaggacttttggcgtataagtggtatcgaacgtgacgtatacctctattcacagcccaaagtggcaatcaaggatttccgggtaacatcgacattggatgatacttataaaaatggtatcttcaagttgactatggatatccgcaataccggttctcaaacttccaaagattatattatcggatataaggtttttgatccgaaaacaaataaggtaatcgccgaaagcgaaaagaattccgcattcaacgccaacagtacgatttctctcttcggacatacggaaatagagatacccgatgtaaagacatggacctcagaacaccccaatctctacaaactgctgatgtatatcaagaacggagagaaaattgtggaaatggttcctttcaatatcggtttccgccgcatcgagattaagccgatcgaacaaaaagccgccaacggacagccgtatgtctgcttattcatcaacggtcaacctctgaaactgaaaggggtgaatatccatgaacacaacccagctacaggacattacgtaccagaggatttgatgcgtcgtgacttcgagctgatgaaacgacataacttgaacagcgtacgtctttgccactatccacaagaccgccgcttctacgaactttgcgacgaatacgggctgtacgtctatgacgaggcaaacatagaaagtcatggaatgtactacgatctccgtaaaggcggcacactgggtaacaaccccgaatggctgaaaccacacatggaccgtacgatcaatatgttcgaacgtaacaaaaactatccgagtgttaccatctggtcattgggcaatgaagctggaaacggatataacttctatcagacttacctatggctgaaagaagcggataagaatatcatggcacgccccgttaactacgaacgtgctcaatgggaatggaactccgatatgtatgttcctcaatatccgggtgccgattggttggaaagtatcggcaaaaacggcagtgaccgtcctgtagctccttccgaatatgcgcacgctatgggtaactccaccggaaacctgtggggacagtggcaggctatctataagtatccgaatcttcagggtggatatatttgggactgggtagatcaaggtattctccaaaaagacaaaaacgggaaagaatattgggcatacggaggcgatttcggtgtaaatgcgcccagcgacggtaacttcctttgcaacggtcttgtaaaccccgaccgaagtccgcaccccgcaatggctgaagtgaagtatgtacatcagaatgtaggatttgaagcaacagacatcgcatccggcaaattcaagattaccaatcgtttctacttcactaatctgaaaaaatatcagattcattataatgtggtcgctaacaacaaaatcataagaggcggcaaggtatcattggatatcgaaccgcaagcttccaaagaattcacagtaccggtcaatgggctgaaagcacagccgggaacagaatattttgtcaacttcagcgtaacgacagtggagccggaacctttaattccgattggttatgaaatagcatacgaccagttccaacttcctgttcaggcagaaaaagaaacgtataaagtcagcggacctgcactgagcacatccacacaaggagatgaactcattgtatcgtcttcaaaggtaaatttcgtatttaataagaaaagcggcctggtgacttcctataaagtagacggtactgaatatttcaaagatggattcggtatccaacctaatttctggcgtgctcccaatgacaatgattatggaaacggtgctcccaaacgtttacaagtttggaaagagtcgagcaagaatttccatgtgacggacgtcagcatgacgaatgagaataaagtggtttcattaaatgcaacttacttgttggctgccggaaacctttatatagtcacttacaaaatctatccgagcggagtggtcaatgtgaatgccaagtttacttctacggatatgcaagcggcagaaacggaagtttccgaagctacccgcatggctactttcactcccggaagtgatgcagcccgcaaagcagcttccaagttggaggttccacgcataggagtacgtttccgtctgccggctcagatgaataacgtacaatacttcggtcgtggcccggaagaaaattacaccgaccgtaatcacggaacagttgtcggtgtatataagacaacggcagacaaaatgtatttcaactatgttcgtccgcaagaaaacggacatcgcaccgatacacgttggattgccctgtctccggacaaaggcaaggggctggtcattgtagccgacagcttagtcggattcaacgctttacgcaactccatcgaagatttcgattcggaagaagcgcttcctcatccttaccaatggagtaacttcacccccgaagaagttgccaatcacaatgaaaaagcggcacgtaacgttctgagaagaatgcatcatgtcaatgatatcactccaagagacttcgtggaagtatgtgtggatatgaagcaacaaggcgtgggtggctatgacagttggggatcacgtccggaaccaatctatcagattccggccaatcgcgaatacaattggggattcacactcgtccccgtccgttctcccggtcaggccaatgaagccgctaaatatgattatcgataaccttagtataaatttttaaagaaaagacccatgaaagatttatctggcattgtagctaaattcaaagttcaaggtacagtagaagagatcaagcctttaggaacaggacttatcaacgacacctataaagtaaacaccaaagaggtagacgcccccgactatgtcctgcaacgcatcaatcatgctatctttcagaatgtagaaatgcttcaagcaaatatatcctccgttacaggacatatacgcaaaaaactgacagaagcaggcgaagcggatattgaccgcaaggtgttgaacttcctcgaaacggaagaaggcaagacatattggttcgacggtgaaagttactggcgtgtgatggtattcatcccacgtgcaaagacctacgagacggtcaatcccgaatattcaaattatgccggaaaagcattcggtaatttccaggctatgctagccgatattccggaaacactgggagaaacgattcccgacttccacaacatggagttccgtctcaaacaacttcgtgacgctgttacagcgaatgcagccggaagagtggcagaagtacagtactatctggatgaaatagaaaaacgtgcagacgaaatgtgtaaagcggaacgtctgtatcgggaaggtaaactccccaaacgagtctgccattgcgatacgaaagttaataatatgatgttcgacgaagatggcaaagtgttatgcgtcattgacttggatacggtaatgcccagctttatcttctccgactacggtgatttcctccgtacgggagctaatacgggtgacgaggacgacaaggatttggatcgtgtcaacttcaatatggaaatattcaaggcatttacaaaaggctatctggaaggcgccaagtcattcctgactccgatagagatcgagaatcttccttatgcagccgcactattcccttatatgcagtgtgtacggttcttggctgattacatcaatggagatacttactataagattaaatatcccgaacataacttggttcgcaccaaagcacaattcaagttattgcaaagcgtagaagctcacacaccggaaatggtggaattcatcaacgaatgcttaaaaagttgagagtggagaattgagagtggagagtttacctggtaaaagctccattctcccagcgataaacaataggacggcggagaaacggcttcaatttctctgccgtttcttttgacatataatcgggagtggtcaatgtaacggtcagctctgtattctctttattaaagtcagctttcatcagtagcatatctgccggacggctagcctcatcaaattcataaacagctgtcggttccggagtattcaggaaatcgttcaatatcggtaaagtgacaaactgagaagctgcaagcggttgccagtcggtagtataaaagtgaatacggctgtcgcaagcaggagcgcaagccgtagaaatagtacaaataatattcgtcgtatcgttcaacgctaataatttcatttgccacgtagtctgtggagacatctgcatacggatatagtctttacttaaatccgtcatttccgatttcttaccgaatcggttctctacctgtgccctcatcttactttccagaaagtcgatacagtcttcacgatttactttggtcagcagagtactcaaagaatccggcatattcacaaatacggttttagcttcttgcgcctgaagagaagtcatagaaatgctcccggcaacagaaaaaaagatagcgactgctaatttatttattttcatatttatcttatttagtccccaaatataagaatatcattccgattaacactagtataaggtcaatcgctttgctttttaaattcttttcacggaagaaaagcgcaccgaaaatgaaagaaacaattacacttccccgacgaaccatcgaaacaatggaaatcatggaatcatcataactcaatgcatagaaatagacaaagtcggctgcagagaggaaaatggaaatcaggataatcgtccaatcccagcgaaaaggggtagtcgactttcttttcggccaccaaagcaataacagaatgggacacatgataaaaacctgataaacattataccaagactgcaccaacatcgggttcaatgacttcatcagatacttgtcatacaatccgctgatagctcccgttatcgcagccagcacgataaagaatatccatttattatgcttgaagtcgattccttctttctttcccgaacggctcagcatgaaaaaagagacaacagccagcagcacaccgatccattgataaaggttcaaccgctcgccaaacacgagcattgcccctacaagcaccatcaccggacgggtggcattgatcggtcctacgatcgtaataggcaaatgtttcatcccgaaataaccgaatatccatgaagacagcactatgaatgacttgatgataatatatttatgctgttcccaacccgcaacagggacattgaatatacttccttccaacagattcggctcatatatagagaacaggataaacggcaggaagataaggctggaaaagaaagtgttcaagaacaatacaggaagcaccgcattgtctttcagtgatttctttttaaatacatcataaaagcccaacaaagtagctgatagaaaagccaataataaccacatagaaaataagtaagaagtaaaaattaaaaattaaaaattaaaggtgtgtaggagaaaggaatatcgtatcaggatattccacattcaccagaaacaaagcctgtcccggagcggaagtcccggctttgcaacggtctttctgttctataattcgcctgaagccctcaatggaaagctttccacgccccacttcaatcagtgtgcccactatggcacgcaccatattccgcaaaaagcggtcggcccggatggtaaacacccaagtggcgtcctcttcccgtgtccattccgcatgggtaatatggcagatatttgtctttacatccgtatgcaatttgctgaaactcgtaaagtcagtatattcgaaaagcactttcgccgcctcattcatacgttcataatccaacggactgtaaaccctgcagcgatattgccggttgaaaggatatttggcagtggtcacataatatttgtaagtccgggctgtcgcatcaaaacgcgcatgagcctccggccggacacggcaaacacgataaacagaaatatcaggcggtaacaaacgattcagtttgtcggcaacggattccgtatccaacggttcatcatagtcaaaatgggcaaccatcaaagaggcgtgcacccccgcatcggttctccccgctcccacaacttctatctcacgacgcagaaaggtagacaatgcgttcatcaagcattcctgcacactaattccattcggttgaatctgccaaccgtgatagttggttccatcataagccaaataaataaaatacctttgcacgcttattcctccttttttgaattttcgcgtgcaaaagtagtcattttatcttatttatctttgtatagttcgcataaactcgtatatttgaaaaacaatatggatgattcactaactgtaccaaattatgagcagtactattttcctcattatcgccctcgtcacaacaggcatttttgtgattcaatttattctatcaatcttcttcggagatatagacgctgatgttgacgtagacactgacatcagcagcgtagtttctttcaaggggctcacccatttcggaatcggatttggctggtatatgtatttggcaggaaatacggagattcaaacctatgccgttgcaatctttgtaggtctctgtttcgttctcgccgtctggttcttgtataaaaaagctttccaactacaacaggtaaaccgttccgaacagacagaacagttggtcggacgcgaatgtacgatctacttcaagcaaaatgacggcagatacaccgtacagacaaaacgggatggagccatgcgcgaagtggacgtaatctccgaatcgggaaagacgtatcaaacgggagaccatacggttatcacccgatatcagaatgggacattgtatattcagtaactatttaaaatacacaaatctatgacacaagaaattctaatcatggtcgctatattagtggcggtcatcttactcacttttatcggtatcttgtctcgttatcgcaaatgtaagagtgacgaagtcctcgttgtatacggtaagacaggaagagacaaaaaatccgcaaagctatatcacggaggagcagcctttgtatggccgattatccaagggtatgagttcttgtcaatgaagccgatgcagatcgactgtaaactgacgggggctctttccgcacagaatatacgtgtcgatgtaccgactactatcactgtagccatcagtaccgacccggaagtgatgcaaaatgccgccgaacgtatgttagggctgacaatggacgacaaacagaatctgattacagatgtagtctatgggcagatgcgtttggttatcgccgacatgacgattgaagaactgaactccgaccgcgacaagttcctttctaaagtaaaagacaatatcgatacggaacttcgcaaattcggtctgtacctcatgaatatcaatatcagtgatatccgtgacgctgccaactatatcgtaaacttaggtaaggaagccgaaagtaaggcacagaatgaggcgcaagcgaacatcgaggaacaggaaaaattaggtgccattaagattgccaatcaaataaaagaacgggaaacaaaggttgccgagacgcgtaaagaccaggatatcgccattgcggaaacaaagaaattgcaggaaatttccgttgccaatgcagataaggacagaatctcccaagtagccatcgcaaatgcggaaaaagaatctcaagtagccaaagcggaagctgaaaagaacatccgtatcgaacaggcaaataccgaaaaagaaagtcgtattgccgaactgaactccgacatggaaatcaaacaggcggaagctgcgaagaaagccgctatcgggcgaaatgacgcacaaaaagaggttgctttatcaaatgcggatttggctgtaacacaagctaacgctgataagcaagccggtgaagcagctgcaagatcggaagcagctgtacaaacagcccgtgaaatcgctcaaaaagaagtagaagaagcaaaagcccggaaagtggaatcttcattaaaggcggaaaagattgtacctgccgaaatctccaggcaggaagctattcttcaagcaaacgctattgcggaaaagataacccgtgaagcggaagcccgtgcaaaagccactttggcacaagcggaagcagaagcaaaagctatccaactgaaactggaagcggaagcagaaggtaaaaagcgttcattacttgccgaagcggaaggtttcgaagcaatggtaagagctgccgaatccaatccggctatcgccatccaatacaagatggtagaccaatggaaagaaattgccggtgaacaggtgaaagcattcgaacatataaacttaggaaatatcaccgtatttgacggcggaaacggaggaacaagcaatttcttgaatacattagtaaaaacggttgcaccaagtctcggtgtattggacaagttgcctatcggtgaaacagtgaaaggtatcattaatccggaaaataaaacggaagaaaagcccgcaacgaaagctgaagaaaaaaagaaataatccgaatttattagtttagtaaagtgcgctgatgagaaaaagaaaagtcttattctcatcagcgcacttttatcatatatacgaatcagtataaaaacggtgcggaaaggagccaaatactatttttatttctttttctgcctaatcagattagccgcgttacttattctttttgcgtttgactatagtattccgcaagagtaactatagtcttccttacgtataactatagtcatacgcaaagtacactatagttatacgaagtaaaagtaacgaatgaaatgagtctaaatagtgaatcgattataaaagaatgcctatagaaatcaataagaataagaaggctatcattgtttaattcaaaacctagtacgttatgaatatgcagcggaaataatgcaaagcatagaacgtatggaaaaatagcgtatatttgcgggcaaaaagacaaaatgactatttacaagcttcgcatactaccactatttttactagttattagcttcacgacattcacttcagggtgcaaaaagaaagatatgtcactgaaactgaatgagccccgcaacattcgtggcgttgtcagttacaaacgctctttccctgatttgaacgatgcacatctcaaagtcgctaaaaagataggtatcaacccgttggcagaccgagaggaagcggaagctatgaaagaaaagctgactcatatcactgataatgatttctatacagtagattcattaacgcactccatcccctacctcgttccacgtgccagcgcattgctcgatacaatcggctccaactttctcgattcactggctgccaaagggttgaacccgaatcaagtgattgtcacatccgtgctgcgtacacaaaacgatgtgaagcgtctccgccgccgcaacggaaatgcttccgtcaattcggcacattgtttcggggctactttcgatgtaagttggaaacgcttcaagaaagtagaagatgaagacggacgtcccttacaggatgtcagcgcagacacccttaaactcgtcctgtcagaggtattgagagacttgcggaaagctgaaaaatgctatattaaatatgagctgaagcaaggttgtttccatattacggccaggtgacgtaagaaatgaatgtaaattgcaataaaattcgcccctaaacaatcagagaatccaaaacgtttcattaaatttgcagaaatttttctttaatacaattgaatgatagagaaactgattgttcttgaggacattgatccggttattttttacggcgtaaacaacgccaacatacagttaattaaagctttatatccgaagctacgcatagttgcccgaggtaatgtcatcaaagtgctgggcgatgaggaagaaatgtgtgctttcgaagaaaatatcaccaaacttgagaaatactgtgccgaatataactctctgaaagaagaggttatcattgacattataaaaggaaatgccccgcaagcagagcaaaccgggaacgtgattgtattcagcgtcacaggaaaacccatcatcccccgaagtgaaaaccaactgaaactggtagaaggatttgccaagaatgatatggtattcgccatcggtccggcgggttcgggaaagacatataccgctatcgcccttgccgtacgcgcactgaagaataaagaaatcaagaaaatcatccttagccgccccgccgtagaagccggagaaaagctcggtttcctgcccggcgacatgaaagataagatcgacccatacttgcaacctttatatgatgccttgcaagacatgatacctgccgccaagttaaaggaatacatggaattgaacgttatccagattgctccgttagcctttatgcgcggacgcacactgaatgacgcagtcgtaatcttggatgaagcccaaaacaccactacgcaacaaatcaaaatgttccttacccgtatgggtatgaacaccaaaatgattgtgacgggagacatgacacagatcgacctccccgcttcacaaacatcgggactggtgcaagccctccgtatcttgaaaggagtgaaaggtatcagttttgttgaactgagtaaaaaggatatcgtacgccataaactggtggaacgtatcgtggatgcttacgaaaaattcgacaaagaagcgaaagccgaacggaatggtgaaaataaagaaacataattttaatatatatcattatgaaagcattaacaaaaacagatttcaactttccgggacagaaaagtgtgtatcacggaaaagtgcgcgatgtgtacaacatcaacggcgaaaaactcgtcatggtagcaaccgaccgtatttcggcctttgatgtagtactgcccgaaggtatcccttacaaaggacaaatgctgaaccagattgcagctaaattccttgacgccactactgacatttgcccgaactggaaactggctactccggacccgatggtaacggtaggtgtattgtgcgaaggcttcccggtagaaatgattgtacgcggctatctctgcggcagcgcatggcgtgcttacaaaagcggtgtacgcgaaatttgcggtgtgaagttaccggacggaatgcgtgaaaacgaaaaatttccggaaccaatcatcactccgactacaaaagccgaaatgggattgcacgacgaagacatctccaaagaagaaatcctgaaacaaggactggctactccggaagaatatgaggttctcgaaaaatacacattagctctcttcaaacgcggcactgaaatcgcagcggagcgcggactgattctcgtagatacaaaatacgaattcggtaagcataacggtaccatctatctgatggacgaaatccacacaccggactcaagccgttatttttactctgaaggttatcaggaacgcttcgaaaaaggcgaaccgcagaaacagctttctaaagaattcgtccgcgaatggttgatggagaacggtttccagggtaaagaaggtcagaaagtgcccgaaatgactccggctatcgtacagagcatcagcgaccgttatatcgaattgttcgagaacatcaccggtgagaaatttgtaaaagaagataccagcaatattgctgaacgtatcgaaaagaacgttatgaatttcttgactgaataagaatggattacccgcaacaacatatcaaaccttacgacaaggaaggaaagaaaaccgagcaggtggaacgtatgttcgacaacatcgcacatgcctacgataagttgaatcacaccttatccttagggatagaccgcagttggagacgtaaggccatagcctggcttcgccctttccatccgcaacgtatgatggatgtagctaccggcacaggagattttgccatccttgcctgccgcgagctgcaacccgctgagttaatcggcacggatatatcggaaggtatgatgaatgtggggcgtgaaaaagtaaagaaggaaggactctcggacaaaatatcttttgcccgggaggactgtacttcactctcttttgccgacaatgactttgacgctattaccgtagctttcggtatccgcaacttcgaagacctcgacaaaggtctctccgagatgtgccgtgtactgaaaccgggaggccatcttgtgattctggagctaaccactccggagcgctttccgatgaagcaactattctccatctactcaaaaatcgtcattccgttactgggcaaacttctctccaaagacaacagcgcttaccattatttgccggacaccatcaaagtatttccgcaaggggaaataatgaaaggagttctttcaaaagccggattcggcgaagtgagtttcaagcggctgacctttggtatctgcactctttatactgcgacaaaatagtgagttaattaatttaatccttttcttttatggaaaaatatggtttaatcggttatcctctgagacattcattttctatcggatactttaatgagaaattcaaatccgagggtatcgatgcagagtatgtgaatttcgagattcccagtatcaataacttcatggaagtcatcgaagagaaccccaatttatgcggactcaatgtcaccattccttacaaggagcaagtaattcctttcctggatgaactcgatcgtgacacggcaaagataggcgcagtaaacgtgattaaaatcatccgccaaccaaaaggtaaagtaaaattagtaggttataactctgacattatcggattttcccaatccatacagcctttattgcaaccccatcacaagaaagccttgattctaggtaccggcggggcctccaaagcagtctatcatggacttaaaaatctgggaatcgaaagtgtattcgtttcacgcactcataaagcggacaatatgctgacttacgaagagctaacccccgaaatcatggcggaacatacgattatcgtcaacactactcccgtaggtatgtttcctaaggtcgatttctgcccgaatatcccatacaatctagtaactccaaaccatttgctctacgatttgttatataatccgaatgttaccctttttatgaaaaagggtgaagcacaaggagccgttgtcaaaaacggtctggaaatgttgcttcttcaagcattcgccgcttgggaaatctggcataagtaaatcacatttcccctcactctcggcagaagaagtcaggggcaaatcaaagaggtacaattatgaggagaaaagttatctatagcattatcgttgtcatgttgatattgaccggttgtaccattggaggaagtttctatatgttgaatttatctctgacgccggatggcaagatattgtctaaagacgctgattcttatccttttatgtacagaaactatccttttctgcgttcgtgggtagatagtctgcgacaagtaaatgccctgaaagacacttttatcgtcaacccgcacggcatacagcttcatgcttactatgtggctgctcccagacccacaaacaaaaccgcagttattgtacacggatatacggataatgctatccgtatgtttatgatcggttacctctacaatcgggatttaggcttcaacattttgcttcccgaccttcagcaccaaggcgaaagtgaaggtcgggccattcagatgggatggaaagaccgtctggatgtattgcaatggatgaacatcaccaatagtatctttggagacagcacgcagatggtagtgcatggtatttcgatgggaggcgcaaccacaatgatggtatccggtgaggagcagcagcctttcgtcaagtgctttgtggaagattgcggttataccagtgtgtgggatgaattttcccatgagctgaaaagttctttcggtctccctcctttccctttgatgtataccaccagttggctatgcgaaaagaagtacggatggaatttcaaagaggcctcttcgctgaaacaagtagcaaaatgccaactgccgatgttgtttatccacggtgacaaagatacatacgttccgacttggatggtttatccgctttacgaagcaaaaccggaacctaaagaactttggatagtaccaggtgcggctcacgccctttcatacaaagagaataaacaggaatacacagataaagtccgtaagtttgtcgggcaatatattcattaaacgatgaaattaatattcacattcatagctattactttcttgctgatccccttacgggctcaagagaaagtgtacacagtagacaatcttccgaaagtccacttacagaataagacgcaatatgtatgcaatcctgcgggaatactgtcaaaagcagcctgtgatagtatagattccatgctttatgctttagaactgcaaaccggtattgagacggtcgttgcagtggttccctccattggagaggaagattgtttcgatttctgtcatcaactgctcaatcaatggggtgtaggaaagaaagataagaataacggtttggttattctattagtaaccgaccaacgctgcattcaattttataccggatacggtctggaaggagttctccccgacgctatctgcaagaggattcagacgaaatacatgattccgtatctgaaagacgggaattggaatgccggaatggtggccggtttgaaagcgacttgccaagtccttgacggttatatggagaacgattctctttccggttcaaccaataacggaggttcattcgatttcatcctcgccgtatttttctttatactgattggtggaggtatcgctttcctttccgcacgcaagcaaagccgttgtccgaaatgcggaaaacacacgttacaaagaagcggtagtcggctgatctccaaagtcaatggcgtaagaaccgaagacatcacttacacgtgtagaaattgcggtcataccctcacacgtcgccaacaaagttatgacaatgattatcatcaccgaggtggtggcggtccgtttattggtggtttcggcggaggcagaagtttcggaggcggaggcagttttggtggaggcagcttcggtggaggaatgggcggaggaggtggtgccggttcacgattctagtcaattcacgactccaactaaaacctagaaaagtcaaggaaacaccaagatttaaaatcaaattatcaatatcaatcaataaaaacgataaatatgaaaaagtcagttatcattattttagccgttatagctgtcattgtcatttgggctgtcagcatgtacaacggtcttgtcgctatggatgagaaagtaaatggtcaatgggccaatgtagaaactcaataccaacgccgcgccgatttaattcccaatctggtaaatacagtaaaagggtatgcgacacatgaaaaagaaacgctggaaggagtggttgaagcacgcagtcaagcaacacaaatgaaagtcgatgcagccgacctgacaccagaaaaactcgctcaataccagaaagcacagggcgccgttacttccgccttaggcaaattattagcaattacggaaaactatccggatttgaaggctaatcagaacttccttgaactgcaagcccaattggaggggacggaaaaccgtatcaacgtggcacgcaaaaatttcaatgatgctgcacaggcttataacaccaatatccgccgtttccccaagaatatctttgccggaatgttcggatttgaaaagaaagcttacttcgaagcggaagaaggtagcgaaaaagcaccgaaggtagagttctgaaaagaggcaacggcatttctagtaagatagttggctgtacaaaaaaaaagcagtacttttgcagccgtatacaaaataattctataactcatgagtaatcaacgatacatgatgcgtggcgtaagcgcatcaaaagaagatgtgcacaacgccatcaagaacatcgacaaaggaattttccctaaagcattctgcaaaatcattcccgatatattgggaggcgatccggaatactgtaacatcatgcatgccgacggagccggaaccaagtcttcgcttgcttatatgtattggaaagaaaccggcgacctgtccgtttggaaaggtattgcgcaggacgctttgatcatgaatatcgatgacctgctttgcgtgggggccgtagataatattcttgtctcttctaccatcggacgcaacaagctgttaattccgggggaagtaatttccgccattatcaatggaacggatgagctgcttgccgagctccgcgaaatgggagtaggcgtatatgccaccggtggtgagacagccgacgtcggtgatcttgtccgcactattattgttgattccacagtaacttgccgcatgaaacgttcggatgtgatagacaatgccaacatccgtccgggtgatgtgattgtcggtcttgcttcttacggacaagctacttatgaaaaagaatacaatggcggcatgggcagcaacggcctgacaagtgcccgtcacgacgtattcggcaaataccttgcagaaaaatatccggaaagctatgatgcggcagttcccgaagaactggtttattctggaaacctaaaattgacagacagtgtggaaggctctccgatcgacgccggcaagttagtactctctcctacccgtacatacgcgccggtagtaaagaagttgttggatgcactacgtcctgaaatacacggaatggtacactgctccggtggtgcacaaaccaaagttttacactttgttgaaaacgttcgtgtagtgaaagataatcttttccctgttcctcctttattcaagactattcaagaacaaagcggcacagattgggcggaaatgtacaaggtgttcaatatgggacatcggcttgaagtctatctgtcaccggaacacgctgaagaagttatcgccatttccgaatcatttggaataccggcacagattgtcgggcgtatcgaagcatgtgacaagactgaattaatcattaagagtgaattcggagaatttagatactaaagaatggcagataacagtaccatattagagaaactggacggtcttgtagcccgttttgaagaaatatcaaccctcatcaccgacccggcagtcattgccgaccagaaacgttatgtcaaactgacaaaggaatacaaggaactggatgacttgatgaaagcccgcaaggaatatattcaattgctgggcaacatcgaagaagccaaaaatatccttgccaccgagtcggatacagatatacgcgaaatggccaaagaggaaatggaccttagccaggaacgccttccggtattggaggaagaaatcaagttaatgcttgttcctgccgacccgcaagacagcaagaatgccattcttgaaattcgcggtggagcaggaggcgatgaagcggcaatctttgccggtgaccttttccgcatgtatgccaaatactgcgaagtaaaaggatggaaactggaagtctccaacgccaacgaaggaactgccggcggatacaaggaaatagtttgtagtgtcacgggagacaatgtttacggcacattgaagtatgaatcgggtgtacaccgcgtacagcgtgttcccgccacagagactcagggacgtgtacatacttcggcagcttcggtagccgtacttcctgaagcggaagagttcgatgtggtcatcaacgaaggagaaatcaaatgggatactttccgaagcggcggcgcaggcggacagaacgttaataaggtagaatccggagtgcgtctgcgctatatctggaagaaccccaataccggtgtttccgaagaaattctgatcgaatgtaccgagacacgcgaccaacccaaaaataaagagcgcgcattggcccgtctccgtactttcatctacgacaaggagcatcagaaatatatcgacgacattgcttccaaacgtaaaacgatggtttcaacaggagaccgctctgcgaaaatccgtacatacaactatccgcaaggacgtatcaccgaccaccgcattaattacacgatttataatcttgcggctttcatggacggggatatacaagactgtatcgaccacctgatcgtagctgaaaatgcggaacggttgaaggaaagcgaactttagataagttgagagttgaaaattgagagttgagagtgattctaaaatagtaaaaaatagtaaacaataagatggataagcaacaattatttgaaaacataaaacgcaaaaaatcattcctttgtgtagggcttgatactgacatcaagaaaattccggaacatctgctgaaagaagaagatccgatttttgctttcaataaggcaatcatcgacgcgacagccgatttgtgcatagcctacaaacccaatttggctttttacgaaagtatgggtgtaaaaggatggatcgcttttgaaaagacagtaaagtatatcaaggataattatccggatcagttcatcattgccgatgcaaaacgtggtgatataggaaacacttccgccatgtatgcccgtactttcttcgaggaactggatatcgactctgtaaccgtagctccttacatgggagaagacagtgtgactccgtttcttacttacgacaacaaatgggttatcctgttggcattgacttccaacaaaggatctcatgacttccaattgacagaagatgcaaatggcgaacgtctatttgaaaaagtactgcgcaaatcacaggaatgggcaaacgatgaccgtatgatgtacgtagtaggcgctactcaaggacgtgcttttgaagatatccgcaaaattgttcctgaccatttccttctcgttcccggtatcggagcgcaaggcggctcgctcgaagaagtttgcaaatatggtatgaatagcacttgtggattgattgtaaactcttcccgtggcattatctacgtagataagacagaaaagtttgcagaagctgcccgtactgctgcacaagaagttcaggcacaaatggcagaacaattgaagagagtgattaacaatcagtaattaagtggtctacgaaagaaagataattaacgacccggtattcgggttcattaatatacccaagggattactgtatgatattgtacgtcatcccctattgcagcgtcttacccgcatcaagcaggtgggactctcatcggtagtatatcccggtgcacagcacacccgtttccaacattcactgggagcattctacctaatgagcgaagcaatcacccaactagcgtccaaaggtaattttatctttgacagtgaagcggaagctgtgcaggctgccatccttctgcatgacattggacatggcccattctcacacgtactggaggatacaatcgtgaaaggaattcctcacgaagaaatttccctcatgctgatggaacggatgaacaaggaggtgaacggacaactcagtcttgccatccaaatcttcaaggatgaatatccaaaacgtttcttgcatcagctggttagcggacaactggacatggaccggcttgattatcttcgtcgtgacagtttttatacaggagtaacagaaggaaacatcggctctgcacgaatcataaaaatgcttgatgtggccgacgaccgtctcgtagtcgagtctaaaggtatctattccatagagaactttcttatggcacgccgtctgatgtattggcaagtatacctgcacaaaacctcggtcgcatacgaaaaaatgttgatcagtactcttctacgcgctaaagaactagcctcacaaggaatagaactgttcgcatcgcctgcattacattttttcctttacaacgacatcactcctacggaattctacagcaatcccgattgcctggagaattttatccaactggatgacaatgatatctggacggctttgaaagtatggagcacccataccgataaggtactttcgactttaagtatgggaatgattaaccgaaatatctttaaagtggaaatttcgtcggaaccgattagtgaagacagaaaaaaagaattaactttgcaaatcagccaacaactagacatacccctttccgaagcgaactattttgtttctacccccagcatcgaaaagaacatgtacgacccggcagatgacagtattgacattatctataacgacggcacaatcaaaaacatagccgaagcttcggacatgctgaacatctcattattgtccaaaaaggtaaagaaatactatctctgttaccagagattacacagataagtataaaatattcattcaataacacggaaatctgaaaaaaaagtccgttatttgtgaactaattaaattttaaataaaagacatggagttctcggctaagcaaattgcagaatttatccaaggggaaatcattggagacgaaaacgctacggtacacacattcgctaaaattgaagagggaatgcccggagcaatttctttcctgtcgaaccctaaatatacaccttatatctacgaaacacaatcaagcattgttctggttaacaaggattttactcctgaacatgaaattaaagccactcttatcaaagtggaaaatgcatacgaaagtctggcgaaactgctcaatctctacgaaatgagcaaacctaaaaaacaaggtatcgattcactagcatttgttgcccccagtgccaagattggtgagaatgtatatattggtgcttttgcctatatcggtgaaaataccgtaattggagataacacccagatttatccacatacttttgttggagacggtgtgaaaataggtgataattgtctgctttactcaaatgtcaacatctaccacgactgccgtataggtaatgaatgtatcctgcattcaggtgctgtgatcggggcggacggatttggctttgctcctactccgaacggatacgataagattcctcaaatcggaatcgtgattctggaagataaagtggatataggcgccaatacctgtgtagaccgtgctacaatgggagctacaatagtacatagtggtgctaaaatagataatctggtgcagatagcacataatgatgaaataggttcacatactgtgatggctgcgcaagtcggtattgccggctctacaaaaattggtgaatggtgcatgttcggcggtcaggtcggtattgccggacacatcaaaataggggataaagtaggattgggcgcacaatccggtgttcccggagacatcaaatccggaagccagctgatcggaactccacctatggatcccaaacaatatttcaaagcgtccatcataagaaaaagcctgccgaatatgcagaaggagctacatgacctgcgcaaagaaatcgaagaattaaaacaactattaaataagtaaccaatgctgaaacaaaaaacgctgaaagatagcttttcactgagcgggaaaggtcttcacactggacttgatctcactgtaacattcaatccggctccggacaatcacggatataaaatccaacgtattgacgtagaaggacaaccaataatcgatgcagtagccgacaatgtggtggaaaccacacgtggtactgttttgtcgaagaatggagttaaagtaagcaccgtggaacatggtatggcagccctttacgcattgggcattgataactgtcttatccaggtaaacggcccggaatttccgatattggatggtagcgcacaatattatgtacaagaaatagaacgtgtaggaacagtagaacagaatgctgtcaaagacttttatattatcaaatctaaaatagaattccgggatgaaacgaccggttcatccatcatcgtattgccggatgagaattttagcctgaatgtattggtttcctacgattcaaccatcattccgaatcagtttgcaacactcgaagatatgcataaattcaaagacgaagtggctgccagccgtactttcgtctttgttcgcgaaatagaaccgttactttccgccggcctgattaaaggtggcgacttggataacgctatcgtaatctacgaacgtaagatgtcgcaagaaagtttcgataagttggcagatgtgatgggagtaccccatatggacgccaatcagttaggctatattaatcacaagccattggtttggccgaacgaatgtgcccgtcacaaattgctggatgttatcggtgaccttgccttaatcggtaaaccgatcaaaggacgtatcatcgctacccgtcccggacatacgatcaacaacaaattcgcccgtcagatgcggaaagaaatccgtctgcacgaaatccaggcaccgggctatgactgcaatcgggaaccggtaatggatgtaaaccgtatccgtgagctactacctcaccgttatccgttccaattggtggacaaagtaattgaaattggtgccaactatattgtaggcgtcaagaatatcactgctaatgaacctttcttccaaggtcattttccacaagaacctgttatgccgggtgtactccaggtagaggctatggcacaggtcggaggtttgcttgttctcaactctgttgatgaaccggaacgttattctacttatttcatgaagatagacggtgtcaaattccgccagaaagtagtgccgggagatacactgattttccgtgtggaattgttagcccccatccgtcgtggaatctctaccatgaaaggttatgcatttgttggagagaaagtggtttgcgaagctgaattcatggcacaaatagtaaaaaacaagtaattaacaattgaaaattcaaatgataagtcctttagcgtatatccatcccgaagctaaaataggggaaaatgtagaaattgcgccttttgtattcatagataaaaacgtggttatcggcgacaataataaaattatggctaatgccaatattttatacggctcgcgtatcggcaacggaaacactatatttccgggagccgtcatcggggccatcccgcaagaccttaaatttcgcggagaagaatcaaccgctgaaatcggagacaacaacctgattcgcgaaaacgtaacaatcaaccgtggtacggcagctaaagggcgcacgattgtgggaagcaacaacttactgatggagggtgtgcacgtagcacacgatgcattagtgggaaacggatgtatcataggcaattctaccaaaatggcaggcgaaatcgtgattgacgacaatgcaatcgtcagtgctaacgtattgatgcaccaattctgtcatgtaggtagtcatgtaatgattcaaggcggatgtcgtttcagcaaagacatccctccttacatcatcgcaggacgcgaacctatcgccttcagtggtatcaacatcatcggtctgcgccgtcgcggttttgccaatgaagtgatcgaaagcattcacaatgcctatcgtatcatctatcaaagtggtttgaatacgacagaagcattaaagaaaattgaagatgaatttgaaaagagtccggagattgactatattatcaacttcatccgtaactcagagcgtggcattattaaataaacagttcaaaatagtcatattatgatatacagatttactattatatctgatgaagttgacgattttgtcagagaaatacaaattgacccggaagctactttctttgacttccatgaggcaatactgaaatcagcagggtatacaaacgaccagatgacttctttctttatctgcgatgatgattgggaaaaagaaaaagaagtcactttggaagaaatggatgataatcccgaaatggatagctgggtgatgaaagaaaccacaatcagcgaattagtagaagatgaaaagcagaaattactctacgtattcgattacatgacagaacgttgtttcttcatcgaactatctgagattatcaccggaaagaatatgacaggtgccaaatgtaccaagaaatctggagaagctcccaaacagactgtggattttgaagaaatggctgctagcggcggttcgcttgatttagatgaaaacttctatggcgaccaagacttcgatatggaagacttcgaccaagaaggattcgatatcggtggcgatacaggtagcccttatgacgaagataaatattaatttaacgattagtgatttaatgataagtgtggtaaagattcgtttattcacagatcattaaatcactaatctgttaccattaaccacttatcccccttgcctactctcattgttcttataggtcctaccggtgtaggaaaaacagaattaagcctgcggatagcagagtcttttcaaacaagcattgtatctgctgattcaagacaactttacgccgaattaaagataggtacggcagctcctactcccgaccaactcaaacgtgtacctcattatttggtcggtacgcttcatttgacagattattacagtgccgcccaatacgaaacggaagcgttggaaatcctcgataagttatttacgcaacacgaggtcgtggttcttaccggtggctcaatgatgtatgtagacgctatctgtaaaggtatcgacgatattcctaccgttgatgcggaaacccgccaactcatgctacagaaatatgaggaggaaggacttgaacaactctgtgcagaacttcgcctgctggatccggaatattatcggatagtcgatctgaagaatcccaaacgggttattcatgcattggaaatttgttatatgaccggacgcacttatacctcttttcgcacccaacaaaaaaaagaacgtccgttccgcattattaaaataggattaacccgtgaccgggaagagttgtatgaccgtattaaccgtcgggtagatatgatgatggaagaaggattactggaagaagtacgctcggtacttccctatcgccacctcaattcgctcaacacagtaggttataaagaactgttcaagtatctggatggagaatgggaactctcctttgccatagataaaatcaagcaaaactcccgcatttattcgcgtaaacagatgacttggttcaaacgagatgaagaaatacaatggttccatccggaacaagaaacggagatactggcgtacctccgtcaacaaatagggtgacattgcaagcagtttcttctcgagtccacagcgacaatatttaaagtccttttcacaaagagattgaaacttcccaataatccttatcaaatctgcataaaaatccatcaggttttgtcgaatctaagtttattgttacttttgcaattacgaataaaaaccaaaaccgaattaaaaaagcagatgaaaaagatcagcatcactctattactctgccttctctgtctgacaggaatggcacaaggacaaaaggcactcgatttaaaagatatcacctcgggacatttccgtccggaaaacattcaaggcgtaattccgatgcctgatggagaacattacacacaaatgaatgatgacggcactcaaatcatcaaatattctttcaagacaggtgaaaaagtagaagtgatcttcgatgtaaagactgcccgcgaatgtgatttcaagcacttcgacagctatcagttctcacccgacggaaaaaaactactgattgccaccaagacgaccccgatttatcggcactcatatacagctgtacattatatctaccctttgaaacgaaatgataagggcgttacgacaaacaacatcattgaacggctgtctgacggcggacctcaacaggtccccgtcttttctccggacggaacaatgatagcttttgtccgcgataacaatatctttcttgtgaaactgctttatggcaatagtgaaagccaggttaccgaagacggtaaacagaactctattatcaacggcatcccggactgggtgtatgaagaagaattcagttttaaccgtgcgttggaattcagtgccgataatacgcaaatcgcttacatccgttttgacgaatcagcagtaccgtcctattcttttccggtatttgccggacaagcaccccacattaatgctttgaaggactatccgggtgaatatacctacaagtatccgaaagccggatatccgaattccaaagtcgaggtacgcacttatgatatcaaatcgcacgtcacccgcacaatgaaacttccgttggatccggatggatacattccccgcatccgctttaccaaagacgccaacaagctggccatcatgacactgaaccgtcatcaagaccgcttcgatctttattttgccgacccacgttcaacactttgcaaactggtgctacgtgatgaatcaccctattatatcaaggagaacatcttcgataatatcgaattctatcctgaatatttcagtttgctcagcgagcgtgacggatatagccacctctattggtacagtatgggaggcaatcagatcaaaaaggttacaaacggcaaatacgaagtaaaagacttcttgggatatgacgaagaggacggatctttctattacaccagcaatgaagaaagtcctttgcgtaaagcagtctacaagatagataagaaaggtaaaaagaccaagctgtctcaaaaaagcggaaccaataccccgctcttcagcaaatcaatgaagtactacatgaataagtttacgagtcttgatacccccatgttggttacgttgaacgacaattcgggtaagactctaaaaacattggttacgaatgacaagttgaaacagaccctgtccggatatgctgtgccgcagaaagaattctttactttccagactacggatggtgtaaccctgaacggatggatgatgaaacctgttaatttctccgcatcgaagaaatatccggtgttgatgtatcaatatagcggaccgggctcgcaacaagtattggatacatggggaatcagttgggaaacctatatggcgagtctcggctacatcgtagtatgcgtggatggtcggggaacaggaggacgcggagaagccttcgagaaatgtacctatctgaaaatcggagtaaaagaagccagagaccaagtggagaccgctctctatctcggtaaacaagcatacgtggataaagaccggatcggtatttggggatggagctacggcggatacatgactctaatgagcatgagcgaaggtactcccgttttcaaggcaggcgtagccgttgccgcaccgaccgactggcgtttttatgacactatttataccgaacgtttcatgcgtactcccaaagagaatgcagaaggatacaaggcctcatccgcttttacccgtgccgacaaactgcatggcaacttgttgctcgtacacggtatggcagatgacaacgttcatttccagaattgtgcagagtatgccgagcagctggtacaactcggaaaacagtttgatatgcagatttataccaatcgcaatcacggaatatacggtggaaatacccgtcagcacttatacacccggttgactaacttcttcttgaacaatttgtaatggctgacagagtacgtaagcctgaatggctgaaaattaatatcggtgccaacgaacgatacaccgaaaccaaacgaatagttgattcccactgcctgcacacaatctgcagcagtgggcgttgccccaatatgggagaatgctgggggaaaggaacggctactttcatgatcggcggtgacatctgcacccgcagttgtaaattctgcaacacacagaccggtcggccacatccgctggatagtaacgaacctactcatgtggcagagtccatcgcactaatgaaactcgaccatgctgtcatcacttccgtagaccgtgacgacctcccggacttgggggccgaacattgggcacataccatccgcgagataaagcgcctgactcctcagactaccatcgaagtgctgatacccgattttcaaggaaaaacggaactggtagatctcgtgatagaggcccatcccgatattatttcacacaatatggaaaccgtacgccgcattagtccgctagtgcgcagtgcagccaactacgacacaagtctgcaagtaatcggccgcatctcttccaaaggagtgaaatcaaaaagcggcattatggtcggtttaggagaaactccagaagaagtggaaacattgatggatgacttattgactgtcggttgccaaattcttactatcggacaatacctgcaacccagccaccgtcattatcccgttgcagaatacgtaactccccctcaatttgcaaaatacaaaacaatcggtttagaaaaaggatttaacattgtagagagcgctccccttgtccgttcatcctaccatgcagagaaacacatccgttaagcaaacaaaacacaggcactatttgttttataagcagaaccgacaaataaacattaagtagagatggagcataaaggaatactttcttctgcatttaacatgtcactgggttttgtccccgttattatttccattttattgtgtgaacttataacgcaagacacggctatttacatcggtacaggtataggtatcgtaggtatatatctttctcaccgacaaaagggggtactactccctaactttatcctatacattgcaaccggagtattgtcattattatccctagccgcactcattccgggagattatgttccgccgggtgctctaccgcttaccctggaagtgggtattctcattcccatgttaagcctttatatgcataagagaaggtttatcaactatttcttaaggcagataggcgcttgcaaaaaacgtttatatgcccaaggagccgaagccgccgtcgtatcggcacgtattgtcctgatcttcggtatacttcattttatcattatcagcattaccgttattctccagtctccgttgagcaagaccagcttgtttgtactttataagatactgcctcctacagtctttataatgagtatcttgttcaaccaggtcgccatccgtttctttaatcacctgatggctcacacagagtacgtgcctattgtcaataccaaaggagacgtgattggaaagactcccgcgatagaagccatcaattataagaacacctatatcaacccggtgatacgcatagctgtctccacacacggaatgctctttctttgtgacagaccgtccacagccattctggataaaaacaaagtggatgttccaatggaatgttatctccgatatggagaatccttggcagaaggtgtcaaccgtctgatcagcaatgcaattccccaagcaaaagatatcaagccggaattcaatatcgtctatcactttgaaaatgaagtgacaaaccgcctcatttatctattcatcatcgatttggaggacgattccgttctgtgtactccccgcttcaagaacagcaagttatggaatttcaaacagatcgaagagaatctgggtaaaggcttcttcagttgttgtttcgaagatgaatacgaacacctgaaaaacgttatttatataagagaaaaatacaaggaatcttagacagatcgggcacatgccccttccagtctttaaccgtacgtgtttggatatactcaccttcgcaagtaatattggcggcaatgcacaacttcgtttgcggacggcagttttgtagaatgtcttccaccattttgtgattccgataaggcgtctcgataaacagttgtgtctgattctcagcatacacgcgctgctccaataccttcagtttcttgccacgttctcccggctcaatcggcagataaccatgaaacgcgaaactctgaccgttaaagcccgaacccatcaccgaaagaataatggaagaaggtccgaccagaggcaccaccttcaactttttacgctgtgcaatagccaccacatccgctcccggatcagcaacagccggacaccccgcctctgagataactcccatagaagcaccacctatcagaggtttcaagtaaccggaaatatcttcgggcgaagtatgtttattcaacggataaaacgtcaacgcatcaatatcaatctccttatctacctttttcagaaaacgacgggccgaacggatatcttcgactataaaataccggataccggaaatgatttccttattataagaaggcaatactttctcaataggcgtatcacctaaagtcacgggcagcaaataaagggcagtttccacttttaaatgaagaattaagaattaatctatctcaagaagccagatagtcggattcactcagcattgtatgatagtcggtaaactctaaaagatctttcagcttcatatctttatgctttttcatatacgaagcaacaatcctcgcaccgacccatattcctatcaatgccggagcctggcaacccaacatctcaacagccggagccggtttcatataataacggaataccatcggatcacgggcatgaagatgatcgttggaacagatataatcccagatagccttttcattctccctgcaccagtcgttttcctctttcgaataccccatcgcctcgcctatattatcataatccagcaagttctgcacaacgtaattaatctttccggagtgtatcatcaagtcaataaggcacgttccctcatgataatccatatcataacggctcagaagataaaacgaaaaacaatccggcacaatacgttccggacgcatggagcgacactggtaatcgtaatagaaacgcttatacaaaggataatcttctcccatatacttatccagactgatacccaacagagaatctaccagaacgatagactcgttgaacgccgagatttgcgagtagacaagcggaacctccgtatcgggaacctccttcttcaacttccggaaccccttagtaagcccctcctctactgcatccaaattgggaaactgagtttccacatcattcatcagacgaaccagcgtcgtatctgaatagaatttttgcaggcgttgcgaaatcgtatcatctttcaccgtgccgatagccagtacatcctcaatcagtatctttgtcggcatacggtaatccatcgtcaacttctgcatagcagaaaagctgttggagcgaacatattcgctcaacagcttatcatatctcagaacagaaatctctccttctttctgctccgtaccttttcctgtgcttatcccacaggaggcgagaagcatacttattataataagaagagaaatccgtaatttcataatttattatccgtaaatgatattaccattttcgtccttgtactcatcaagccccttctcgtatgtagccatagcacggagactcatacctacgctggagaatccaccgtcatggaacaagttctgcatagtcaccttacgggtgagatcggaaaacatcacgatacaataatcggcacattcgtcagcagtcgcatttcccagcggagacatacggttggcaaagtcgaacagcttatccatacctttcactcccgaacctgcagtagtgaatgtaggcgactgagagatcgtattcacacgcacactatgttcgcgtccgtagatataaccgaaactgcgggcgatagattccaacagcgcttttgcatccgccatatcgttgtagccgtagaaagtacgctgtgcagcaacataactcaatgcaacgattgagccgtaatcggcaatagcgttcagtttcttggccgactgaatcattttgtggaatgaaacggccgaaatatccaatgtcttatccaacattccatagtcaaggtcatcgtaagtacgtttcttgcgtacgttgggagacataccgatagagtggagcacaaaatctatttgtccgcccagtatatccatcgaggtcttgaatacattcgacaaatcctccacactggtcgcatctgccggaacgatctggcaattcagtttttccgccaaagcattgacttctcccatacggatagccatcggagtatttgataatgtaatagttgcaccttcttctacagcacgttcagccactttccaggcaatagactgatcattcagcgcgccgaagataatacctctttttcctttcaacaagttgtaactcatatcttttaatagttaaattttgtgcaaagataggatatttctgcataaaaacacgagaagtgtgcaaataatagacacaaatgacaaaaaatacacgtattctatcaattagtccacattcccttgaactttcactcctatctttgcgatcgttaattacgagttcttacaatgctcgacagaatgccaagaaaaacaataaaatgtataaccctatagaaaattagattactaaatgaacacattgacaaaaagattcctctggatggctatatgttgtttgccgtttatttcaggatgcaaacaaagtgagtgtgccgtagaagagaacttgataagtgatgctctttaccggaatttacctttcgaaatgcctaaagtacaacaaccggcttttcctgcttatgaagtgaacattgaaaaattcggagccaaaggagacggtttgttcctaaacacgaaagcaatcaacgatgctatcaaagacgtaaaccaacatggagggggaaaagtgattatcccggaaggtatctggctgacaggacctatcgaactgctaagtaacgtcaatctttatacggaaagaaacgcgctggtactcttcaccggtgactttgaagcataccccattatcgccacttcttttgaagggttggaaacccgccgttgccaatctcctatctcagcccgcaatgcggaaaatatcgctatcacaggatacggtacattcgacggaaacggtgactgctggcggccggtcaaaaaaggaaagctgaccgcatcacagtggaaaaagctggtcaattcaggcggtgtgctcgacgagaaacaggaaatatggtatcctacacccggttcactgaaaggagcaatggcttgcaaagatttcaatgtgcccgaaggtatcaatacggatgaggagtggaatgaaatccgtccctggttacgtcctgtactattaagcattgtcaaaagcaaaaaaatactgctcgaaggggtcaccttcaagaattcaccgagctggtgtctgcatccgctgtcttgcgaagactttacagtgaacaacatcatggtcatcaatccctggtattcacagaatggtgatgcaatcgacctggaatcttgtaagaatgcactaattatcaacagtgtgtttgatgcgggagatgacgcaatctgtatcaagtccggcaaggatgaagacggtcgccgtcgcggagaaccttgtcagaatgtgattgtgaaaaacaacactgtattgcacggacacggcggattcgtggtaggtagcgaaatgtccggtggcgtgaagaatatctatgtggaagattgtacttttatgggaactgacgtaggcctgcgcttcaaaagtacacgtggacgtggcggtgtggtagaaaacatctacattaataacatcaacatgatcaatataccgaacgaaccgctgctcttcgacctgttttacggtggaaagggagctggtgaagaatcggaagaagatctattgaaccgcatgaaaaccgctattcccccggttacagaagaaactcccgcattccgcaacatccacatttcaaatattgtgtgcagaggttcgggaagggctatgttcttcaacggattacccgaaatgccgatcagcaatgtcactgttaaggatgtcgtgatgacagaagcaacagacggaattgtcatcagccaggtagacggggtgaccttggaaaatgtatatgtagaatcttccaaaggcaacaatatattaaacgttaagaacgccaagaacctgacgatagacggaaaggtttatgaggaatcagcgaaagaggagaagttcaccacagagaacgcagaggacacagaggtacaaatctgaataaatggattttatattattaaaccgaatcctctgtgacctcagtgtcctctgtggtgcaagtgcaaaaaaagaaaaccacaatatcattatatagagtaaaaagctcaaatagcagactattttatcttccaaagatagacagtctgctatttttttcaactacttttgcagagagaaatacgacgtataacatcaaccttagaatcatgaagaagaatcttattatacttgctttccttttaggaggtttccacttgtcttcccaagcgcagaaacaggaaaaaaacattacgatagaagtgcataacaattggaatcaggcaaaaacagacgccccgattgttatcaacctgcatgagttacacgcagatttcaaaatcaaatccgccgttgtcatggaagggacgaacgaggttccttcccaactagacgacttggacaaagaccgcaagatggacgaactggctttcgtcgccgaccttcccgctcatggcagaaaaacattccaggtcactctttcttcggagaaaagcacgaagacctatccggaaagggtatatgccgatatgtttatcgcagaccaccggaaagggaaacatcagcgggtgcaggcaattaccgttcccggtagcagtaatatatacagtatggtacgccctcatggtccgatattggaatcggaactggtaggataccgcctttatttcaatgagaaacagacaccggatatttatggcaagttcaacaaagggctggaaatcaaagaatcgcagttctatccaacggacgcacaattagctaaaggattcggtgatgacgtacttcgcgtgttcgacagttgcggaccgggtgcattgaaaggctggaacggacagaaagcaacgcatatcactctggtggagacacggacggagcgtatcatatcctacggtccggtacgtgcaattgcagaaatagaagtaaccggatggaaatatcaggatacggaactgaatatgatgacacgctacacgctctatgcaggacatcgcgatcttcatattgaagcattctttgacgaaccgcttaataaggaggttttctgcacaggtgtacaagacattgtaggtacttccaaatctttctccgatcataaaggacttgtaggaagctggggaacggactggcctgtaaacgacactgtgaaatatgctaaagaaaccgtaggactgggcacttgcattcctccacgttatgtgaaatcggaagaaaaggataaagctaacttcctttatacgattaccgctccgggaaataaatatttccag

SEQ ID NO: 11797 - DNA, 2471 bp, Unknown
  gut microbiota DNA sequence
atgatgacctgttgattgtcgatcatttctattaccaggttgaaaatcatggtacgggaaatacttatatcttcattgtggattatcggaatctgaaggaatataatccgaaaaatgcaccggcgacagggatgatgtatgccgatcctcagaatccgaagcagacgattatacgtgtcttttcgggtactgccaagctgggagagcaaggagctgaaagggtgacgctgtatcgggatgacaggaatctgtatattaacggggtacgtttcccgatgcgtcggctgcaaagaggagagcaacagcaactctggctggggaatgtaacacttaccgaccgtgattatgagcaggagttggaaacggtgaatgctgccgtcgaaaaactgtttagagaattgcagggaaatatgtttatatccgaagaggataaaacagaggtggggaagtatgtggctctggtgcgtaaggagatagcttgggcacgtgtggatgtacgtaaattgcggtacggcgatgaatcctaaatatgacgcttccttttatatccgggtgctggatcaatatgtggcaaccggtgagtgcagtgatacggatgatgaacctttgtatgcgtatttgttgtctatcatgaatgatccgatgataaagatacaagtgctgactgatgaagtgtgtgcccgtattttttatgacatgatgagccagttcattcatttgaatctggaaaaggaaaagtataacctgcaaaaaagccaatcggagcagaatggaatgaagcaaacgctggaatggtcgatagccaggcggaaagacggatggcaggctttgcttcagcaagtatcggataaatacgagacaatgggttttggtagttccttttataaaagccagttcgggaatgaggaggaaaagtatggcgatgatgaactttgggaacggatggtggaagattgggaggaggctttcaaacgtaatctgcaggaacagaaaaagaaggagatagaccggaggaaagagagtctggaaaataggttgcacgccaatctcaagaatattcctgaatatcttagacggcatgaggtggaaaaagatgaattctttcaggcatggggactgatgagcgggatgtggaatacggttgactttgagcggatccgtaaagtggtgcgtatgcagaaggaatatccggagatcattaaaatagcaaacttgatggggcgtactgccgatgatgagggaagggaacgactgcacgtgggacaagaggatgtgtatcggttggaacattcctctaaaaatgatattcaaggagttactgtcggtaatgacttgaatgctttattgcctacggagatggtgcattgtgctgatgatgatttggagagtttgtttatttataaatatgtcacccgaaagctccagacgttccgctataagtccgagattatgcagcctgcccgttcgttggaaaccaaaccggctgttcataaagggccgatgattgtttgtctggatacttccggaagcatggtaggcattccggagaaaatagcttattctttgttggtgaaactattggaaatagccgacaggcaacgccgtccttgtttcctgatcgctttttctgtttcgatatgtccgattgatgtccgcaaggaacgggcccgtttgcttgatttcttttctaccacctcttgcggggacacggatgccacccggatgctgaaagctactttcgacttacttcaatcgaagaaagagtatatgaatgcggatgttttatggattactgattttaaaataccgcttccctcaccgaagttgactgaccggatattggaatatagaaaggcggatacacatttttatggcttgcagcttggcattgctgagaatgaatggattcctttcttcgatcgagtttacagagccgattatccggttgcccgttgttattaattttttgccttaaatacgggttgtatcttctgaatctccgattcgaatccaaaccaatagccatgttctgcttcatcagtggggaggaaatatagccgtaaattctcacgataagttccgtatactatttcccatttctcgggtgggacttggcgtttggtccttactttttccgccggagctttctttaatgacataccggcctctatccatgcgatactgacttgcgtcagataaccgggataatgctttttacagaaatcatataagattaatcctcttctttccaaacttagaggggtgtctatgacgtctgtccgaaccaaatgatcaagtagctcatgtaggaaatgaggattctccagaattaatgtccgtgtgatcgtccgccaggtgggagtattatagaatccatccaaaagacgggacagatagtgggctgtttgtaattcttctactgagatttcacgggtttgcaatacttcgtatgggggaagcggagaatattg

SEQ ID NO: 11798 - DNA, 653 bp, Unknown
  gut microbiota DNA sequence
gacatcacccatatacggcagcagggagagccgagagagaagtgtttggtattcgagggttttatggactatctttctttcctcacgctccggatgaagaactgcccgaccatgcccgaccttgacaggcaggattatgtcatactcaactctactgtcaatgtgccgaaagctattgacgtgctgtacccgtatgaacgcatccactgtatgcttgacaatgacaaggcaggatatgaagcgacacgggctatcgaattggaatactcctaccgtgtgcgtgacttctcgggcaattacagggggtattcggacttgaacgattacctgtgcggcaggaagcaggaacagaagaacagcaccagccaagcgcaggagataaagcaggaaaccggacaacgtgccgccccaagacagaaaaggggcaggggcatttagtccggcaggattaccagcgacaggcggtttaatttggagagcaaggttatgtttcggtaaaccgaaactaccttgctttgcttgacagcaaagaaaatttctcccgttggtcgcaatttttaagataccatttaaatgtaaaaacctatgacgaatataaaggataagccggggggacgtccggcaaagaaacggatagagaagcagcaacgggt

SEQ ID NO: 11799 - DNA, 35111 bp, Unknown
  gut microbiota DNA sequence
gtacaccgaccgggttggaggactggtttgccgacaaagttatttctgacgataaaatagtagagttccattgggggaagacagagctgaggaaagcagagattattgccattcgctctttctcttttatccgcttccgttggcaggatgatgaaaacgagcgtgattactttgaaatcaagatgacatataatgagttgacaagtgactatgtattagaaattactgatttcgcagagtcggatgaagtggatgatatgaaagaattatgggagtcacaggttgccaaattaagaagaacttgtggtttttagttaactttcaactaaaaattttcggtgctcctttttttgtgctaattttgcatcctaattgcacgaacctattaagatgctacgcataaagaaattagatatattcattgtaaagagcttttttatgctctttataggtacattcttcatctgtctgttcattttcatgatgcagttcttgtggagatatgtagacgaattggttggaaaggggttagaaatgagtgtaatggctcagttcttcttctattctgcattaacattagtgccagtatcgttgccgttggcagtgttactggcttctttgattacttttggtaattttggcgagcgttacgaattgcttgcaatgaaagctgccggcatttctttgctcaaaattatgcgtccccttgttttctttgtttgtggacttgtaggcgtttcattctattttcaaaatgtagtaggacccattgcccaagctaagttgggcactctgattctttcaatgaaacagaaatctccggaattggatattccggaaggcgttttctattccgaaatccctgattataatttaaagatagccaagaaagaccgtaaaacgggtatgctgtatgatgtcttgatctataatttgaaagacggatttgagaatgcccatattatttatgcggattccgggcgtctggagatgacagcggataagcaacatctttggttacatttgtatagtggagacttgtttgagaatctgaaagcgcaaagtatgaagtctcaaaatgtaccttatcgtcgtgaatcattcagagagaaacatacgattattgagtttaactctgatttcaatatggttgacggcgatattatgggtaagcagtcgagtgctaaagacatggcgcagttgcaaagctctattgattcgatgaaagtagtaggtgacagtataggaaggcaatattaccgggaaatagctgagggaaattttcgcgcgtcttatggattgacaaaagaagacactgtcaagatggagaaagcggatgtgtatgcgtataatgtggacagtctttataatgttgctcctttgacgcaaaagcagaaagttatttccgctgctcttagccgtgcggaaaatatggcaagcgaccttactttcaagagttatacgatggagagtaatgactatagcattcggaaacataagacggaatggcataagaagattacaatttccctctcatgcttgttgtttttctttatcggtgctcctttaggaggtattattcgtaaaggtggtttgggaatgccggtaattgtgtcggtactggtgtttattatctattatatcattgataacaccggctataaaatggcccgtgacggtaagtggattgtatggatgggtatgtggacgagtagtgctgtccttgctccgttgggtatcttccttacttacaaatcgaataaagattctgtggtgcttaatgccgatgcgtacattaactggtttaagaaggtggccggaatacgtagtgtacggcatatattcaagaaagaagttattataaatgatcctgactatgaacgtatcccgggcgatttggagcagcttacagaggattgtaaagcttacattgctcaaaatcagttgacgaaagcaccgaactatttcaaactgtggatgtcgggtgaaaaggacgatgaggtggtggctatcaatgataaactggaagcgttggtggaggaaatgtcaaatacgaaatcagcttctttgataggtttgttaaacaattatccgatgattcccgtttctgctcatgtgcgcccgttccatatatattggctgaatctggcagctggagtgattttccccatcgggctgtttttctatttccgtatctgggcattccgtattcgtctggctaaggatatggaacggattataaagaacaacgaacaagttcaattcatcatacagaaaattaataaataattgttatggaagagattaaaatggataaaatagaggatgcaattgccgattttaaagaaggcaagtttgtcatagtggtggatgatgaagaccgcgaaaatgagggagatttgattattgctgctgaaaaaataactcctgagaaagttaatttcatgttgaaacacgcacgtggggtgctttgtgcacctattacagtgtctcgttgcaaggaattggatttgccgcatcaagtaagtgataacacttctgtgttgggaactccttttacaattacgatagataaactggacggttgttcgaccggagtctctgctgccgaccgtgctgccactattcaggcattggctgatccgtcttctacaccggctacgttcggtcgtcccggtcatatcaacccgttgtacgcacaagaaaaaggagtgttacgccgtgccggacatacagaggcgactatcgatatggcacgtctggccggtctttatccggcgggtgctttgatggaaatcatgagtgaggatggcacgatggcacgcttgcccgaactccgtaaaatggctgatgaatatgatctgaaactgatttctattcatgacttgattgcttatcgtttgaaacaggaatccattgtagagcgtggggtggaagtgaatatgcctactgaacatggaatgtttcgtctgattcctttccgtcaaaagtcaaatggattggagcatgtcgctttgtttaaaggtacgtggaatgaagacgaacctattttggtacgtgtacattcttcttgtgccaccggtgatatttttggttccaggcgttgtgattgcggagaacagttgcataaggctatggaaatgattgaagcggcaggaaaaggtgtagtcgtttatctgaatcaggaaggacgtggaatcggcttgatggaaaagatgaaagcatataaacttcaggaagacggcttggatacggtagatgcgaatgtatgtttgggacatcttgctgacgagcgtgattatggggtaggagcgcagattcttcgtgagttgggagtacacaaaatgaagcttttgacaaataatccggtgaaacgtgttggcttggaagcatatggcttggagattgtagaaaatgtacctgttgaaactgttcccaatccatataatgaacgatatctaagaacgaaaaaggaaagaatggggcatactttacattttaataagtaaattgcctatttgttttcatatgtcgaatattatcgcttattttgcaacgattttcactcaacaacaataaaatagatacaaaatgaatcaattatcagatcgtttgaacagcttgtcgccgtcggcgacacttgctatgtcgcagaagagcaacgagctcaaggcacaaggcgttgatgttattaatttaagtgtaggagaaccagacttcaatactcccgaccacatcaaagaagctgcgaaaaaagccatagatgataacttttcccgttattctccggtaccgggttatccggctttgcgcaatgctattgttgagaagctgaaaaaagaaaatggtcttgaatatacagccgctcaagtttcttgtgcaaatggtgcgaaacaatctgtttgtaatacaattcttgtattagtaaatccgggtgatgaagtaattgtgcctgctccttactgggtgagctatccggaaatggtgaaaatggcggaaggtactcctgttatcgtttcggcaggtatcgaacaagatttcaagattactccagaacaattggaagctgctatcactccgaaaacaaaagcattgattctttgttctccgtccaatccgacaggttctgtatatagcaaggaagaattggccggtttggcagctgtattggctaaacatccgcaagtcattgttattgctgacgaaatctacgaacatattaattatatcggtgcacatcagagtattgcccagttcccggaaatgaaggaacgtacggtgattgtaaacggtgtgtctaaggcatatgctatgaccggatggagaatcggatttattgccggaccggaatggattgtaaaggcctgcaataaattgcaaggtcagtacacttcaggtccttgctctgtttctcaaaaagctgccgaagctgcatatacaggaacacaagaaccggtgaaagaaatgcagaaagcattcgagcgtcgccgtgatttgattgtgaagttggcgaaagatgttccgggatttgaagtgaatgttccgcaaggcgctttctacttgttcccgaaatgtagctatttctttggaaagagcaaagaggaccgtaagattgaaaactcggatgatttggcaatgtatctgcttgaagaagcgcacgtggcttgtgtaggcggtacttcattcggcgctcccgaatgtatccgcatgagttatgcaacaagtgatgaaaatataacggaggctatccgccgaatcaaggaagcgttggctaaattgaaataagagtccaccacagaggacgcagaggacacagagaagaaaaaatgaaaggaatgatgtgtcgcctccttataaattagaaatcccccttgccacaaatgatttgtagcaagggggattccactaaaaggagagttgcaacacatctcccaagctattttactctgtgtcctctgcgtcctctgtggtgaaaaaaaaggctgccttcaagagaaagcagcctatactttttgttgtagattgtattattcagctgggtggatagcttcagacgggcaaacatctgcacaagttccacagtcagtacatacatccgggttgatagaatagatatcaccttcagagatagcttctaccggacactcgtcaatacaagttccgcaagcaatacaatcgtcactaattacgtaagccatttttctaagatttaaattattagtactaattttattccgcaaaagtaaagcttttattgattagttgttatgcttctatgattaaattgacttaatttgtacgtcttctaaataagcaacctccctataatctgctatatttttcgtatttttgcactcaaattactaatatatagcgattatgcctttaaatttacccgataaactacctgcgatagagctattgaaggaagaaaatatttttgtaattgatacttcccgtgctacgcagcaggacattcgtccgctacggattgtcattctgaacctgatgccgttgaagattacgacggagacggacttggtgcgtttactttcaaatactccgcttcaggtggagatctcgtttatgaagatcaaatgtcatacctccaagaatacaccgatagaacacatgaaggcattctatacggatttcgaccagatgcgtcatgagaagtatgatggtatgattattacgggagcacctgtggaacagatggatttcgaggaagtgacttattggaatgagattacggaaatttttgattgggcacgtacgcatgtgacttctactttgtatatatgttgggcggcgcaagccgggctctatcatcattatgggattcctaaatatccgttggaaaagaagatgttcggtatcttcgagcatcgggtattggaaccttaccattctatttttcgtggctttgatgattgcttttatgtaccgcacagccgtcatacggaggtacgtagggaggatatcttgaaggtgccggaactgacattgctttccgagtcgaaagatgcgggagtgtatatggtaatggcacgtggcggacgtgagttctttgtaaccggacattcggaatattctccgttgacattggatacggaatatcgtcgtgacttgggtaaaggcttgccgatagaaatacctcgtaattattatgtagatgatgatcctgataagggaccgttggtgcgttggcgtgctcatgcaaaccttttgttctccaattggttaaactactttgtttatcaggaaacaccttataatgttaatgacatcaaatgataaagcagcgtaaaatagaacttctcgctccggcgaagaacctggaatgtggcattgaggccattaatcacggtgcggatgcggtatatatcggtgctcccaagttcggtgcccgtgcggcggctgtaaattctttggaggatattgaggcactggtacaatatgcccatttgtataatacgcgtatttatgtcacggtcaacactatcctgaaagaagaagagctgaaagagacggaggagatgattcatgccctgtatcggattggagtggacgcactgattgttcaggatatgggaatcacgaaactgaatctccccccgatacctctccatgccagtacgcagatggacaaccgtactccggaaaaggtgcgatttctttgggaggcaggtttccgacaagtcgttttggcgcgcgaattatcattgcgtgaaataaaaaatattcataccgcttgtccggagactcctttggaggtatttgtacacggagcgctttgcgttagctatagcgggcaatgctatgtcagtcagtcctgtttcgggcgtagcgcaaacaggggtgaatgtgcacaattctgtcgtttaccttttagccttgtagattccgatgggaaagtcattgtgaaggacaagcatttgctttctctgaaagatatgaatcagagcgacgagctggagcagttgttggatgccggagcttcttcgttgaagatagaaggccggttgaaagatgtatcatacgtgaagaacgtgacagcggcctatcgtcagaaattggatgcgatttttgcccgtcgtccggaatatgtccgggcttcttcgggaatgtgcagattcgaatttaaaccgcaactggataagagtttcagtcgtggttttacacattatttcctgcacggtcgtgataaggagattttttcctttgatacccctaagtcgctgggtgaagagatgggaacaatgaaggaggctcgcggtaattatctgacagttgccggattgaagtcatttaacaatggcgatggagtttgctatctcgacgaacaaggacgtttgcaggggttccgtatcaatcgtgtagatggtaataaactgtatccacaggaaatgccccgtatcaagccccgtactgtgttgtaccgtaattttgaccaagagtttgagcgtgtactttcacggaagtccgctgaaaggaagatagaagtgcgcatctcgcttactgataacgaatttggcttttcgttacgattgaccgatgaagatgataacagtgtcacactggcttttccccgtgaaaaggaattggcacgtacaccgcagacggaaaatctgaaaacgcaacttgctaaattaggaaatacacctttcgaagcaaaagtgatagaagttggatttgctgataattggtttctcccggtttcggtcctagccgattaccgtcgtcaggcagttgaaaaattaatagctgcccgtcggataaactaccgccaggaattgtcagtatggaaacaaacgaatcatgcttttccgcaaacaacattgacgtatttgggaaatgttatgaacactcatgcagtttctttctatgaggaacatggagtacagcgtattgctatggcgtacgaaaaagaagcagtggagaatgcggtactgatgttctgcaaacactgtctacgttacagtatgggatggtgtcctattcaccaacgggttcgttcacctttcaaagaaccctattatctgatgtccaatgatggtaaacgtttccgtttggagttcgactgcaaaaattgtcaaatgaaagtaaaggcggcgcaatgaagactattttctatcacagaggacgcggaggacacagaggatatagtgaaggtagcatcttcactcatgcttctgacaccgatcgtttgaatgttaggcagaaaaagtgtggaaattttttctctttcctctttttatcctctgcgtcctctgtggtaaaaaatgtgatgaacctgctattatgtttatttttgctatcttcctgttattataaggctccgctactggattcggaggaattgtcagagaaaacaaaagattcattgacctatctttatgaacgtcactacacgtgggatacgaatctggaagtagtggatgattccatagctctggaacgtcttccgataaaggacacttttattcaattgaataaaggagataaggtagtcgtcgcagagtttgcgattcatccggccgatagtgtggatagcgtttgggttaaattggcgcatacgcaggatgaacagggttggatacgtgaggtggatttgaagaggtcgttcgttccgaccgacagtatttcacaggccattcatcttttcagtgacacgcacgcttcttattttgttgttatttttgccctgtttgtaggcgtttatttgcttcgtgctttccggaagaagcagttgcagatggtttattttaatgatatagacagcatttatccattatttctctgcctgctgatggcgttcagtgcaacgatttatgagtctatgcaggtctttgtgccggaaacgtgggaacatttttatttcaatccaactttatctccattcacagtacctttcatactctctgttttcctgtttagtatctggttgtttctgatagtcgctttggcggtgctggatgatttgtttcggcaattgactcccgctgcagctatcttttatctgctgggactaatgtcctgctgtattttctgttatttcttttttatcttgatgacacatatctatatcggttatttattcctgatcttttttatactggtctttacgaagaaggtttatcggaacatcgggtataagtatcgctgcggacattgcggggagaaactgaaagagaaaggtatatgtccttattgcggggcaattaacgagtgatgattggcggttatcattaagcagtaggtaaactaatgtcaaagcattgataaagttccgttaaagtgctggtatagttgcgggaaggtaccgatacctttacctttccacggccgtggtgacttcttcccacagccgtgatgagatctctccacggccatgaagagaagctaccacggctgtggagagttaagaatagcgtaagtctaatggaacaataccgattgggtaaataaagtataacggctttataatgcaaactttatagggacatacgtccttttatcccgtattccatgctgttgatctacaaagagacaggctgacaataaaagtccggaacttttattgtcagcctgtttttagttattgtcagcgtttattgtcagttgttaatctgttgaaaaccattgttttgtgtggatgaaatctttagctgacaataaaaagactaaataatatccttatgagtaaaaatgattagaagcggcagcgaagatctatcccaaattgcattggacgtcctttctgcatgaaacctttgttcattgtttcgaaatagaaggcggcatagtctttattcaagaagttgcgtgcccaaaaactaatcattgcatcaccgatttccagattcgttctccagttgagcgtgccgtagaaggattggctgacgtcgttcagttcagtccagtagatacgtccggcagcgttatagttcgcctggaatacaacccggtcgaagatagaacgtgggctgcaggtgatggcatattctccaccgatatttaatgtatgcttggggacaaaaggaacatacttgccattgtaatcggctctaactttgagcgtttcttcatcttctctctcatattcgatatagtctgtaaaggtagcgtaggtatatccgtagcttgcgttcagacttaattcattagtcagacttgcacgaagagacatttcggcaccatagctgcggcttttccctgcattgacggtggtacgtcccaagccgcttccggtgaattgggaaatttgttggtcgcgcatatccatatagaaagcggaaagatctgcccaaagcttaccctcccaaagggtaagatggcttcctacttcgtagttccatgaatattcgggtttgtagcgtgtcgcctcttttacttcgggtacatccgctttcttggcatatttgtcaatcattgcagcaaatctggcgaactgctcgctctcttttatagcatttatcatggagttctgtaaatctccactaataagatcggagaacatttgtacgttgtagccacccgaccgataccccttcgacacggttgcgtatacattattgccctttttccattcatattgcagagcaaacttaggtaacagttggacataatcatctgatattttaccgtcataaccggcattggcaatcaggttcttggcttctactgatacagatggcattggtggccgtgacgccatcttcatactgaagttgaagtctgtagggtcactgatcgatttatacttcatgttcatcttctcataatccagacgtactccgacagtaagagacaagcctttcacaaaaaggtcattcaatgtagactgatggaaaacagctgcattccaaacaggagtatcaaagtctcctcctaccaacagagtaggattgttgattgctaaatgtaatttcggggcgtttgcaggcataccggcaaaggctgtatttgcacttccttcgataacatctttcaccccgtcttcccaaaaagtcaccggacctttggtgttcaaggactgatacagtccgaaagctcctgttgcccattgccatcttttgttggattttgatttaaacacgatctcttcggaaattgtattcgacttttgcttctgttccagtgtataaaccgctcgttctgtaaagtcttggtcgaggaacatacggtcattcagattctgatagccggtaactgcactgaggatgaaatttcttgcttgatattccagattgacgccggcattcattaatccccgacgataactgctgcgctcgttatatgaaatcttaccaatgtagtctgcacggtcttctgtgagaggttcttccctttcttttgtgctgggagcgattccggtatagtaataggggtatccaccctgatcgctatattcatagttcaggtttatatctactttcagattggaggtcggtatgtaaactccacgaaatcgtccacctccggcattgcttcggtcaaccttctcattatttcgtgctgcgttttcaaagaatcctccggtatgttcgtaaaatcctccggtagaaaaggcgaaccgttcggatatacggtgataatgggtaagcgaaacattataattattgtacgtcgccgctcccatgcggatgtcggtcccttgataggtgaaaggagatttggtgtgtaccttgataagtccgcccatcgtgttacgcccgtaaagtgttccttgaggcccgcgaagtacgtcgatacgttcgatgtcacagtaattgaaatcgaaggcggatttgtctatataagggatattatctacataaagtcctacggacggtgtgttgatacgtgaaccgattccacgaatatagatggaagtcgttaatttcgagccataatcagggatgaacaggttgggaacaatacctgtaaggttcttcacggaatgaacctgattggcacacatattttcctgtgataatacggtggcggctataggcaattcacgtagtttgcgattctctttcggagtggctattactaccacctcttccatatccactactttcagtgaatcttttgggaaatcttcgccccatacagttcctgtcgtcaggagggtgagggcaagcatcataatctttgtcttcattcgcagtttatttgtccggtgcaaagtaacggcaaatatagttggcaggcaatcctcatttattaggatttgattcaccacagaggacactgaggacacagaggtataataggattctaaaaattctgtatcctctgtggtgaattagatgcggtcggcttcgatatatccgttcattacagcataaatagtcagtcctgaaacggacttgattcctaatttctccgtaatgttctttcggtgtgtaatgacggtagttaggctgatattcagtttgtctgcaatttctttattgatcagtcctttggtaatcagtacgagtacttcgatttcgcgggcagataaaagttcctgatgatgcgctggcggaatcattggcggcatatcctttaccgggtatcctttgtgatgggcatgttgatggagtttcaggatatttttcaccagctcctcttccggctcataaatattgagaaccggtacaccggaaagttgaaactgcggactgtcactggccagaacaattgtttttcgttttcggggaagaaagaaagcattgtgttccacatagatttgtgccgatatgaaataatgggcatacatatccggtgtgtcatccattaattcattgaaacggtggaaagtacgaatggtagccatcgggatgatttcttccaatatggatttgagtcctaaactactgagtgtattgggttcaatgattgctatttcgggttgggtagtcatcagtttgctgggttttgattaatgatgtaaataattagcagcggcttccgcacaccgttctccgtctattccggcagaaacaatacctccggcataacccgctccttctccgcaaggaaatagaccgcggacggttatatgctgtaatgtttccttgtcgcgtacaatgcgtacaggcgaagaagtccgtgtctcgacaccaatcattaccgcttcattagtcagaaatccgtgactgctacgtccgaattgctggaaaccgagagataaccttttactgatgaatggcggcaaccaaaaatgaagcggagaagaaataattcccggactataagaagattcgggtaaatcgtagctcaatttcttacgggtaaaatccatcatacgttgtgccggagcagtctgtcgtcttcctccttgcaaccagcattgacgttccagctcctcttgaaagtgaagggggagaagttgagagttgagagttgaaagttgagaatgattgagagatggattgatagcgagcagccgctcattctgttgcgcagccaactctccactctcaattctcaactctccacttcttaaatcttccggttgaatttccaccaccattccagagttgctccaacgtgagccacgattggatggagacatgccgtttactaccacctgttccggtccgctggcggcaggaacgatgaagccaccgggacacatacagaagctgtatactcctctgccttctacctgtgtcacaaaactgtattcggcggcaggcaggtatttgccccgtccgtttttattatgatattgtatttggtcaatcaacattgcaggatgttccaggcggacaccgacagcaatccctttcgcttcaactgtcacattattggcggccagccaacgatacacatctcttgccgaatgtccggttgccaagatgaccggtccgagaaacgtttttcctgtattcgtctcgatacctttcacttcattgttgtcgataatcagtgcatccattcgagtttgaaaatgcacctctccaccacattcgatgatgctattccgcatattttcaatgacgcgtggcaacttgtctgttccaatatgcggatgcgcatctactaatatcgaggtcgaagctccatgttggcaaaatacattcagaatcttatctacatttcctctttttttgctccgggtatagagctttccatccgaataagctcctgcacccccttcgccaaaactgtaattcgattccgggtcaaccgtgtgttctctgctgatttgtgccagatcttttttacgctcacgcacatcttttccgcgttcgataacgataggacgtaatccgagttctatgaggcgtaaggctgcaaacagtccgccgggaccggcaccgacaaccaccacttgcggttttccctctacactattatatatagtatgttcgtactcatcttcttgaggcatctcattgatgtatgccctcaccttcaaattgacgaagattgtccgttggcgtgcatcaatactccgcttcaagattcgggtagcagtgatgtcacgcagattcaaacctttttctttagaaaggtattcctttaatttctgtccgtttacagcaatttcggggaggatgcggagttggtattcttgtatcatattttttcaccacagaggacacagaggtcacagagtttaaatttttagataataaaacgtttgattccttgttttaaatgaggaacattgaaatttattaatagtccatattttagatggccaagtttcatatatgtcaatagttgggcagaatgtaccggttgtagcatttccacacttttcaattctataatgagttggttgtctatcaacaaatctattctgtaatctgtatctaattgggttcctttatagattataggtaatttcttttgtctttctacatctatatcgtttgctctcaattcatagaataagcagctttcgtatgtactttcaagtaaacccgctcccaattgagtatgcacctcaaaagctaatcccagcactttactcgttaaattattaatatcttctatcattatttatttacttgattaatcactcctccgtgtcctctgcgtcctctgtggtgaacctaaccgaataaagccctgaacgcctcttccactttcctcaccggtactagttctatcttcagtttttgggtgtcgattccttgcaagttatatttaggcagtaagaaacgtttgaaacctaacttttcagcttcaccgatacgttgttcaattcgattcacaggacgtatctctcccgacagaccgatttctcccgccatgcaaacttccggttcgatagccgcatccatattcgaagaaaggatggcgctgataacagacaaatcaatggccggatcattaactttcaatcctccggcgatattcaggaatacatctttctgagccaacttaaatcctacgcgcttttcgagaacagccagcagcatattcattcttcttaaatcgaaaccggttgccgagcgttgcggatttccatagacagcagaactcaccaaagcctgcgtctcaatcaagaacgggcgaattccctcaatggcggaagcaatggctaccccgctcatcccctcatgatcctgacttagcaaaagctcggaaggattgctgacttggcgcaacccatcctgacgcatctcataaatacctaactctgccgtactaccgaaacgattcttgatactgcgtagaatacggtacatataatgttggtcaccttcaaattgaagaactgtatctacgatgtgctccagcactttaggtcctgcaatgcttccttccttattaatatgcccgatcagcaacacaggtgtatgcgtttctttcgcaaaacgaagaatagacgccgaacactctctgacctgtgcgatacttccgggagacgattcgatactctcggtagaaatagtctgtatggagtcgatgatcaccagatcgggattcgtattcttgatatgtacataaatctgctcgagggaagtctcgcaaacaatgagacagtcactggaaatagaagagagacggtcggcacggagctttagttgacgtgcactctcttcgcccgagacataaagaatcttcttttccggcatgtgcaatacagtctgcatgacgagcgtagatttgccgattcccggttcaccgcctatcaggaccagagaacccggtaccagtcccccgcccaatacacgattcaattcgtcatcgtgcatattgatacgcggttcgtcatccgccactatatcggcaagcgcaagcggtttgggcttttgcgtttcaatccccgacacaggacggcggttgaccggctcttttctcacaatttcttctacatacgtattccactccccacaggacggacatttacctacccacttcggtgaatcctgtccgcaattactgcatacatatacggttttctcttttgccatcgaacttcctttcttcgttgtagggtacaaaaatagggataatttattagaaataagttatccctgcctaatagaaatagatgtatgcctatatagttatctctccggctatcgaacggttcatccggtcacgcacttcatccggggtatatccgtgtcctaataagaacattaatttggtgacggcggactccatcgtgctgtcgtaaccggagacaacacctgcctgcaatagttgatatcccgtttcatagcgttccatctccaccattcccgcactgcattgtgtcacattgacgattacaatcccttgtgcgctggcctggcaaagtcttcggataaaccactctttacggggagcattgccggaaccgtatgtttcgagtacaatcgctttcagcccttcgattcctagaacagtagcaattacattttcctgaattcccgggaatagtttcagtacagccacgttcgtatccagcagatagtgtggtttcaacttatgttcctctccattcgcatggatctgtacattattatatttgatatgaatgcccgcctccgccagtaccggataattgaatgaccggaacgcgttgaaattctccgcattgattttcgttgtgcggttacctcgcatcaagtggttttcaaagaagatgcagacttccggtacgagcgcctttccctccttgttccgtgcgatggcaatctcgatacttgtcatcagattctctttcccatccgtgcgaagtacccctatcggaagttgagaacccgtcagtatgacaggcttgtccaacccttccagcataaaactgagtgcggaagcggtatatgccatcgtatccgtgccgtgcaagattacaaacccttgatagcgttcatagttgtcatgaataacatgaaccagcttttgccacatatccggttccatatccgaagaatccatcggcggatcaaactgataggtgtctatcggaaagttgaatttctgcaattcggggatgtgcttttggagttgttcaaaattgaaattctccaatgcacctgttgcggcgttctcaatcattccaattgttccaccggtgtatattagcaatacggaagtatttatagggctcataagctgattttgcgtatttgtattcgcaaatatactaatataaatgatatatttatagcaaaatgatataaaagtgaatctctgctgcaataagggattactatgaaatattctttttatcagaaaaaaaccgaaaaaagtgatagattgaatgtttttattattacttttgcgacacttatcaaaaacaagagtagaaacaaggactatgatgaagtactatccacatacagtcacatccatgtgtaccatgacccttaggggttgatggatagtttttgtgtatctacgtgattcacgcctgtataagcaggcaaaattcaaattcaattttattcgtaaataaccaatcgttctgttataacatatacgcacaggacattgcatttaaataagtatcttcatgaaagtaatgaaattcggcggaacatccgtaggttccgtgaacagcattttaagcgtaaagagaattgtagagtcggctgctgagccggtaattgtagttgtttccgcattgggaggcatcacggacaaattgataaacacgtcgaagatggcggcaatgggagattcggcatacgaaggcgagttccgtgaaatcgtttatcgtcatgtggaaatgattaaagaagtgattcctgccggtgaaaagcagacatcattgcaacgtcagatcggagaactgctgaatgagttgaaagacatctttcaaggaatctatctgattaaagacctttctccgaagacatcggataccattgtaagttatggagaacgtctttcctctatcatagttaccgaactgattgagggggcgcaatggttcgattcgcgcacttttatcaagactgaaaagaaacataataaacatattctggatgcggaactgactaatgaactggtgaaaaaggctttcagctcagtgccgaaggttgcattggtgcccggatttatctcttctgataagacgacaggagatgtgacaaacttgggacgtggcggttcggactatacggctgccattatcgctgctgcgctggatgcgaatagtctggaaatctggacggatgtagacggtttcatgacggctgatccgcgtgtcatttcaactgcttacacaattaccgaactgagctatgtagaagcaacagaactttgtaacttcggtgcgaaagtagtttatccgcctacgatttatccggtatgccataagaatatacctattataataaagaatacgtttaatcccgatggcgtgggaacggttatcaaacaagaggtttccaatccgcaaagcaaagccattaagggtatttcctctatcaatgatacgagcctcattactgttcaaggacttggtatggtaggggtgatcggtgttaactaccgtatctttaaggcattagcaaagaacggaatcagcgtgttccttgtatcgcaggcttcttccgagaacagtacttctatcggtgtgcgtaatgccgatgcggacttggcttgcgaagtgctgaatgaggagtttgcaaaagagatcgagatgggagagatttccccgattcttgcagaaagagacttggctacggtggctatcgtaggtgaaaacatgaaacatacaccgggtatcgccggcaagctgttcggcacattgggacgtaacggtatcaatgtaatagcttgtgcacagggtgcttcggaaacaaatatctcttttgtggtggatgcaaaatctttgcgtaagtctctcaacgttattcacgactctttcttcttgtccgaataccaggtactgaatctctttatctgcggtatcggtacggtaggcggcagtctggtagagcagattcgttgtcagcaacagaagttgatgatggaaaacggactgaaacttcatgtggtaggtatcattgatgcggctaaagcgatgttcagccgtgacggtttcgacctctccaatttccgcgaggaactgaagcagaaaggaaaagacagcaacttgcaaacgattcgtgaagagatagtaggcatgaatattttcaattccgtatttgttgactgtacggcaagtgcggatattgcatcgttgtataaggatttgttgcagcataacgtctctgtcgttgctgccaataagattgccgcttcgtcggcttacgagaattaccgtgaattgaagacaatcgcccgtcagcgtggagtgaagtatctgtttgaaaccaatgtaggtgcgggacttccgattatcaacacaatcaacgacttgattcacagtggtgacaagatattgaagattgaggcggtgctttcgggtacattgaattatatctttaataagatcagtgctgatatacctttcagccgtaccatcaagatggcgcaagaagagcgttattccgaaccggatccgcgtatcgacctcagtggaaaagatgtaatccgtaaattggtgattctggcgcgtgaagcgggctatcgtatcgaacaggaagatgtggaaaagaatctttttgtgccgaacgatttctttgaaggttctttggatgacttctggaagaaagtgccgagtctggatgcggactttgaagcccgtcgtcaagtcttggagaaggagaacaaacattggcgttttgtggcaaaactggagaatggaaaagcctctgtcggcctgcaggaagtcggagccaaccatccgttctacggtctggagggcagcaacaatatcattctgctgactacggaacgttataaagaatatccgatgatgattcagggatacggtgccggtgccggtgtgactgccgccggagtttttgccgacatcatgagtatcgcaaacgtttaattcagttgagagttgagacttattaaaatgaaacatattatcatattgggagacggaatggccgattggccggtgaagtcattagggaacaagacgctcctgcaatatgcaaagacgccttatatggataagttagcccgcatgggacgtaacggacggttgattaccgtagccgaaggtttccatccgggtagtgaggttgccaatatgtccgtattgggatatgaccttccgaaagtatacgaaggtcgcggaccgctggaagctgccagtatcggtgtggacttgcaaccgggggagatagcaatgcgttgcaacttaatttgtgtagagggagaaatcttgaagaatcactcttcaggacatatttctactgaggaagccgacgtgttgataaaatacctgcaagaaaatttgggggatgaccgcgtacgtttccatacgggagttcagtaccgccacttgctcgttattaaaggcggtaataaggaattggactgcacgcctccgcatgatgtgcctttgaagcctttccgtccgttgatggtgaaaccgttgatgcctgaagcacaggaaacggcggatctgattaatgacttgattctgaaatcgcaggaactgctcaagaatcatcctttgaacttgaaacgtatagccgaaggcaaagatccggcaaacagtatctggccttggagtcccggttaccgtcctcagatgcctaccttctctgagacttttccgcaagtcaagaaaggggctgtgatttcagcagtcgatttgattaacggaatcggttactatgccggtttgcgccgtattgccgtagaaggagctaccggactttataatacgaattatgaaaataaagtagccgctgccctcgaagctctgaaaactgacgattttgtttatctgcatatcgaagccagcgatgaggccggacatgaaggagacatcgacttgaaactcctgacgatcgagaatcttgataagcgtgccgtaggtcctatttacgaagctgtgaaagattgggacgaacccgtagcaatcgctgtgttgcccgatcatcctactccttgcgagcttcgtacgcatacctccgagcctgttccgttctttatctggtatccgggcattgagccggatgaggtgcagacgttcgatgaggtggctgcttgtaacggtagttacggtttgctgaaagaagacgagtttataaaagcattcatgaatttcacactcaccgcagattacacggattaacactgattattttctcataatttctaatctgtgtgaatccgtgtaatccgtggtgaacttaaaataataacaatgaaatattatagtaccaataaacaggctccgatcgcttctttgcaagaagcagtcgttaaaggtcttgccgcagacaaaggtttgttcatgccgatgtccatcaaatctcttccgcaagagttttacgatacgattgatacattgtcttttcaagagatagcgtatcgtgtggccgatgctttctttggagaagacgttccggcagaaacgttgaagcagattgtatatgatactttgagttttgatgtaccgttggtaaaggtatcggagaatatttattccctcgaactcttccacggtcccactttggcgttcaaagatgtaggcggtcgttttatggcacgtctgctgggatactttataaagaaagaaggacagaagaacgtaaatgtgctggtggcgacttccggtgatacgggaagtgcggtggctaatggattcttaggagtggaaggtatccatgtgtatgtgctttacccgaaagggaaggtcagtgagattcaggaaaagcaatttactacgttgggacagaatattactgcgctcgaagtagacggaacattcgatgactgtcaggcattggtaaaatcggctttcatggataaggagttgaatgaacatctttctttgacttccgctaattccatcaatgtagcccgttttcttccgcaggcgttttattatttctatgcatatgcccagttgaaacgtgccggaaaggcggacaatgcagtgatctgtgtacctagcggaaacttcggaaatatcacagccggattgtttggcaaaaagatgggcttgcctgtgaagcgttttattgccgccaacaaccgtaatgatattttctatcaatatctgcaaaccggtaaatacagtccccgtccttccattgctaccattgccaacgccatggacgtgggcgatccgagtaactttgcccgtgtgctcgatttgtacggaggttctcatgcggctatctcagccgagatttcgggaactacttataccgacgagcaaattcgcgagacagtgaaagagacttggaaagatcatcattacctgcttgaccctcacggcgcttgtggttatcgtgcgttgatggacggcttgcaaccaggtgaaaccggagtattcttggaaacagctcatcctgccaaattcctcgaaacagtagaaggtattattggcgaggctgtggaaatccctgccaaattgcaggagtttatgaaaggagaaaagaagagcttgcctatgtctaaagactttgcggacttcaaaaagtatctactagcgctttaatcgtatgaaagttttgtcttacgaggaaatttaaaatacggcttattgtcacttgttggttgtaggagatcccgatgcgtttcggcctaaaacctctctggtgcagaaagcgtgtcgtctgacacagtccgacaaattgaaaagcgtcaagttattatcccccaatcctgtaatgaaggtgtggttgaaacgggaattgggggcatagtcttgtcttaatgagcaagataaacaagatactctcctatgcaatggattgtgaattgattggctgtagcctcattgagtgtaccttgccaccaattgctaaagtcactgagaggataaaccaattcttctcctttcaatccttttgctccgaaattgataatggaaacttgctgaccgggatgcgactcgaatgtctgtgtaccgctggcgggcataaatacaccgtaatcggtgatagtcctgatttccagattctctttcatatagtctatgagcagactgatatttcctaatgtatgatcttcccgtttgccggtggctcctacaatagcaatcttccgatagcctttcttttgcagaaacaggacagctttggtctggtcgttcgtctcttggtcggctatccggtggatgataggagcaaacaattccttatattccggtgaaagggagtcaccgtcgccgataatcacatccggagtatgtccgcgtgaaatatattcattggctgccccgtcacagcaaactacgaattttgcctcttccaacattcgcaaaggaagaggatgggtaggatattcgccattggcaagtatcacagcctcaggaatatagtgctcgtttatcattgtacgctcattaatcttttccatttaaagtagccaaagatagcgataatggaataaagtccgtataaagcagaggtgaaataaaggtctttataaatataaagtccgcaacagacaatatcgacaagaatccaggcaaaccactgttcgatatacttgcgtgccaacatccacatacccacaatacttagtgccgtagtgaaactatccaaccacggcacgttactgtcggtgtactcgataagtatccaggcaatgccgaaaaaagaaatgataaatacaaagaaaagagggagataatatctacgcggagtatggacgatagaaagttgttgcaatttatcattttctcccatgtcggcagattcccggctttttccttttcttcgtccccacatccagaaaaaccatccatagaccgccgctatcagataatagatattgataccgaagtctgcatacagccccgctttgtaatagacgaagatgtagatagcaggcatgatgatacccgctatccaaagatagatgcttgctcggtattccaaccaaaggtagactaaaccgactactgtaccgaacatttcaaggaaattcatatccatcattcgagcctgtattttatttaaaaacggagggtgaggtgtgccagaatattggtacctgccatcgggtagaagcgtggatcatgctttatcgcatacgtttttgtcttatccccattctcataaagtgccacactttgggagtatccatttgtctcatatttcgtattgaacaagttatagacggtagctcctatcgtgattcgctttgtgtggcgggttttaaaggagtaagaggcactcaggtgattgacgaaataagcgtcgagtgaattctcttttgtaccgaaattgtcgagatactggcggctgacatattgtgactggagagcaatttccagtccgttgcttccgagagtaatcaggctgtttccgatgaaagaaggagagaaggcgatcggagtgtttccaccctcgatagctgtctgcgtatataagtcatcgacaatctcaccattcaccaggctttcatcatacacgtaacctacgtagttcttgatacggtttttgctccatgtgccgttaagatcccaacgcagccaatcattgaattttgcgcctaatgacaactcgacccccatgcgatagctgtcttttacgttctctgccatcgcttcgcctatatcattggtctttccgttcaataccaactggtctgtgtaatccatataatacaggtttacaccggccgtaaaccattcactacggtaggtatatcccaactcataatccaataacttctccgctgtgggatgttcgtcaaacattccatccgtataattgttgcgggtaggttctttctgagctaccgagaaagaggcgtatgtgctatggttcggattgatttgccagaaaagtccggctttcggattgaagaagctgaagtgttctctcacatccagtcgctgcaaacgctcgggggtagcggtgaagtcccatttatcattatccccatcaatcgtataacggatataacggtattgcagatctgcgtaggcactcaggctgccggtcagttggtaattggctttcaaatagacattcccgtccgtctttccgccgttattacggtaatactcatgttccgggtcgagttgttcggtataattctttacccacaaaacttttccataatggtcgttactgtatcggttgagtccgccgcctagcgaagcgttcagtctttcattctggtaattcagagagaagataccaccgccgaaatcactatccaccaacttctggcgtacgagattggttttcttctgcggttcgctgttatccggcaggtagaaaggcttcaaaccatattccttcaatgtgcgtccgttcttgtattcctgataataaccgaagccattggtataatggaaagcgatattcagattccatgccggagagaagatatgattgaatagaagttgataatgtgtctgtcggtaattatccgtttgatcatcataaaagccgatcggattaccttttcctttattatcatccagaatgactccgttcggattatatgtccggtcgttctccagttgttctttactgataccgtcccaagcatgataagtcttctcctttccaccgaaagtgataaacttgatcgttgtgctctcaccgaagtaaccgccttgcacgaaatatgatttcagatctgatgaggcgcggtcgcggtatccgtcactctggatattagagagccgcgcatcgaatgcccaatatttgttaatcagcccggttccgactttgaccgtttctttgtgcgtgttgaatgaaccgtaagagccggaaacttcggcgtatggttgggatgaaatgctttgcgtacgcatattgatactggcgccgaatgctcccgaaccgttggtcgatgtgcctgcgcctcgttgaatctgcatatcttccagagaagaggcgaagtcgggagtatttacccagaagatggcgtggctctcagcatcgttcatcggaataccgttggcggtgacgttaatacgggtagcgtccgttccgcgaacgcgaatcgtagtatatcctactcccgccccggcatctgaagttgtcagtacggaaggagtggtagataataggaatgggatatcctgtccgaaattctgtttactgatctgttcttttcttacattggtgaatgctaccggagttttcgccgtagcacgcgtggatactacctgcacttcttgcaggtttacaactttcagactgtccgctttagcactcgtctgtgcatggacagcgaagcctgcgcccgataaggcgatggccatcataacaattcttttcatcttgcttatttgttagttctctacgccggcattacccggttcagattctatgggtatgttctcagcccgtcatgttaaggcacccctactagtgaatcggatgcaaaaatacagcatttacaggaggaaagcaaaaaaaacttttagatttgctaaaaacaatataactttgcaattcgttgaaaaggacaaacaatcatttattcatttaatacatttagattatgttactattattccaagcaacacaagctgcggattccgtgcaagtggccgcagatgagctgatgaaagaggcgattgccaacgctgaaggtttggacaagctttcattgataacccagcaactgatagacttcggtattcgtgccggagaacgtatcctgatagcggtcattgtttttattgtagggcgtttccttatttcgatgctcaaaaattttgtagggcgtttgatggataagagaaaggttgatataagtatcaaaactttcgtccggagtttggtgaatatcctattgactatcctgttgattatttcggttgtcggtgctttgggagtagaaacaacttcgtttgcggctttgctggcatctgctggtgtggctgtcggtatggcgttatccggtaacttgcagaactttgccggaggactgatcgtgttgctgttcaaaccttataaagtaggcgattggattgaaagtcagggtgtttcgggtacagtaaaagaaatacagattttccacactattctaactactgcggataacaaagtgatttatgtaccgaacggagcgatgagtagcggtgtggttaccaattatagcaatcaggtgactcgtcgtgtagagtggattgtaggaatcgattatggagaagattatgacaaggtacaggaagtcgtttatgagattcttgctgccgataagcgtatcctgaatgaacccgccccgtttgtagctcttcatgcattggacgcaagcagtgtgaatgtagttgcgcgtgtttgggtgaacagctcagattattggggagtttatttcgacattaacaaggctatttacgaaaccttcaatgaaaagggtatcaatttcccgttcccgcagcttacagtgcatcaaggctgattattataccgtatataatagaaaacgaaagagtctcacttttgtggaactctctcgttttatttagaacaatagtctggtgtgattgaatgaatttacttttatttaataccgaaatcttcggctagctcgtatctgtcttctttaatccccagtacgtgattgattttccttcttttttcaagatccttgaagtaattttctacgacctgatagagattaaagtttgtagtagatccggcggctaaatcgagtgactccactagcttttctacggcttgatggattttctctgcgtctatcagatgcagttcgttgctgtgtattaaatatttttccatgactgcaatgtttttaatgttatataggtataacatcttgcagtcatggaaagttcaatgattgaatgttagattttcgcaagcgcctgatccagatccgcaatcaggtcatcgatatgttccgttccaatggatagacgtacggtgcccggataaatctcctgttcggctagctcctgtgcattgagctgtgaatgggtagtgcttgccgggtggatcaccaatgatttcacatcggcaacattggcaagcagggagaaaatctccagactgtcgatgaagcggtgtgcttcttcttgtccgccttttacctcgaaagtaaaaatggaaccggcaccgttcgggaagtaacgttgatacagtgcatggtcgggatgattggataatgacggatggttcactttcttcactttcgggtgattgtttaagaaattcactaccttcaatgcattttctacatggcgttctacgcgcaaggaaagagtttccaggccttgcagcaggataaaagcgttgaagggactgatggtggcacctgtgtctcgcagcagaatagcacggatacggatggcataggcagccggaccggctgcatcaacgaagcgtacgccatgatagcatggatcaggttcggttagttgtggaaatttgccggaagctacccagtcgaatttgcccgaatctacaatgactcctcctaatgaagaaccatgtccgccaatgaattttgttgcagaatgtactacgatatctgctccgtgttcgatggggcggattaaatacggagtaccgaatgtgttatcaataattaaaggaattttgtggcggtgagctatttcagctactgcctctatatcaatgatatttgagttcggatttcccagtgtctcgataaatacggctttcgtattttcctgaatggctttttcaaagttcgataaatcacttggatcaacgaatgttgttgtgatgccataactgggtaaggtatgagccagtaagttatagcttcctccataaatagttttggctgccacaatatggtcgcctgcacgagtgatgttctcgaaagcataagtgatggcagcggcacccgaagcaactgccagccctgctactcctccttcaagagcggctacgcgttgttcaaaaactccttgagtggagttggtcagacgaccgtagatgtttcccggatcctgcaggccgaaacgtgcggctgcgtgagcggagttgtgaaatacataagaggtagtctgataaataggtactgcacgggcatctgttgccggatctgcttgttcttgtcctacatgaacttgtaaagtctcgaaatgtaatttctttgttgccataatcgtatgttttttaagtttatattcttcctttattttcttgcaaagttatgggatgtagatatatcgaacaatatatagcttaaatatagaaaataatgctatttttgtgccgttatatggaataatgtaactgcgttattcctaaaaatcaccttttagaagaatatttttcttatggatacttttgataaactggatagagtcgatttgcaaatactccgtactttgcaggaaaacgcccgattgacaacaaaagagttggctgcacgggtgagcctttcttcaactcctgtttttgaacgtcttaaacggttggagagtggaggatatataaagaagtatattgccgtgttggatgcggaaaagctgaatcagggatttgtcgtgttctgcagtgtgaagcttagacgtctgaacagggatatagcagccgagtttacacggatcatacaggatattcctgaagtaaccgaatgttataacatatcaggaagttatgattacctgttgaagattcatgctcccaatatgaaatactatcaggagtttattctgaatgtgttggggacgattgatagcttggggtcactggaaagcacgtttgtgatggctgaagtgaagcatcaatatgggatacatatttagttcgttgtgtgatagtctgaaatttatcttgtatatttgctacccgatatccgcagttgataagtaaagctatatctatggatcatcgcagaatgataatgcccggaatacagagtccttgactctgtacactaagaggatgcggttatgatgcaggttctggagtgttacctactgaaaaggagcaggaacaattccggatgaaggttgtaaaagttttattttattcaatggttttaaaccggaagcctgtttttcttataactttgcaacagattttagaaaaaggagtttgggatgataaataaatatgaagaacgactggggacagagcgcatgttaccgcttgtttttaagatggcacttccggctgtggcagcgcaatttgttaatttgctttatagcatggtcgaccgtatttatattggtcatatccctgggattggtacggatgcattggcgggtgtaggagtaacgacttctcttgttatactgatttcttctttttcagcgatagtaggaggtggcggtgcgccgttagcggctattgcactcgggcaaggggatcgttcacgtgccggaaaaattctgggtaatggttttatcctgctgatactattcaccttgtttacttctctcatcgcatatatctttatggagccgattttactttttacaggagcttcggaaaatacattggaatatgcggtcgactatctttctatctatttattaggaactatcttcgtagaaatatccacaggattaaattcctttatcaatgcacaagggcgtcctgctatcgccatgtactcggtattaataggagcgctgttgaatatcgttctcgacccgattttcatcttttggctcgatatgggagtaaaaggcgcagccctggctacagtactttcacaggcatgtagtgcagtatgggttttaactttccttttctcccggcacgcctctctccctttggaaaaacgttacatggcgttgaaccggaagataatactttctatatttgctttgggcgtatcaccgtttattatggcaagtaccgaaagcctggttggctttgttctgaacagcagcctgaaagattttggagatatttatgtcagcgcattgaccatcttgcaaagtgcgatgcaatttgcaagtgtccctttaacaggatttgcgcaaggtttcgttcccattgtgagttataattatgggcacggcgataaacaacgtgtcaaagactgtttccgtgtcgcattgataaccatgttctcattcaacttactgctgatgttgtttatgattcttttcccctcaacagtagcttccgcctttacgagtgatgaaagactgatagaaacagtccgctggacaatgcctgttttcttgggtggtatgactattttcggattgcaacgagcctgccaaaatatgtttgtagccttgggacaagcaaaaatttctattttcatagccttgctgcgcaaagtaattctgctgatcccattggcattgatattgccacaccttatgggagtagccggtgtatatgcggctgaagcaatatccgatgcgacagcggcaatttgttgtactttgttgttcttctggcagttccccaaaatattgggaaaaatccaaaggagcgctttgcgcataagctaaatttcctgatgtttatccataaatagaactagttatgtaactgcttacgtatttttgcgaaaaatgtttgttcatattataaaaagctaatgtatttccaaagtatctctcatggaaagtggtcgtctcatcattatttaacaagagaaacactatgaaatatcagtctttcttaaaccacctgtaaaaccatttacccaccttttcataatgccgggtttcggtatcagtgtatagcttagaaaagaatgacgtatctaatggttctcccgattggttaggatataatacgattaagctattgttggagaagtatttgctaagctgtctcggtagtttctcaaaagaactgtcgtaagagagagttcccggtcgtgcgctgataatgactaataaatggtcatagcttacttgtcctgttaataccagcaagtcattccaatcttctaaaagagagaaatcggttagcacctgtttatgctttttctttatcaatgtttgcaggtgggcggttgtcttttcatttgcaaagaaatgtacccggcaaccgagcgtgcttcccatccggcagaaatgttccatccaacggggaaagccggattcatattctgctttcggtgggacggcaacgacaatccgtttaagcgtgtgaaccggtatcaggaatttggaaataataagctcacagttcaatcttttcagcaggtgtccggcaagtacaccgaaaaatgaatccgtgatgtttgccttgtggtgcaacccggtgataatgcttgttatctcattctctttggcggaatggataatgccggaagcgatattcaagtcataacgggtaatttgtctcaacgggacgttgaccgctgttgtcatcatagccgctttttccagataacgtttgctccgcattctcagattgtcggaagtgttatcattattgattacattgattgccaatagattatctttcaatttcgggtcacgtataactaaagaaagatttaccatatcttcgatggtgttcggattgttaagagccactaagatcttttccgtttctgtagccgaagaggttttctccggttcagagtcgtctatggcaaccttcttggctgcccgttccgttatcagcgaacttaccacacaggttaccagaatcagtagtactgttccgttcagtacatcgtcattcagcaggcgttctcctccgggcaggataatgttatatcccaccagcacggccgccaatgtagccgctgcttgtgcggtactcagcccgtacattagctttcgttcaagagcagacatcttgtagatcttctgtgtcagccaacaagcgatccatttgccggtcagagccattataatcattacggcagccactttcagcgcatctccgtgtccgaagatgacgcgaaggttaatcaacattcccactccgataagaaaataaggaatgaaaagcgcattgccgacaaattccagatgattcattaagggggagacgtgcggaatgagccggtttaataccaggcctgccaggaaagctcctagaatcccttccatacctacgaactccattagtcctgctcccaaaaagaccatagccaggacgaaaatgaattgcattacattatcattgtaccgatggaagaaccagcgcccgacacgtggaaaaacgtagatgataaacgcacctagaaagatgacttttattaccagccaaatccagaacagcccccctgtctcccctttgaatagtccgcctacaacggcgagaatcaacagtgtgagtgtgtccgtcactgcagttcctcctactgcgatacttacgctgcgatggcgtgatacgccaaagcgtgtgacgatgggataggctacaagggtatgtgacgcgtacatactggccagcagtacggaagtgattacaccgtatttcaggtacgatacatttgccacaaatcctattcctatggggacgataaaagccagtaatcccagtactaacgctttgtttcgtgtctccttgaaatctcccatattcatttcaaggcctgccagaaacatgatgtaatagagaccgactttcccgaatagctcgaaactgctgtcgcgtgccagaatattgaagccgtgctcaccaattgccagtcctgctaggatcattcctataatatgcgggatacgcagcttgttcaataggataggggcaaataatataataaggagtacaaggagaaatatccatgtagggtcggtgataggaagtgttaaatcaaggccaatccaatccataagttgataagttcgtaatattcttcgcgcaaaataacttaaaaaaagtcttttaaaaaagcattcgttgataaaatactcctttgtaccatataatctgtatctttgcttccgatttaaaccaactaacaatttagaaaaatgaaaacagcgttattggcattaggagttttgtgtattatgggcagttgctcgtcggagatgaaaagttccaaagggattgtttgcgatgcgtcaatgaatacggtatccattgttacggataagaatgacacgctttcgtttagtacgatggatgcgaacaaggaacaagttgacggtttgcttttgaatgatacattggaagtattttatgcagggaaatatacaccgggaatgcaggcttccaaattggttcaatatccgcaggctccccgattgggcggtgaccgtgatgagcacggttgtatcggttctgctggatacgtatggtgtgaagtacaaaaagactgcatccgtttatttgaaaaaggtattcgtacagaggctgttaacggaggtgagacttctgcttttatcgttttcagtcccgattctacacgtgctgaactcttcttctcggataagcaacccaatgaaatattggaaagacgtagtttgccgtcgggtggctatgcgtggaatgtagaagacgatgatacaaagaatgtgcgactggtggacggcttatggacaatcagtcaaagaggtgatttgatttatactcagaaagctgagaacaaataatcagtggaggaagagtatcggtatgactactaattcttttttacagcatcatctccttttccgttttcgtcagatggacctagctaatgtaaaattaccactctcttatgtcaaaaagcttcaccatagaatataacttaac

SEQ ID NO: 11800 - DNA, 6581 bp, Unknown
  gut microbiota DNA sequence
gttggtatttgatagagttaacgcacaaataatgttcactaataagtaatgcatggttttattattttataaatgattattgcataaagatatttacttgtttccatttatcttcagtgtcgtttgctacttctgctcctggtgtggaacgtccttcttttacatacttcctgatgagtcgtgtcatttcttttatttcctgttcatagcgtttgtcgtggataatattttctttttctgatgggtctttttcaagatcaaatagttgcattgagggtagttgggccaaatctgtaggtttattggggtatccccatccgcctgaacctccattaaaaactagtttaagtcgtggtgtgcgtagagacaaatatcctttccctgattcataaacaaggtctttccgggtagaagttccttctttacttaatataggccatatgctgtaactatctacagcttcttcagtttttagtttatgattaaccatttgtgcaaaggtcgcatagaaatcggtaagagaaacaagggaattacttattttatttgagaacttccctttccaagacactatcaaaggaattctgtgtcctccttcgtaaatatctgttttatatcctctgtaaatataactaggaaaatgaccttgcttctccatttctgttacaccgatataaggagcgcagccattatcagaagtaaaaataatgatggtattatccaattggttatttttcttcaatgtttccacgatttgttgtaccatatcatctatcatgactacaaaatttccgtaggctcctattgttgttttacctttatatttgtctgacggcaacacaggtgtgtgtggtgctgtaataggcaagtataggaagaatggttttttactgttacgttgtttgtcaatatagtctatactatgacgtattatgtttggtagacaatcctgtggatcaaagtcggctcctgccactcctccgtgcattaaaccgagccccttctgcggttcaatgatatggtcgggtagagcagttactttattgttttctacataaacataaggagctatgtcaagagaagaaggtataccataaaaatagtcgaatcctcggtctgtgggaccattttttataggtaatgaaaagtctacatctttcttgtttttggcattttgaggatagccccaatcccagcctaaatgccattttccaatacaggcggtattgtagccattttcagaaaacatttgggcgattgtccgacggtcgggggtaatcatagcaggcgagtaaccgtcaagtacaccttcttttaattttgttcgccaagggtatcttccagtgagaatggaatatcgtgacggtgttgacaaggcggaagaggagtgggcatctgtaaaagtaatcccatcttgagttagattatcaatgttaggagtaggaatcttagattctggattgaatgctgagatgtctccatatcctaaatcgtccgccaatataaatattacattgggggattgtgctcttacggctgctgtcgcaagtaatgcggatgaaagggtgattagtttatgcatgttttttttaatatgagtgtaatatttgctctagacttatgtttttaggggtttgtaataaaggaaattctggtagtatgcacatgggtattgcaggatctcctactttccaagctggtatatttgcaaagcgtctttctagttttcttcttgatttttcagcttcggcatttcctttaccctttgcaataggattcgtttctttaggatcctttattgtatcgtaaaaattaccatctgaatagagcttatatcgcatgtctctaaagaattgttttgcatttttacttgcggacgcgttaaatcttgaatcataatgacagaatacccattcgcgagacttgcctttttctccccttatttgaggtaaaaagctttctccatctatatcccattgtttaggtactttaatattcatagcttctgcaaaagtaggcataaaatcggtgaaatctatcatatctgcacattcatgctttgtattgttattttttccccaataaactatcataggtacacgtactccggtatcgattgttagcccctttccaccccttactattgttccatctttcatggttgttcttatgttacggtttgttccgttatctccaataaaaatgataatggtattgttcaataagtttgaattttctaacttgttgaatatcatgtttatgtttttatccacatgttctaccatttttgcgaaattggcggtattgcgtacttcacgcatggagggatctttccatgcatcactttgaggagtggggtaaaagggatcatgcactaataccataggataatatatgaaaaagggcttagttttgttctcttcaataaaatcaatcacgtattgagtgaatatatccggtccatattcattgtttgagtaaagctttatatttccatcttgttctattagtggagcggcgtatctttcttttatcatcctgtcatagcttaattgccaaaggcaatagtgatcgaaaccaaaatgattaggcagatttctgtttctgcctaattgccatttgccagctatcatagtggtatatccggcgtcctttgctaaatgggcaaaagttttctccttttggtttaagtgtccaaagcaggagtaatttttattattgtatttacctgtcattagttgtacgcgtgatggtgtgcttaagggttgggagaaacagttgtcgaatctcactcctatttctgaaagtttgtcaaggtttggtgtttgataggtactgccataacatcctaaacattcacgtcccatatcatcggctaagatcagcacaatattaggctgtttgttagctgtttgggccatcaaaacggaaggaattatagcgagacattcccataagaagctattaatgactttcatttgttgatagctttagatgtttatattctaacttctaggttttgtttattgcatgaatatttcgatttgcttccagctattaccagtatcattcgcactcctctttcctggggtagaacgtccttcttccacatactttttgatcatctgtgtcattttatccacatcttttttgtagcgtttgttactgatgatattcttcttctccgaagggtcttctttaaggttaaagagttgcatgctgggcagtttggctagatcagcaggtttattagggtatccccatcctcctgaaccactgtggaatactaattttagctgaagcgtacgtagagatagatagccttttcccgattcatagataagatcttttcgggcagaatttccctttttgcttagtataggccatatactataactgtccaccgcttcttcatctttcaattggtagttcaccatttgggcaaaggtggcatagaagtcggtgagtgataccaatgaaccgttggtttcgttcgtatattttccttgccaggaaacgatgagtggaatacggtgtccaccttcataaatgtcgtttttataacctctgtagatgtaacttgggtgatgccctttattttccatttcttctacacctatgtatggagcgcatccattatctgaagtgaaaataatgatggtgttctctaattggttgtttttcttcagtgtttttacgatttgctgtaccatgtcgtctatcatgaccacgaaatctccataatctcctatgattgtctgaccttgatatttctctgccggcaatacgggagtatgcggtgctgtgataggaagatataggaagaacggctttttactgtcacgctgtttattaatgtagtctatgccatgacgtataatattgggtaggcagtcttgtggctcaaaatcggcacctgcgactccattacgtatcagtttgatccccttttgtgggccaatggtgcgattgggaagagctgtcactttatcgttttctacataaacgtgtggagctgttccgagtgaagcaggtataccgtaaaaataatcgaatcctctatccgtaggaccattcttgatagggagtgagaaatccacatcctgtttgtttttggcattttgaggatatgcccaatcccagccaagatgccattttcctatacaagcagtgttgtagccgttttcagaaaacatttgggcgattgtacggcggtcgggagtaatcatagctggagagaatccgttcaatactccacttttcatagttgttctccaaggataccttccagtgataatggaatagcgtgaaggagtggagagcgcggaagatgaatgggcatccgtaaaggaaattccggagtgtgtcaggttatcaatgttcggagtgtggattttggattccggattgaatgctgaaatgtctccatagcctaaatcgtctgctaatatgaatatcacattgggcgattgtgcctttacggcagttgccgcaaggagtatagatgagactgttattagtttgttcatcacttttgattaaatcttttgtgaattttattttcttttcaattggtcaacgtgagttcaatgaactttcagaatggtacaatgtgaaaaatcatcaaacccacgtttgttatttattcttgtactataacatttataggacaagtgaatcctttttcaaattttgggtatgccgtacccgaattaggcagtgactcgaatatgaaagtgaatgttcccgctttattcaacaaggtacctgcatccgcattgaaatcgacatacgatatgaaatacttttcatttagttttgaatcttcaaagaaatgaacgatctcattactttttttattggctgttccagctccaattttggacttatcaccggcaacctttacaacatctggtgtgtagaaacctctgaaccaattgtttttgttatcatcatgtgctttgaagttataacctgttggtgttgtagccccttccggcttgtatgttgcaaaccaaatgcgcatagcagtattacctccaagtacttcccctttggtcagtattttcgtctgctggttacttttctgtattaattcgcctcgtattgcttttacgggatcgctttctgtaggttcccaatcttcattgaaagtcggtacgtcaggagtatcggtagtaaggttagggttgactataaatccggatacaggattttctgtaattgtaaattcaaaaggtacccatcctgtttctcctgtgacaggatgtttgggaaaatactgtatgatgtcattaccggcatctgtatttgtatacttgatgtatattttatagttacctggtttttcgatataagatttgggggttgaagcactgatagtccaagatgcggatgacatgggacgtgtgcggtttccgccatagagtatatcaggtgtgttttcgtcccacatgcctacagatattggttttgagtttgttccatgaaagaatatatcattttctccccaaacgtgacttagagtaccgtcttttaatgtaaaagcttcggggtattgttctatattttctggtgtgggagtaaataagataagtgtttttacgccattatcttcggtaaaaccgggacgaatggcattattggcaatcattatggaattgtagcgtagattagccacgcagttgtatgtaagtcctgaaattttgatttctgtggagggactggacattcgggcataccaaaatatttgttcgttttgtgctccggttgttggagtagattggtttacccagttaatttctccaccgagaagaacaaaaggtttttcactagtaggaataagttcgcgtggaggacgttgagtgccctcagcccaaattggaattgttttagtgatggtggtgccaattttttttccgttttcaaaaatgtcaaacgaaataggtaccgatccatcctgcgttggggttccgcttatcgggaaataagcatattgtttgtctccctgaaaggagagttgtacctctccgtcctctattttcaatccggtttcggatgaccgatcaataaacttgacgaatagtttgcgcccaaacccattgacgaacggaatccctaagcggtcacccggttcattttcatcaccagcaaaagcaggggtacctttagcaaggaatccatctacataaatggtcgattcttgtacgttcaaccctttttcttgtataacatattccattccagggtgttcgcaggaacagaacaaacctgaaataaacagtatggatagtaatatgataatcttattcataatcatgtttcctttcgtttatataacatttgttatcttgcaccataattctgtgtcagtttaggattggaacgtatctcctgtgacggaattgggaataaggtacagtattggtcaatctcaaatttttcgctcttcatatagtagttgttcatattaggagaactgttggaagtataggcattatagaaatctgtgaagtgttggttcatcacttctacagcttttcctgaacgaacgaggtcaaaccagcggtggccttcgaaag

SEQ ID NO: 11801 - DNA, 51681 bp, Unknown
  gut microbiota DNA sequence
tataatgtattttaatacattctttatttattatatatattagttgccggatggggtgccggaacgcatttcgggtatcttccgtatcccccatcaatagggcatttcaggaggtatgaaggggtgccgcgtggggtgccgctcaaaagtgcggtcgattcaatataaacgaccgtatattttgtaccaaacgaccgcccgtttacactcgtcagaccgttcgatcggttcaaaacgagcggtcgtattaatcaaaagatacgctcgtttcatccaacaggaacggctgaaacaaaaatcatccggctgaacctaaaaaaaacgaaataattctgtgcttctcacaaattcttcgtacctttacactccggtaaaacaagttctatccacataaaagataacaaaatggaaaacagaagtttagtaaccattgccgaacattctaaagaaaaaatcctctatatgctcgaaatggcgaagcagtttgaaatgaatcccaaccgccggttattgcaaggaaaggtagtagcaaccttgttcttcgaaccttccacacgtacccgcctgagttttgaaacagccgccaaccgtctcggtgcacgtgttatcggattttccgacccgaaagcgaccagttcttccaaaggggagacactaaaagacacgattatgatggtgagcaattatgcggacattatcgtcatgcgccactatctcgaaggggccgcacggtatgccagcgaggtagctccggtgcctatcgtcaatgcaggagacggtgccaaccaacatccgtcacaaaccatgctcgacctctattccatctacaaaacacagggaacactggaaaacttgaatatttatctggtaggagatttgaagtacggacgtaccgtgcactcgctgctgatggccatgcgccacttcaaccctactttccattttatcgctcccgaagagttgaaaatgccggaagagtacaagctctattgcaagactcaccagataaagtatgttgagcacacagatttcaccgaagagattatcgctgatgcggacattctgtacatgacccgcgtgcaacgggagcgtttcaccgatctgatggaatacgaacgtgtaaagaacgtatatatcctgcgcaacaaaatgctggagaacacccgtcccaatctgcgtatcctgcatccgctgccccgtgtcaacgagattgcgtatgatgtggatgacaacccgaaagcatactatttccaacaggcgcaaaatggtctgtatgcccgcgaagcaattctttgcgatgtgttaggtatcacattagatgatgttaaaaacgatattttattatgagcgaaaataaacaagcattgcaagtagctgccctgaaaaacgggacagtgattgaccatatcccttccgaaaagctctttaccgtagtacaactgctcggagtggagcaaatgaccagcaatatcacgatcggattcaacctcgacagtaagaagctgggtaaaaaaggtatcattaagattgcagacaagtttttctgcgacgaggaaataaaccgtatatcggtggtggctccgcacgtcaagctgaatattatccgcgattatgaggtggtggaaaagagggaagtgaaaatgccggatgagcttcatggaatcgtaaaatgcgccaatccgaaatgtatcacgaacaatgaaccgatggctacgttattccatgtgatagacaaagataactgtatcgtaaaatgtcattattgcgaaaaagaacaaaagcgtgaagagatcagtatcctatgaaacaagattggaaacctggaacgatgatttatccgctaccggctgtattggtcagttgcggaaaagaagaaagtgaatataatattatcacagtggcatggacgggcacgatttgcaccaacccgcccatgtgctatatatccgtacgtccggaacgatactcccatgagattattaaaaagaacatggagttcgttatcaatctgacaacaaaagacatggctttcgccacagactggtgcggagtacgttcggggcgcaattatcacaaattcgaagaaatgaagctgactccgggacattgcactgtggtcagcgctcccttgattgaagagtcgcctctctgcattgaatgccgtgtgaaagaaatcgtctctctaggctcgcatgatatgtttattgcagacgtggtgaatgttcgggcagacgagcggaatctgaatccggaaaccggaaaacttgagttggcggaaaccaacccattggtatatgtacacggcggatattatgagcttggtgagaaaatcggaaaatttggttggagtgtagagaaaaagaaaaactgaccccagataatacgaccatgaatatgctgcgtacaattttccttttaggtttgctgaccgtaggctgtatggctttcggtcagaactacaacgcagagaaggtggaccgtcccaataccaagaaaataaactttggtattaaggccggattcaactcttccatgttcctggtgtccaaactaaaaatcaaggatgtgactatcgatgaggtgcagaataattataaaatcggttatttcggcgccctcttcatgcgcatcaacatgaagaaacatttcatccagccggaagtatcctataatgtgaccaaatgtgagatcagcttcgataagctgggctcacagcaccctgctatcgaaccggattatgcgtccgtacaatctgtattgcacagtatcgacttccctattctatacggttataatgttgtgaaaaaaggaccttacgggatgtctattttcgtagggcccaaactccgttatttatgggggaaacataatgaaatcactttccgcaacttcgaccagaaagggattcacgaagaactttatccgttcaatgccagtgtggtgatcggtgtaggggtcaatatttcgcgcatcttctttgatttccgttatgagcaaggagtgggaaacatatccaagtcgattgtttatgacaatatcaattccgatggcagcacgggcgtgagcaacattactttccatcgtcgcgacagcgcgttaagtttttcgcttggcttcatcctttaagaataaaatatcattaaatcccactttttactaacatttttcttgtacttccttcattctttatttattttcattaactttgtgcgcttaaaaataggtatctcgaattaaaaatttaatcttactttataaaagaatgaaaagagacgacttaattttcgatattatcgaaaaagagcatcaacgtcagctaaaaggtattgagctgattgcatcagaaaacttcgtgagcgaccaggtaatgcaggcaatgggttcttgcctgaccaacaagtacgcagaaggttatccgggcaaacgctattacggaggctgtgaagtagtagaccagagcgagcaaatcgctatcgaccgcttgaaagagattttcggtgctgaatgggcaaacgtacagccgcactccggagcacaggccaatgcagcagttttcctggctgtactgaatccgggcgacaaattcatgggactgaacttagctcacggcggacatctctctcatggttcattggtgaatacttccggtatcatttatactccttgcgaatacaatctgaataaagaaacaggacgggtggactacgaccagatggaagaagtcgctttacgtgagaaaccgaaaatgattatcggtggcggttccgcttactctcgcgaatgggactacaagcgtatgcgcgaaatcgctgacaaagtaggcgctatcctgatgatcgatatggcacaccctgccggtctgattgctgccggaatacttgaaaatccggttaaatatgcacacattgtcacttcgactacacataagacacttcgcggacctcgcggcggtgttatcatgatgggtaaagatttccctaacccatggggtaagaaaactccgaagggagaaatcaagatgatgtctcaattgctggattctgccgttttcccgggtattcagggcggaccattggaacacgttattgctgccaaagcggtagctttcggtgaaatcctacaacctgagttcaaggaatatgcaaaacaggtacagaagaacgctgccgtacttgcacaggctttgatcgatcgtggctttacaattgtttccggcggtacggacaatcactccatgctggtagacctgcgcagcaaatatcctgatttgacaggtaaagtagcggaaaaggcattggtttctgccgacattaccgttaacaagaacatggttccgttcgacagccgttccgcattccagacttccggtatccgtttgggtactcctgctatcacgactcgtggtgctaaagaagacttaatgcttgaaattgctgaaatgatcgagactgttttgtctaacgtagaaaatgaagaggtgatcgcacaagtccgcgcacgtgtgaacgaaacgatgaagaaatatcctcttttcgcatactaaatcagaacttttcataatataatattcagagtttgtcctttatgaaagggcaaactctttttttatttattgacgttcttctccgaaccatccacacccaaatttgtttttcttttctccccctctatatacaatcatccccgtctttccgtactttcacactaactaagtccttctatttctccatcgacaatatcaatatgcaatgcctgcggttctttgggcagtcccggcatacgaaggatttctccggcaatggctacaatcatttcagctccgttattgataactatatctttgatgtggaactcgaagttattcaccgcaccgtatattttcggatcggcggagaacgaatactgagtctttgcaatacaaaccggataatgagtgattcccatcttctcaatcagtttgatacggttgcgtgcgatactgctgtacgtgatcacactggccccataaatatgggtagccactttttcgatcttctgctgtatactgtcttcctccttatacgtaaaagtcaatggctcggaaggattgttttcaatcatatccaccaccagacgcgccatatccactgctccctctcctccttcactgaacgcattgttgatggcaaagcccactcctaactgttcacagtgctcacgcagcagttccatctcttcttccgtgtcggatgcgaacttattgaaagctacgacaaccgtctgaccgaacgagcgaagattgcgtacatgtttatccaaattgcgcaagccttctttcagcccatccatattcggttccttgatacggtcaagactgacacctccgtgcatcttcaatccttgcgccgtagcgacaataacagtgagacgcggctggagtccgctctttcgacacttgatattgtagaacttctccgcaccaagatcggcaccgaatcctgcttctgtaatcacatagtcaccgaaagtcatcgccaatttggtggccagaatggagttgcaaccatgagcgatattcgcaaacggaccgccatgcacaaaagcggcagttccttcggttgtctgcaccaggttaggatggatggcatctttcagtaatacggtaatagcacccgccactcccaagtctttgactgtaaaaggctggtcatcataagtgaacccgagcaggatattttcgatacggcgacgcaaatcattcacatcttgagcaagacacagaatagccataatctccgaagccggtgtaatatcaaacccggactcttgggtgataccgtttgacttcggaccgagccccacgacaatgctgcgcaacgaacggtcgttcacgtccaacacccgacgccagagtatttctttgagcccgaaaccttttgcctgattctgatagaggtagttatccaacaaagcagaaatcatgttatgagccgaagtgatggcatgaaagtctccggtaaaatgaagattgatcttatccatcgggagcacttgggcatatcctcctccggcagctccccctttcattccgaagcacggaccgagagacggctcacgcagggcgacaatcgccttcttccctattttattaagtcccaatgcaagaccgatagacacggtagttttgccgatacccgcttttgtagctgtaatggcagtgaccagtataagattgcttttctttaccttctcttcatcaatcaactgttcgggtatctttgcaatgtagcgaccgtaattttccacttcatcacgagggattccgatactttcggcaacctgcttcactttcttcagctcaatgctgcgagctatttctatgtctgatttcatacagaatatgattagttttagttgaaaatgcaaaagtaacaaatctatgtaaagctgcaaaactctttccgcataataactgttgtatgtaacataacctaaacaacaacttaattatggaatggattattaatcaactaagggtacaccctgagcttgctatctttctcacgcttttcgcgggattctggttgggcagactcaaaatagggaagttctctctaggtacagtgaccagtgttctgctagtcggagtattggtaggacaactgaacatcaccgtagacggtccgatgaaggccgtattttttctgttatttttattcgccgttggctataaggtagggccgcagttctttcggggattgaaaaaagacggtttgccacaggtaggattcgccgtattgatgtgtatcgtcagcctggtagccccgtggatacttgccaaaatcatgggatatcacgtaggagaagccgccggattactggcaggatcacaaactatctcagccgttatcggtgtggcgagtgataccattaatcagttgggtatcagcgaggcacagaaagctacgtatatcaatgccattccggtagcatacgccgtgacttatatcttcggtacggcgggatcggcctggcttctggcttctctcgggccgaaaatattaggagggctggataaggtgaaagcagactgcaaggcattggaagtgcaaatgggaacatcggaagtagacgaaccgggattctcacccgcactccgcccggttgtattccgcgcttataaaattaccaacgaatggtttggaaaaggaaaaaaggtaagcgagctggaaacgtatctggcggaaaaagataaacggctgtttgtagagcgggtccgccaacggggaattgtaaaagaggtcagtccggatctgattctccaaccggaggatgaagtcgttctaagcgggcgacgtgaatttgtgattggtgaagaagattggatcggtccggaagtgattgacgcccaattgctcgatttcccggcggagactctcccggtaatggttactcaccgcactttcgcaggagagaaagtcgcaacgatcagatcacagaagttcatgcacggtgtcagcatccgtagtatcaagcgtgcaggtatcaacgtgccggtgctcgctcagaccgtagtcgattcgggagatatcctcgaacttacgggcatgaagcacgaagtggaagccgccgccaaacaaatgggatatgtagaccggccgaccaatcagactgacatgattttcgtaggactgggaatcttggtcggtggccttatcggggctctttccattcatctgggaggtatccccatcagtctatccaccagtggaggcgcattaatcgcagggcttgtattcggctggctgcgcagtaaacaccctactttcggcggtatccccgaaccttcgctatgggtattgaataacgtaggactgaatatgtttatcgcagtggtgggcattgccgccggtcccagctttgtagccggattcaaggatgtaggtttcagcctgtttattgtcggtgcactggctacggctattccattggtcagcggattactgatggcaaaatatctgttcaagttccaccctgccctatccttgggttgcacggcgggagcacgaacgacaaccgctgcactgggagccattcaggatgcagtggaaagcgatactccggctttgggatataccgtgacgtatgccgtaggcaatacgctgctgattatctggggagtggtcatcgtactgctgatgtaaaccggcagtacttactgtttcagacaaattatttactattctaacaaatataaatttcattatggagaaaaaagacaatagcccggctatcactaaaagctatgctaaaaagatggaaaccatcagccctttcgaacttaaaaacaagcttatcgaaatggcggatgaaagtatcaagaaaatagcgcacaccatgctaaatgccggtagaggaaatccgaactggattgctaccgaaccccgtgaggcgtttttcctgttaggacaattcggcctttgcgaatgccgccgtgtattctcgtcggaagaagggatagcgggtatcccgcagaaaacaggaatagccgcacgtttcgaggctttcttgaaagataacgaaaagacaccgggagccgacttgctgaaaaagggatataactatatgttgatggagcacgcagccgacccggacacgctcgttcatgaatgggcggaagctgtaatcggtgaccaatatcccgtgcccgaccgtattctgcattttacggaactaatcgtacaggattatctggcgcaggagatgtgcgaccgccgtccgccgaaaggaactttcgacctgttcgccactgaagggggaacggcagccatgtgttatctgttcgattcactgcaagagaatttcctattgaaccagggggacgccattgcattgatgattccggtgtttactccttatattgagattccgcaattacgacgttaccaatttgaggtcactgaaatttccgctgaccagatgacggctgacgggctgcacacctggcaatacaaggatgaggatatcgacaagttaaggaacccgaaaatcaaggctttattcatcaccaatccgagtaacccgcccagctacgcactgagcgctgagactgcggcacgcattgtcaacattgtaaagaatgacaatccgaatctgatgattattacggatgacgtgtacgggacatttatccctcacttccgttcattgatggctgaattgccacataatacgctttgcgtctattctttctccaaatatttcggagctacgggatggagaaatgcagtgatcgccttacacgaagacaatatctacgacaaaatgattgcccgcctgtcggaggagcagaaagaaatattgaacaaacgttattcgagccttgacctgcatccggagaagatgaagtttatcgaccgtatggtagctgacagccgccagatcgctttgaatcatacggcagggctctctctccctcagcaaatgcagatgagcttgttttctcttttcgctcttctggataaagaggaccgctataagatcaagatgcaggatatcatccatcgccgtttgcacgcattatgggacaataccggatttacactggtggaggatccgctgcgcgccggttattattcggaaatcgatatgctggtgtgggcgaagaaattttatggggatgatttcgtcgcttatctgcaaaagacatataatccgctggatgtggtgttccgtctcgccaatgagacttcactcgtattgctgaacggcggtggctttgccggccccaaatggagtgtccgtgtatcgcttgccaatctgaatgaggccgattatgcgaaaatcgggaaaagtatcaaacgggtgctggacgagtatgccaaagtatggcagtcataaacagataattcctaaagcgcagatgaacacagatgaacgcaaattatcgcagataatatttaatctttgcgtaaatctgcgttaatctgcgcttgtttcatagatagtcagactgaaatttcatatctttgtgatgaattaacctgtacaaagatgaaaaaactgattctatttctttcgctgatattatctgccggaatcgtatccgcacaatcggaaataccttccgacagtatccgccgcgccccgtcagctaatgtaaaagagttcggcggtttcttgctggatatggggataatgaatatcactgccccccaacttcccaaaacagatctgagtataccgaatgtaaccaaggactataatcagctattccgcatgaatacggatgctatctattctcaaggattcacagacaccttctctccttcatattccggcttcggacacggatacaattggggattttactcttcaccgcagtttatgcagatgggatctttcaaactgaaaaacggaatgcaaatcaatacatacggagattatgataaagacggatggagggttcccaatcgaagcgctatgccttgggaaaagaataattttcggggagcattcgaactaaaatcagccaatggtaatttcggaatacgaattgaagtgcaacaggggcgcaatgtcccctactaattaccggatatttgcccggtgatattagaatttctaactaaaaaagtgtttaataaaagggacattggaatatcaaaatcttaatctatgttatgaaacatactttttcccttggattatttgcagatatcacaaaagtccgtacctttgcaatgtgtttttcatagtattagatttaaggttaacaaaggttggagcaaggcgttgctcctttttttatgtctgtacgttacgttttacatatttatttggaaaatatacaataaagctgtatctttgcagcaaaatagaaaaaccaacgatgaacccaatattacaattacataacatttctccaactcctgcagggatatcctctttctgcaattcaagttgcgtacatgtacattggttcagcggattcatctaaattcacccattcttttttacagaaactgcttatcaaattctttttatttataagtagtatttctaattgattttcaataagatatattatctttttgaaaacaggtattcagtgtgtaattgaattattcgtataaccgaatcaccccaatatatcataatatgttctctattatatccactatgttcttaggaatcggcattggttatgcattgcgtaactggagcattctgcaaaagacagaaaagacaatttctcttacaatattcttgttactctttatcttgggagtatctattggttctaacagtctgattgtaaacaatctcggaaaattcggatggcaagctatcatcctttccacatccggtgtattgggaagtctgattgccgcccgcttagtattacaactgtttttcaagaaaggaggtaaacaatgaaaggaagtctgattgttatattattcttttgcataggttgtatcatgggattttttaataagttcgagttcgacacacatgctgtctccatgtatatactttacggattaatgttgcaagtaggaatcagtatcggctctaataagaatttgaaaactatcgtttcacatctgcatcccaaaatgctattgattccgttaggaacaattatcggcacactattgttctcggctctggcaagcctgttgctacaccaatggagtgtattcgactgtatggcagtaggaagcggctttgcatattactcactgtcctccattcttatcactcagtttaaagaaccatctatcggacttcaactggcaacggaactaggcactattgccctgctaaccaatatcttccgtgaaatgacagcattgattggtactccgatcatcaagaaatatttcggggagttagcgcctatttctgtagccggagtcaattcgatggatgtgctgttaccgtctatcagtagatattcaggaaaagaaatgattcctatcgccattctacacggtatcctgattgacatcagtgttccggtcttcgtttcttttttctgtaatctctgaatccttaactcttagcatttttcagatattcgcgaataatccccaaaatttcaagcccgtatttctgtactcccttcgcaccgaaatagggtatggcctccaaagcttccggagtatcgggcaacaagtttacaatccccatcagggctttctgttgcattatgatataagccgggagacttacttcgcgtgcttttgccgctctccattcggacaaggtacgataaagctccgggtacagaatatctgtaggaacctcaacctttgctttcgaagaactacgtgtacgttctttacgtcctttccgttctctcttctctttcggagctttgggtgaagaatcgtcttcaaggcttaacgtcactttagcttttaacttcaaatatcccgtaacagtaaagggttgccccatcatcgcttccaataaagattccttaatccacaacgcatcgtccaacgcttgcaggcgttcattcaactgcttcctaagttctttattatcaaggggcatattcgttttttcaaacaacgcgcgtacaggttcgagttccttacgaaagtatcctgcaccggaacgaacccgctcctgcaatccctggtccgccgcataatcatcgctcccatttatcaatcgggtatattgattgcggaaacgttgagacacttccactatcttttctttgatatgaggagccaattctttatactcggcaagttgtttcggataaagcttatagaggtcttcatctatcaggcgaagcagccgcttataagcttggtcgagcgaataaaagttgaataaatcactcagtaaatcaaagaaataggccttctgcatatcgtgtaactgccggttgcccggtttgtttctttctacttctttggtgaagtcatctacagtactatcactgatgatagcttctctgcgcagaggggattccagcaccatgccttccaaagttttgcaacggcttaaggctacgtaggtctgcccatgcgcaaaggaattgcgcgcatcaataatggcacgctcaaacgtcagtccctgactcttatgtatcgtaatagcccaagctaaccggataggatactgacggaaggttccttctatctcttcggtgatttccttcgtttcttcattcagcacatatttataattgccccactcttccggcaataactgaaattcatctccattatcttttccccgcacaatcatccccgcatcattaacggctgccacttctccaatcatgccattataataccgcttttccgacgaggggtcatttttaaggaacataatctgtgcccccgcttttatggtgagaacttcgtctgccggatataaatattccggaaaagttccgtctatctctgcacgaaaactataagtctgcccgggcagagaggccaattcattatcgttcaccttctgtgcctgataattatgcgttgtcagacggatgtaaccttcttccttgcgaggacgaaaacccggctgataccgacggttcaactcattcaatacttcatcgtccgcctgattctcacgtatcttattcaacaaggaaagaaaaaaggtatcactctgacgatagactgttttcagttcaattgtcatatataccgtctcacgcaaagcacggctggcaaagaagtaaggggtttcataatagttcttcaacatttcccattcattctctttcaccacaggggctaactgctgcaaatctccaatcatcagcaattggactccaccgaaaggcttttccctatcccggtatctccgcagagccgaatctatcgcatccaacaaatcagcacgcaccatactgatctcatctatgaccagcaagtccatgctacgaatgatattccgcttttctttactgaaacgatagtgtgtctgggaagagttgaacgtggtctccggaacaaaaggtgcaaaagataactggaaaaaagaatgaatggtaactcctcccgcattgatagcggcaatacctgtcggtgccaagataaccatacgtttaggactctgttccttcaatcttctcagaaatgtagtttttccggttccggcctttcccgtaagaaataaatgcgtgcctgtattttcaatgaactgccacgctagttgcagttcgggattattttccatgggattcaaattttcaacaaaggtaactattattctttttctttcgtcttgatacgaaagaaaaagaaccaaaaagaaagaataagaatattatttcatagagccccccacaatatccaacagctcatttgtaatagcctgctgacgactcttgttatattgcttcgtcaaatcctgaatcaactcgttcgcattatccgtagctacctgcatagctaatgtacgggcagcgtgttccgatgtgttcgagtcaacggctgctgtaaatagtttctggcttaatacagttgggattaggttggcaatcagttcttcagcgttgggttcgatgatgtagtcgttggcgacttcacgtctttccgcctcccctttgtccttttgctcctcattcatctgctccttgttttgttcttcttcatctatgatatgtgtcagatcgatgggaagatacgtttcacgaaggaggatttgcgtacccatagacttaaaatgatgatagataatttccacacggtctatttcgccggatacaaacatccccatcagacgatgagccaagtcggcagcttcctgataagtcggtttgtcagataaggtgggcgaagtttcctgcggttggaatcccatgcgttttacagcttcatctactttcttgcctattggaaatatcaagatattgtcttgcccgagagtgcgatattcacctaccgtttgcaataacatttttatcacattggcattgaaagcaccacaaagagacgtattcgaagagaaggcgacaattgccacacgcttcacttcgcgctccttcacgtagggagattcgataggaaggtccgcactcagaaagttagtcagaatcttgttcaacttcttctgataaggcaacatattctcaatggctccttgtgccttatgtaatttggcagaagccaccatcttcattgctgaagtgatttttcgggtactctttaccgaatttattctggtttttacttctttcagtgaagccataatttttttaattaagaatgaaaaattaagaatgaagaatttactatgcagtatagtcaaatagttaataataagaattcttcattctttattcctatatttctataagtattgtttggcaaccatagcggcggtttcctcgatggcattggttacactatcatcgataacgcctgtctttaagacatccaacacatcctgctggtgattcagttgcagagattcgatgaagctacgttcaaagtcctgtaccttatccaatgggacatcatgaagaagtccgtgcgtaccgcaatagagaatagcaatctgctgttctacgggcattgggctgtattgaggttgaatcaaaagttgggcgttcttacgtcccttatcaatcgtcaaggcggtaatcggatccatatcactgctgaacttagagaaagcttccagctcacgatattgggcttggtcaatcttcaatgttccggctaccttcttcatggccttaatctgtgcgttaccacctacacgggatacggagatacccacattgatagccggacggacaccctgattaaagagatcggtttcgaggaagatctgtccatcagtaatggaaatcacattcgtcgggatataggccgaaacgtctcctgcctgtgtctcgatgataggcaatgcggtaagggaacctcctcctttgactatatccttcaagctgtccggcaggtcattcatttcgcgcgccacttcttcctgactgataatcttcgccgcgcgttccaacaaacgggaatgcagatagaagatgtcacccggatacgcttcacgtcccgatggacggcggagaatcagagatacctcacgataagctaccgcctgcttggaaaggtcatcatacacaaccagcgcatgacggccggtatcacggaaatactcaccgatggctgcacccgcaaatggcgcatagtattgtagcgcggccgggtcaccggctgtagcggctactacaatcgtatagtccaacgctccattctcacgaagtgtatttacgatagaagcgactgtagaacctttctgtccgattgccacatagatgcagtatacaggatcgcctgccagaaaattgctacgctgattgatgatcgcatcaatcgcaatagccgtctttcccgtctgacggtcaccgataatcaactcacgttgaccacgcccgataggaatcatggcatcaactgccttcaatccggtctgtaatggctgattgacaggctgacggtaaattactcccggagctttccgttccaacggcatatcataaagttcaccgccaaccagccctttgccgtcgagcggttcacccaacgggtcgatgacacgtcccaacatcccctcgcctacacgaatggaggcgatgcgttttgtacgtttcacaataaacccttctttgattctgtccgtcggacccagtaatacagcacccacgttgtcctcttcgaggttcatcacgattgctttgataccattgtcgaactccagcaattcattcgcttcggcgttccgcagtccatagatacggactacaccgtcgctcacctgaagcaccgtaccgatttcgtcaagctgcacattggcattaatcccttcgagctgcttgcgcaatatatcggatacttcgcttactcttatattttcagacattatacaattctcctattcttatcaataaattgttgtttcactcgctttaactgcgtagcaacgctcgcatccaaacggtaatcgttgatatcgaaaataaatccaccctcaatggacgggtctactaccgtttccaactccatctgcgcatgcaggatatgcgctgccgcagaacgaatccgatccgatgtcgctttatcaacgtcaacagccgtaatcagtttaccgactccgatatgtttcaacttccgatacaggtccaggtacatcaggccgataaattgcagataaccttcacgcctgttttttaataccaaagtgataaaacggataaactctctggttgatgtaccttcaccatcggcagccgtacaaaccaacgctaatttctccttaatcgcaatgaccggattatcaagtgcctcacgcagtccgggttgtgcacaaaaactgtgagacagagtgaggaattcctgatataccctgtcttccactcctttttcctgcgcgtattcaatcatcgcttttgcataacgcattgagagtattccgacttccattttccttagttcttattcggggttaatacttcatccagcatacggtcgatcatccccatctgtgcttccttatctgcaagattcttgcggagcactttctcggcaatgtccaccgaaaggacagccacctgacgacggatgtcgcggatagcctcgtctttctctatctggatttgttgcttcaccgcatcaagttctttttgtgcggctatctcggcttgcttacgggcctcgtgaacaattttgtcacgttcttccattgcttccctcaagatgcgtccttgttccttgttggcagcagccaccaacgcgtcaccctcttctttcagtctggacaactgtgcattggcttccctcgccacctccaaagactggtcgatataggttttacggccttccaccatttttataatgacggggaagccgtatttcgccaatatcacgaacacaatcccgaatgagaggaacatccagaacaacaggccactatcaggtaatagtaatgacataagcttagaggaagaataccaatagacaaacaactaccgccaacagtgccacaccttcaatcaaagcggcggcgataatcatattcatacgaatgtcacctgaggcttccggctggcgtgcgatagcttccattgccgagccaccaattttaccaatacccaaaccagctccgattactgcaagacctgcaccgatagctgcacctaatttacttactcctactgctgctgcagtggcttgtaacaatactgatagtaacataattttcagttttaaaatggtttatattttctctcgtttaattatttatttctcttccgcttttactttggctccttcctgcgccaacccgataaacacagccgacaacatggtgaatacgtatgcctggatgaaagcgaccaacaattcaagcgcattcataaagatgttgaacaatacggaggctactgtcagcgtgccgttcaaggcaggtcccatacttgccgagataaatatcaagcaagtaagcaccaacattgccatgtgtcccgccagcatattggcaaaaagacggatcatcaaagcaaacggttttgtaaagatcccgaagaactcgataaacggcatcatcggcacaggcactttcagccaccaaggaacatcaggccagaaaatatctttccagtaatgcttcgttccgaaaatgttgaccgccagaaacgtgcatacggcaagtaccattgtgatagcaatatttcccgtcacattcgcacctccgggaaagaacgggatcagtcccatcatattattgataaagatgaaaaagaatgccgtcagcagatagggggcaaatttccggtaattaggaccgacacagcttttaataatgtcgtcattcaccatcataatgaacatttccatgaatccgataaatcctcccggagctttggctccctgcggacgttttctgtaccagtgcgccacactcaggacgattaccagcaacaatacactattgaacagtaaggcgaatgtaactttcgtaatggatatatcccaaggacggacttgttcgcccgccgcattgtattccaccagtttgccctcgtacttacttccttccggagctatcgaaagcccctcatacgtgcctccgttctcttcgagacgagaagaaaggaacacatgccagcctgtactattactataaacaataataggtaatggtatagtaatgtgcgttttaccccacgtggtaatatgccattcgtaagagtcgccgatatgtccgaatacgatttccttcacgtccaccgtattctcctgttcctctttcggagtaatcacatcctgcacctgtgaagtcgcttctccctgctcttgtgcaaagccgggcagaccggacaccatcatcagacagaacaatatcaacggagccattatgttatgcaactgtttcatttttcttcttattttgctttttccgtttctgattcacctcaaaagagaaaaagaaccaggtttcgaatatcagatatatcaaatagaatgagataaacgtcagcaaaaaagccttagcctcttcgcgcacggttatacaataaatcaggactaaaatgatagaaagaatcatctttaccatctttattgccagatacaacagtaacattttctggggagcgtgcagccgacacgcatcgaacatatagatactaaacaaaccgaatagataaaaatagaccggaataaacgggtatcctccgaaatagtgtcccggcagagcgatatgcaaaataaccgctcccaatcctgcacctatgattgcaaacagcgtatgcaacccgataaaatttcgtttcgttttcgtaatgttcaccatgtcactgtgtttttcttaatatattgtcttctgtcagccgactgtcacccgtctgtcagggagatgcaagcggaaaccgtaccgtcactcagttcgacaaaaccaccctgaatatctatcgtacgctcctcgccttccatcgtcgtgtaactcaacgtacccgcttgcaatgacgagacgataggcgcatgtccgggaagaatagaaaacgaaccaaccgtccccggcaatgtgacaatcttcacatctccgtcgaatatgctcttttcgggcgatactatactcaaatgcagttctttcatccttcttatgtttttatttctttgcctgttcaagcagtttcttacctttctctatcgcttcctcgattgttccgacattcaagaatgcctgttcagggagataatcaacctcgccatccaaaatcatcttaaagcctttaatcgtatcttcgatcgtcaccattacgcccggtacacccgtaaactgctcggctacggcaaacggctgcgacaggaagcgctgcacacggcgggcacggttcacgaccgtcttgtcctcttccgacagttcttccataccaagtatggagataatatcctgtagttccttattacgctggagaatctgctttacctgttgcgctacatcgtaatgttcctgaccgacaatatgcggatcgaggatacgggatgtagaagccaatgggtctacagccgggtaaataccaagctctgtaatcttacggtcgagcacggtcgtcgcgtccaaatggctgaaagtagttgcaggagccgggtctgtcaagtcatcggcaggcacatatacagcctgtacagaagtaatagaacctttacgggtagaagtgatacgttcttgcatggcgcccatttccgtagccaatgtcggttggtaaccaacggcggaaggcatacgtcccaaaagagcggatacttccgaaccggcctgcgtaaaacggaaaatattatctataaagaacaggatatcacgcttctcgccttcttttccggcatcacggaatgattccgctaccgtcagtccggacaatgcaacggaagcacgtgcgcccggcggttcattcatctgaccgaataccaaagatacctgcgatttctccaactcgttataatcgacttttgaaagatcccagtgacctttctccataccttccttgaacgcttcaccatagcggataacgcccgattcgatcatctcgcgcagcaagtcattaccttcacgggtacgttcacctactccggcaaatacagaaaagccgttgtgctttttggctatgttattgataagttcctgaatcaatacagtttttcctacaccggccccgccaaacaaaccgatcttaccacctttggcatacggttcgagcaggtcgattaccttgatacctgtgaagagtacttcctgcacagttgtcaaatcttcaaacttaggggggtcgcggtgaatggaatatgcaccttcacggtcgagtcctttcataccatcaatagaatcaccgactacattcatcaatcgtcctttaatctgttcgccaatcggcattgtgatgggacctccggtgggatatacctttaagccgcgttgaagcccatcggtactgtccattgctacggtacgtaccgtattttcaccgatatgctgctgaacctctacaatcagtattttgccgtttggcctctttatctccaatgcatcatgaatgcttggtaacaccatttctgcatccgtaccttcaaagtacacatcgaccacagggccgatcacctgcgagatatgtccgataatctgtgacataagcaatcttttatttatattattcttctctattcctattgaaaaaatagtatgacaaggaacgtttcgcgttttacctgtttcactattataataacagctaagttcagcttttgttcaactattttctatatcagataaacttctgcccttagaaatagttaaataaacaactgcgcaaatgtagaaacaattctgtgtcattgttcttcctttttcattatttgttgttcgataacacttattagacctacaataactacaaattgaccaatttagacaaaatccaactacaaatcaataccaaaataagcttgaagataataattcatcaataaactaaaaacactcattcagtttcctatctctttgttaaaaatcaacggattagcaattttacaaaatagtggcaagaacaactagttttgtgctcgagcactataaattccatttttcggatattccttaataaagtttaaagatggggctctatttttcaattatccatttctccatattctgcatttccacactaaagttcacatcatatttataaaacaaaaatttaaatacgccgataatatgtatattatccattttttactgtaattttgcactactaatataaaacactcaaaatgatgaagaaaatactgttactcggttccggcgaactaggaaaagaatttgtaatttcagctcaacgtaaaggccagcacatcattgcttgcgactcctatgcaggagcaccggctatgcaagtggccgatgaatttgaaatattcgatatgctgaacggtgaagaattggaacgcgtagtgaagaagcatcgtccggacattatcgttccggagattgaggcaattcgcacagaacgtttatacgacttcgaaaaagaaggcattcaggtagttcccagtgctcgtgccgtgaacttcaccatgaaccgtaaagccattcgcgaccttgccgcccaagaactcggactgaaaacagccaaatacttctatgccaaaaccctggaagaactgaaagaagctgccgataaaatcggtttcccttgtgtcgttaaaccgttgatgtcttcttccggcaaaggacaatcgcttgtgaagagtgccgacgaactcgaacacgcctgggaatacggatgcagtggcagtcgtggcgatatccgtgagcttatcattgaagaatttatcaagttcgacagcgaaatcaccctgctcaccgttacccaaaagaacggtcctaccctcttctgccctcccatcggacacgtgcagaaaggtggcgattatcgtgaaagtttccagcccgcacatattgatcccgcccatttgaaagaagcggaagagatggccgaaaaagtaacccgtgcattgacaggcgcaggactttggggagttgagttcttcctaagccacgagaacggagtttatttctccgaactttctcctcgtccgcatgatactggtatggtgacattggcgggtacacaaaacctgaatgagttcgagctacatttacgtgccgtactcggtctgcctattcccggcatcaaacaagaacggataggcgcaagcgctgtgatcctttccccgattgccagccaggaacgcccgcaatatcgtggcatggaagaagtgacgaaagaagaagatacctacctccgcatattcggcaaaccgtttacccgcgtcaaccgccgcatgggagtagtgctttgctatgctccgctgaatgccgatttggatgccctgcgtaataaggccaagagaattgccgagaaagtagaggtttattaaaaccggaaggaaaataaggaatcatggagaattagaagaataatagagaaaataaaaagagggtgtcaacggataccctctttttattttctctataaaaaactaccgcctatcgtttcttgctcaaaaaacgctttgccaaatacttacgtaaaggttcgtcatagaatttcaagcttagataagctagtacaatacacaatgcataaacacataaagctacctgccaagtctcacccagcgtatagagttgattcttaatcagccatgcatagaacagatacatcaacggatagtgtatcacgtagatcggataagatatatctcccaagaacttacatatctgcgttgactgcttatccgtcgtacttcccgacgcacccagccacacaaggatagggaaagcaacgacaatgcaaaacgcttcatacacaccgttcgtacaaaccggctctgcaccctccaaataaggaacggaaaacagggcaatcaatgcaagggtacatatccagaaagcgcctttcactttcacaggtttgaagttgcgggataaaagcatacctaaagagaaagggaaaagcattctcaatgatccgcccagaaagttcacgccatccaacgtccatcctaccccaatgtttccataagtggagacatcaaagatggcgaacaacgtcaacgccacccccagcaataccaccatcacagccaacgccttattagacagacggcgaatgaataacgcataaaggatattgcctatatactcgaaaaacaacgaccagcacggcccgttcaacggaaacatctcgccattgccacgaacctcatagcccgcacccggcatggcaggaatgaaaaataccgtgcaaagaagagacaacatcaccatggatatggcaacgtgcgttccatcccattgcacagaaccctgaatgcagaacgtgatagctcccagaacagcccccagaacaaccataggatgaagacgtatcaaccggcgtttaaagaaatctttcatggtgagactcttaccccaacggtcatcgtaagcgtaaccgatcacaaaacccgaaaggataaaaaagaaatccacggctaaatatccgtgattcagagtttcaatagcactattaccggcaaaagcgaagccctcgaatacgtgataccatatcaccataagagctgccacaccgcgaagtccgtcaagaagttcataatgagccttggtatctgaaaaggctgaagcagaaatgttcgacatttgtttttctattagtaagttagtattttcagagggcaaagatacggtttgcgctacgaagtttctttgctctaaagcaaaaaagcccggctaatcgctattttttagcacgtacccggctaagggtatagatggaaatgcccagaaaggcagccacatatttcagtttcacccggtttatcagtccgggatagcgacggttgaactgttcgtaacgttctttgggcgaaagttgaaggcgctccacaaacatatggctaagctccttattcacattctgatgcaggattcttccccagttagctatgtcgatatatgtttcgtaaagggcattcagcttgtcgatgtggatgacgtagattttgcaatcggaaagcgtttcaacgctttctaccgatggttgctgatagtagagcgaatccatgccgaacgtaacgtcgccctcctgactgaaccacgtagtggtgtcctctccgttgtggtggaatacggaacgggtgataccctcttcaataaaataaaccagacggtctgtgacacctgactgaacgatacgggtatctttgggataataccttaattccatattcgcctgaagcgcctgaagtgcttcatcggaaaccggatagatttgctcgattttacgaatgatattttccatttgggggaatggtgtattgggagttaatgacgtactttaggatatttattattaaaacggaaaccaagaccgagcatcagataattaggggtctggaaattctggagattgtagccaatgtgaaggaatgaattccgggtgacattgatcttcaacgcaaagacctgatacagtccgcgtaaatcgccacgccccagcacattcgttcccaagccgacaccgatggtaaaaaacggcatcacgtattcggcccgtccggaaagtcccaacgcaagctgatgctggatgcccggcacaagaaatttacgacgggaggaaccgctgcctgcatcgtactccaccagcgcatcttcggtgtatacattggcactaccgtcatagacaccatccagcgaaatcccgaaacgcaacttatagttgaggttatacatcggagcaaagttgaatcccgctacaggatagctgcccggtgatgcaatctgtttctcgcctacatagacacctttgcggcgccacgagccgaacaacacaaggtcataactgatgtgtcgcggaaaacggggaacgtagggatgaaccaatgatttagtgaggtcggcttcttcccggttgaagttgtacaccagtccgattttcgctccggtggtgttgacacctgcattaggaaacttggtgttgccgttggagaaatgcgtgaagtctccgccgatgataaagtcgaaataacgggaaagcgaccagttaaggtagatacctgcgttgaggtaggcattcacccgtgagcctacggctccgttgtaggaattgtaatcgttgtcataaggctgccatctggcagagataccgaagttccattcgtaattgagtgaaaggcggggatggaaacgggcaatgcgtgcaccttgaaagacgtagaacgtcatcggatcacccaactgctttttatcgccaaaagtggtgaaggccaagccgaaaccttgataggctccgccatagatgcggtcagcacaggtgttgggacgatacttgaaagaatatttcagatgagcggcaaatgaactctggatgggtttccaccgttcgttctcaccttgcaggaaaggattggtggggaatacgtattgtggccgcgcctctatccccaaccggtgaatgaaaggttggtctgcctcctgcgcacaaagcgaagtaaaagggaaaagcaaggcggaacagattacaacgatttcccatccgggtatcttcactctcataaatagtctggttagtcttttctgaacggaagttacaaatggagcttctcaataaactgtgccacatgatagccgtccatcaatccatgatggcaagttacggaaacgggcatcatcagtctttctccgttgcggaaatactttccggtggagattttggggacactgtcgcccgagcgcatattagtggggtgcttcatgtcggtaaatgagagccacggcactgccgaataatgtatggcattgggatggaaagtacctcccttgttgagtcccgtagtggcttgcaaacgttccatctctgcttttgcccggcggataaagacgagttcgtccggatcgtattcaaaggcggcaaaagaaaaagtatggtcggcacgacttacagtggcttcgggcagaaggctgtcatagcacaccactttatcgccttcgatgcggtaacggaattcttctaccgcagcagcggcagtcgttatccggtggaggactaacagggaaaaggatatacctttggctttggcttcctgatacgtgcgcgtacagtctacctgaacggtcactccgaaaaacggatcgtcaaaagcactgaaatgttcgtaatgttctcttctgttccaagtagcaatatcgatgatcttctctatttgattcattctaaacactcttttttaagtttcaccacagagggcacagaggacactgagattttatagaaattttatagaactttttcaccggattaatgcaattgattccattgcttccggtcttaccttaccgaaaaaactcagtgtcctttgtgtcctctatgtgaataaattactgatgttgctcacgcaacaggtcgttcactgtttttaccgggttgaaagtggaaagcggcacttctacaaaaacagtgttccaatcactcatcgcaccattccacaaaccgggaagttcaagagctttcagctccttgccgtttttcgacttgtaagagataaagccggtcgccttgtctacgtatttcaccaaatcgaacttatgacctttataatcacgtacggcacataccaagtccaccggattgaagtgcgtacccttctcgaacatttcctttttctgcggatcgttcatgtcgatctgcgagctctcaagaatttgaagagagatcgttccgtcactgttgtatgccaggaacggaccgccacccggttcacccacattcttcaccattccgcaaacgcgcattggacggttcaatttgttcttcaagtaaatagcaagcactgaatcttcgagatctttcgtttccggattcttgcaaaaaagtttcttttgcaagaattgcagcatttccatcatctgttcgtgcgtatattttccgctgtcgagcagttcgagatattcgaatgcctgtttctgtaaggtaacgagtacaccggcaatcagttttttataagtaacggtgtccgctttcagtttatcgggaactacattgtcgatgttcttgatgaagataacatccgcatcgagatcgttcagattctcgatcaatgctccatgaccacccggacggaacaagagtttgccgttatcacggaacggctggttgtccatatcagcggcaatcgtatcggtactcggcttctgttcggagaaggtgatattataatccactccataacgtttggcaaactcaccggctttctcttccaccagtttcttgaaaagttcgcggtgttcggcagacacggtaaaatgtacgttcactttgccactctttccggctgcatacatggcgccttcagccaaatgttcctctaatggagtgcgtgcgccttcgggatatttatggaatttgagcagacctttcggcagtgcaccataattcaagccggcagtttcgagcaatgcggataccacagctttataattgccttcttccatcaacccggcgatattcttcccggtaatgcgtcggcaagctgcatcgagatcgtcataaaaagcaaaatccttgataccggcaaagaatgcttgttcaaacttggttgtcggtttgtcataatcagcagaaaggaactcgaataggttcttgaacatacgacttgcagcacccgaagccggtacgaacttcacaattgtcttatccgtgtttgtatatgcgtcccacgctaccagataagctttctgttcttctgcattgggagccaatatacctctttcaatggaagcagccgcatccagtttcagataagggaaacctgtctggaagcaagccagttgctctgctatttgcgcttccgtaatgcctttcttggcaagcaactctttgtcctgtgtcgttatcataatatctaattttattaattgatgcccaaaaatacaaaatgttatttacttcttgccgaataaccaataaaaaaagtaattttacatcgaattaacaagattgaatatgaacgacttttttacatcagaggaaaaaaaggagcttttttcactctatcggcacttgatgcaatctgccggagacagtatttcctggaaggattgccaaaaattaaagaatcatcttatcaaagctgcccaatataacgggctgcaacgcaataacttcgggatgaatcccgttatcaaagatctgcaaacggcagtcatcgtagccgaagaaatcggaatgaaaggttcgtgccttatcggtatcatgctgcacgaaattgtaaaaacgcatattctgtctatcgacgaggtaagcgtggaatacggagaggatgtggcaagtatcatcaagggattggtgaaaacgaacgagttgtatgcgaagagcccggcaatagagtcggagaatttccgtaaccttctgctctcctttgccgaagatatgcgtgtgatcctgattatgatagccgaccgtgtgaatgtaatgcgccaaatcaaggatacgggaaacgaggaagaccggataaaggtagccaacgaggctgcttatttgtatgctccgttggcacataagctagggctctataagctgaaatcggaattagaagacttatcgctgaaatacacacaacgggatacttattattttataaaggataagttgaacgagacgaaggcgtcacgcgacaagtatatcgctgcctttatcgaaccaatcaagaagaaagtgacggaagcgggcttgaagttcgacatcaagggacgtaccaaatccattcattcgatatggaacaagatacagaagcagaaaaccccgtttgagggtatttatgatctgttcgctatccgcattatcctggattcggaacctgacccggcaaaagaaaagcaggaatgctggcaggtatattctatcgtgacggatatgtatcagcctaacccgaagcgtctgcgcgactggctgtcgattccgaaaagcaacggttacgagtcattgcatatcaccgtaatgggaccggaagggaaatgggtggaagtgcagatacgtacccgccgcatggatgagattgccgaacggggactggccgcgcactggagatataaaggtatcaaaggagaaacgggcctggacgaatggctgacttcggtacgggaggcgttggagaatgcagacaacgactcaatgaagatgatggatcagttcaagatggatctttacgaagacgaggttttcgtgttcactcctaaaggggatttgttcaagttggcaaaaggggctacggtactcgactttgcctttcatatccatagcaaactgggatgcaaatgtatcggcgctaaagtaaacggcaaaaatgtccaactgaagcagaagttgaacagtggcgaccaggtggaaatcatgacttcaaatacccaaactccgaaacaggactggctgaacatcgtaactacctccaaagcccgcacgaagatacggcaggcgctcaaagaaatggtggcacgccaacatgactttgcaaaggaaacacttgaacgaaaattcaaaaaccgcaaactggaatatgatgaagcgaccatgatgcgcctcatcaagcgtttgggctttaaaaacgtgacggagttctatcaaaagatcgctgatggtgcgctggatgtaaacgagattctggacaaatatgtggagcagcagaaacgggacaacgacacgcgcgacgaaatagtctaccgcagtgctgaagggtacaacctgcaagcggtacaggaagagactacctccaaagaggatgtgctcgtaatcgaccagaatctaaaaggattagaattcaaattggcgaaatgttgtaaccctatctatggcgatgatgtattcggtttcgtaacggtaagcggcgggataaagattcaccgggcagactgcccgaacgccaatcagatgcgtgaacgttttggttatcgaattgtgaaagcccgttgggcaggcaaatcggaagggacacagtatcccattacgctgcgcgttgtagggcacgatgatatcggcattgtgacgaatattacttctatcatatctaaggaaaatggaatcacactacgctccataggaatcgattcaaacgatggactgttctccggtacactaacggtcatggttggagatacaggtcgcctggaagcgctaatcaaaaagctaagaaccataaaaggagtgaaacaagtgagccggaactaatttttttcaccacagattaacacagattctcacagattaaaaagacaagatacagtatagccgctccgaagggactgagttcaaaataaattgcattaatttcacaatcctgcattttgccttttctttctttaatttgtgaaaatctgtgttaatctgtggtgaagaattctatcgcactttcttccttttataataaggataagtcaccaaaacaaagaatatcaaagctatcgaagctgctatctgaccgatatgaagcattttgtctgtatccaactccatacagcaggcagctgcgatacctaaagaaatccccatttcactagccaataaatgagtggtatttgcagttccccgttgacaatgatgggatagcttcacgaacataatcaggaactccggcatgacaaaacctaatccaagtcccaggagcatggaagaaacgcctatcggagtactattcaacaatgatatggcaagaatctctagtccaagccccataattaccagtctcaatgttttttctttcaagaaaaagagacgagcaagcaagagagataccaagtaaccgccccccactcctacaaagaaaggcactgaaacacctgtgtttcccaatatggaatcattcaggaaaggatgtacaagaggcatcagcaatcccggaacaaacgtaatcagaatcatattaatagccggaatccaactacgcaacagtagaaaacggtcaaaagaataaagtctagtgacaatcggtgcacggaaaggtacatatattcccgatacgacaagaatccctaacactccggcaataacggatacatacagcaaattccggattggataactctgataaagccaaactccgagaacgatacctagaatcattcccaaacgggctacccacgaaaaactgacattccctgcgctacggagcgtagagttggtgatgtcgatagccaacgtgatactcgcagtagtggctacaccgaacgccaatccttgtacagtgcttagcaggataagttccgtaaggttcgtcacaaacgcatagcctaccgtcgctgccaccataagagcgaaagcatatatacatacgtgcttccgtttgtaagcgtccaccaaataggcatggaaaggaccgatcaggaacattcccaatgtaaaaaaaagaaagattactcctgtctgtgccaccggcactccgagacggtctgccatctcaacggagagtaccggaaataacacatacaaggacacaaacaacagcaaattagctatacatatccgtataaaatgtgctgtccacaatgtaactgccatatattgctttaatattgttccttctcgttggggaagtagcagttcttaacgtcggacacataacgactgatagcatcggtcatcactgtgtacaaatcggcataacgacgcaagaaacggggacggaaaccattattcatgcccaacatatcctgaatcaccaacacctggccatctacatgtccaccggcaccgataccaataataggtatagtcaactcaccggctacacgttctgcaagggttgcgggaatcttttcaagaacaatagcgaaacaacctgcttcttccagcaaatgagcgtcacgaatcaatttctccgcttcggcatcatctttggcgcgcacggtataggttccgtatttgttgatagactgcggcattaatcccaaatgtcccatcaccggaatacctgcaccgacaatgcgtctcaccgtatcgatgatttcttctccgccttccatcttcaaagcgtcagcatgactttctttcatgatgcggatagcggaagcaagaccttccatctcattgccttgataggaaccgaaaggcatatccaccaccaccatagcacgttttacaccacgcaccacagattttgcatgatagatcatctggtcaagcgtgataggcaatgtagtcacgttacctgccattacattggaagcggaatcgcctacaaggattacgtctatccccgcaccgtccacaatctgcgccatcgtgtaatcgtaggaagtaagcattgaaatcttttcgcctctctgtttcatttcaaccaagcgatgtgtcgtcacctttcttgtgtcatctgatatataaccagccatttctttctaattaaaaattataaattaaaaattaaaatcgaggcagcattggcgctacccgaaaatcgagggcaaagttataacatttaattcataacagagaaggaaatgcaaaaaatcctctcaatcccttgtcagagacagcaatttttcataactcattccggtaaagtcatccattatataatgtgcttttccggtaatggcttcgcgggaattggttgtagcgagaccgatcacggttgcaccggaagtcattcccgcctgcagaccatgaaaagaatcttcaaagacgtatgtgctttctggagtagctccaaatacttccatccctagaaggaaacaatcgggagcaggtttggaacgggcaaacatctctccggtaagaatacggtctaccattgccggaaactcgggatgagcattgtagacgttctgcatcttctcttcattagagctggttactacggctatcttcacaccatgacggcggagttcggcgataaaagcttctactccgggaatatattcataggacatctgtttctcaaaaacattgaggtctgccgtgattttctgccgggcttccggaagagctgaaaagtatttctcgtagatttgcgtcagcgtctgccctttgatacggcgtccgaaatcttcctcattcagatatttacgtccctgctcgtcccaaaagacggtgtactgtgtttccgtatccataataacaccgtcgaagtcgaacaacgctgcaattgttttcgttgtattcatatgaaactttctttttacctaaaacgttaaaccttgtgtatctatgcctgcaaagttccgaataatcatcgaatcagacaaataatttgtacctttgcaatgctaaaaaaaacgtaacggacgtttttatccaacaaatcgacttttatttatccaacgaatcgaccaacgtatgagcaagaacgacccacatatcttaggaaaggaaagcatcggcaagttactgctacaatattccattcctgccattatcggaatgacaattacttctatctacaacattattgacagtatcttcatcggacatggtgtgggggcaatggccattgcaggactggctatcagttttcctctgatgaatctcgtagtcgctttctgtacattggtatcggcaggcggatcaacccttgcctctatccgattgggacaaaaggatctgaaaggtgctacggaaattctgtcacacacgcttatgctttgtatcaccaattctgtcttcttcggaatattgtcctttatctttctcgatgatatcctgctgtttttcggtgccagtcacgacacacttccatacgcacgcagtttcatgcaggtaatcttgttgggaactcctattacttatacaatgataggattgaacaatgtgatgcgcgctaccgggtatccgaagaaagcaatgcttacatcgatggtgacggtagttaccaatatcatcctcgctcctatctttatcttccactttgaatggggaatgcggggagctgctacggcaacggttatttcacagctcatcggcatgatatgggtggtaagtcacttcatgcagaaagagagtacagtgcacttcgaaggaacaatctggaagatgaaagggagaatcgtagagagcattttcgctatcggcatgtcacccttcctaatgaatgtttgcgcttgcattattgtcattattatcaataatagtctacaggaacacggaggagatatggctatcggcgcgtatggtatcatcaaccggctgctgactctttacgtaatgattgtattaggattgacgatgggaatgcagccgattgtcggctataacttcggagcacagaaacttaatcgcgtcaaacagactttacgactgggaattctttcaggagtggttatcactagtagcggatttctgatttgcgaactattccctcatgccgtatcagctctcttcacagacagtgacgaattgattgatctggcagtagaagggcttcgcttggcagtacttatgttcccattcgtaggagcacagattgttatcggtaacttcttccaaagtatcggaaaagcgaaaataagcattttcttgtccctgacgcgacagttgctttatcttctgccctgcctgttgcttttcccgaattggtggggattgaaaggtatttggatcagtatgccggtgtcggatgcattagcctttatcacagcagtaatcagcttgatgatatatattaaaaaagtatcgaaacaacagccgatagctgaataaagaatagttactgttcattttctcatttttattgttcaatcagtcctaattagggatttatcaattgcccatccgattgtaaactctatatttgcataaagttttcaaaactacaaacgattaaactatgttgagaaagaatttatattggcttttattgtgcctgtttctcgcaggatgcggtatgatagattaccatccgtacgatgtccacatcagtggtgagacaaatgtcaatgcacataatatggaaaagatagaagcaaattgcaaaggcaaaactaaaatctgttttgctgtaatgggagattcacaacgctggtatgacgcaacggaagacttcgtaaaagagatcaataaacgggatgatattgactttgtaattcatggaggagatatgagtgattttggagtgaccaaagagtttctctggcaacgggatatcatgaacgggttaaaagtaccttatgtagcccttatcggaaatcatgattgtctgggaacaggagaagaaacttataaaacagtgttcggtcctaccaacttctcttttatagcaggcaacgtgaagttcgtctgtctcaatacaaacgctttagagtatgactactccgagcccattccaaacttcacctttatggaagaagagataacaaacagaagtgatgaatttgaaaaaagcgtagtatgtatgcacgcacgcccatttacaggcgtattcaatgataatgtggcaaaggtttttcagcactatgtcactcagtataagggcctacagttttgcacggctgcacatacccatcattttcgggatgacatactctttgatgatggaatacattatataaccagtgattgtatggattaccgtacttatctggtattcactatagctccggaaagcacctctgaaaatcctgattatgaattggttgaatactaaatatattttatggacgggagtattatcaatacttctctctatctccggtccggtctcggctacttacagaacagatacaattatcaacacgtataaagccgattcactgcgcttcatcatcaaggctgactcaattatcgccttccaaaccggagattctttatttacgattattaaagcagactccgtattgcccgctgcatcgaaaaaagttaaacatacccgttacgataaacgggttcaccgtttccgcagaaattgggaacgaatcattcctacccactctaagatacagtttgccggcaacatgggattactttcttttggtacgggatgggattacggaaaacataatcaatgggagactgatttattgcttggatttatcccgaagtattcttcaaaaaaggctaaaataaccatgactcttaaacaaaactacatgccgtggagtattaatataggaaaaggattctctacagaaccccttacttgtggcctatacatgaataccgtatttggggatcagttctgggtaaatgaaccggaccgctatccaaaaggttattatggtttttcaagcaaagtacgttttcacattttcatgggacaacgcctgacttacgatattgacccgcaacgcaggtttctagccaagtctgtaacatttttctatgagatcagtacttgtgatctttatgtggtcagtgctgctactaacagctatctgcgtcctcgcgattatctcagcttgtctttcggactaaagttccaatggttataaaccaaattacaatgacttataatgatgatacataccctcaccaacaatctgctatttcggggaattactccggaaaagctctctgccaacctggaagaagttaattttcacgcccgttcatataagaaaggggaaatcttcgcttttatgcaacacgcattagccgaattaacccgcaacgacatcacagtagaagaattagttcaattgactttggaaacaggcaaacatggaatatccgctatggcacaactggataaagccaatactagcagctacggtaaccccgaaaactgccgaacgacacggttatattgaccgctggctgtgcaaaataccgatacaatatgaagttcttgtcataagtattttatcctaaatattcatcaatcaggctcgaatcatgcagatcgcatcattcgagcctgttttcatattctcacaattagctatttccgagtatcagattgacttttttagacaatttaactaccatttttgacaaaaatacatcaaaacaggtatttcatttgttgctaaatatatgtaacttcgcacagtgaaaaataatgcggcattcttataactttataatatatagcatatgatatttacagcagaaaacaccttacttattggttctatcttacttttcgtcagcattgttgttggaaaaaccggataccgtttcggcgtacctactttgttactgttcctcgttgtaggaatggcattcggaagtgacggactcggtctccaattccataatgccaaagaagcccaatttatcggtatggttgccttgagtatcatccttttctcaggaggtatggacacgaaattcaaagaaatcaaacctattttaggaccgggtatcgtcttatccactgtcggagtattgctcacagctctttttacggggctcttcatttggtggctatccggtatgagttggacgaacatttatttgcctatcaccacttccctattgttggcctctaccatgtcttccacagattcggcttcggtcttcgctattctccgttcgcaaaagatgaatctgaagcacaacctacgtcctatgctggagttggaaagtggaagtaatgacccgatggcttatatgcttaccattgttctgatacagtttatccaatcagcgggtatgggagtcggcgctattgccgcttcttttatcattcagtttatcgtaggtgctgctgcaggatatatactcgggaaactggctatccgaatgctgaacaagcttaatatcgataaccaggcattatatcctatcctgctattggcattcgttttcttcactttctccatcaccgatttaatgaaaggtaatggatatctggctgtatacatcgccggtatgatggtaggtaataataaaattatgcaccgtaaggagatttatacgttcatggacgggcttacctggctgttccagatcattatgttcctctgcctgggattgctagtcaatcctcacgaaatgctagaagtagccgctgtctctctgctgatcggtatattcatgattcttatcggtcgcccgttaagcgtattcctctgcctgctcccattccggaaaatcacaatgaagtcacgcgtttttgtatcttgggtaggattacgcggcgcagttcctatcatctttgctacttatccggtagtggcaggagtagagggttcgaatattatattcaatatcgtattcttcattaccatcgtttcattggtcgtacaaggaaccacaatttcctttgtagcccgcatattacacctctccgaacctttggcaaagacaggaaacgatttcggggtggaactgcctgaggagattgactctgatctcagtgatatgactgtcacccgcgaaatgctggaagaggcagatacattgaaagatatgaacctgccaaaaggtacactagtcatgattgtgaaacgcaaagatgaattcctgatccctaacggaacattgaaattgcacgaaggagataagttgctgcttatttccgagaaatccaaagaagagtctgattctgaataacatttgaaaagaaatgtaaaattatatcagaattccttcgttaattaaccgtaaaacttgattttaaaattcggtttacgttaatgatatattaattttgcgcagttttaaactaaatgtgcaaaaacaaaatggaacaagaacatcagttcattgattatattgagcaaagtatcatcaaaaactgggacagagatgccctgaccgactataaaggaattaccctccaatataaggatgtagcacgtaaaattgctaaatttcacattgttttggaaagtgccggaatccagccgggagataaaatagcggtttgcggacgtaacagtgctcattgggcagttactttcttggccaccatcacttatggagctgtaattgttcctattttgcatgaattcaaagcagacaatattcataatatcgtcaaccattctgaagccaaactactttttgtaggcgatcaagcttgggagaacctgaatgaggatgcaatgcctttattagaaggtattgcatcattggcagatttctcctctttagtgtcgcgcaacgaaaagctcacatacgctttcgaacaccggaatgccatttatggacaacgttatccaaagaacttccgtcctgaacatatctgttaccgaaaagacagaccggaagaactggcaatcatcaattatacatccggcactacagggtattctaaaggagtaatgctcccctatcgcagtatctggtcaaatgttgcctactgttttgaaatgcttcccgttaaaccgggagatcatatcgtttccatgcttcctatgggacatgtatttggaatggtatacgacttcctatacggattctcggcaggcgcacacatctatttcctgacacgtatgccgtctcctaagattatctcccaatcgttttcggagataaaacccagagtcatctcctgcgtaccattgattgtagaaaagattataaaaaaggatattcttcccaaagtagacagcaaaatcggtaaactactgcttaaagtacccatcgtaaacgataagatcaaatcgttggcacgacaagctgctatggagatattcggcggtaattttgatgaaatcatcatcggcggcgctcctttcaatgctgaagtagaagccttcctcaagaaaataggtttcccctacaccatcgcttacggtatgacagaatgtggtccgatcatttgctccagccgctgggaaaacctgaaacttgcttcgtgcgggaaagcgacgacgcgaatggaagtaaaaatcgattccccggaccctaagactcatgcaggagaaatcatctgtaaaggagccaatcttatgttgggctattataaaaatcaagaagctactgcgcaaatcattgacgtaaatggctggttgcatacaggtgatctcggcactatagacgaagaagggaatgtaaccgttcgcggacgtagcaaaaacctgcttctcacctccagcggacagaatatctatcccgaagaaattgaaagcaagctgaacaacatgccgtatgttgccgaatcactgatcgtcctgcaacatgataagttggtagccttgatctacccggatttcgacgatgctttcgctcatggattgcagcagacggatattcagaaagtaatggagcaaaaccgtattgaattgaatcaacagcttcctaactattcccaaataagcaagattaaaatccattttgaagaatttgaaaagactgcgaaaaagtcaatcaaacgctttatgtatcaggaagcaaaagggtaatcaagaacctttgactaattaagagtacatacttataacaaataataagataagtattctcgcaaataaaaacggtggacagcctcaacactgtccaccgtttttttctaacctctaacaaactttattaaagtgcgataaatgaaatagcctgtccgcctccggcagccattcgtatgttcaacgtattttcagaagtaaccgtttgttccgttatccggtaatccgtaggatttgatttccaatccgcattctctccatccgcatagatgacagctttatactgtttgcccggttccaggaaatccagttttatttccagtgtacggggtttctcgttcgttgccgctcccaagaaatagttaccttttgctttacgcacgatggctacaaattcacccggttctcctgccaatgctttcgattcgtcgcaatccggatcgaaatcgcggaagaactggaaagccggatgtccctcataatgttcaatcatatcggaagccatttgcaaaggggaatacaaaatcacccagttagcaagctgtttcgccaatgtcgtgttcacacggctgtttcctttatcctgatcgttccatttccggcgacggggagaatcctttgtctgtaaaaacaaaatatcaaaagttccaggagtgtaatccatcggaccggataacaggcgggtaaacggcaacatcacatgatgggaaggaggattaccttcgctccatgcattccattccatacctcttgcaccttcacgagtcatcatgttaggccatgtacggcgaataccggtatctttaatcggctcgtgtgcatccactgtcattttgtgacgggcagctgcctccaccactttctgataatgattaaccccatactgtccatggtgcgaaagtccattcgggaaagcacccgcataaccggttttcaggatatgaataccatgttctgtgtaccattgcatggcatgatccatctgacgttcatagttggggatattgcctccagtctcatgatgtccgatgatttcaacacctttctctttggcataatgcacaatctcgtcaatgtcaaaatcagcatacggtttcgtaaagtcaaaattctgcataccaccccagctttcccatccttcgttccatccctcaaacaaaacaccctctatatcattggcggcagcgaaatcaatatacttcttggcattggcggtagtggctccatgacgttcgtccatcttccaagtctccacacccaaatgcattccccaccacactccgacatatttcaagggacgaatccaatcggtagtttccagtacacaaggttcgttcagattcaaaatcaaggaagaattaatcagcccgacagcttccggagcaatctggatggtacgccaggaagtagtaaaatgattgcctttacgcactttgataccatccggccaaggagttagctcagctttcaatgtatatcttccggtctgcttcaaagtcatttcggagaaatcatacaaagccgcttcatgaatactgccataaataccgtccgccgttttgaatgtgaaaggagtattggcagtttccacttcggaaataggctgttgcttatatagtaattcataagtctccgcactggcgggaattgaccatgaagttccgtcctgacgaaaacgaaaagttgtcagttcatcggttatcatcaacgaatccactgcgggaacactgtactcataacggaaccctactccatcatcaaacacacggaaacgaagtgtcaactccacctgatctttattggtcaggctcaccgccatctcattataatgatccctgttctttttattctctccccaagcctgtgtccaaatctcatccttatgatcgaaagtcgtactctttatctgaaagccttctcctaaagcaactccattcccttctgtaaaccccattgcagagttctcaatcaatagtgaatcgcctaccgagacattataaaacggagtaccgttctcatccagcgtgaaagacatcttaatatggccgtccggtgatttgacttctgttttcggactgctacacgcataacataccagcatacacagaaaagctccgattgcataatttattttcatagcactatatctgttatttatatatagtacaattcagaagagaaaaacacttatataatcaaggtgaatttctttctaataaggagaatctctttcttcggtatgatttctattcttatttatgcaacagaatatcagttcctggaacaatctttcccatcgaccacacacatcgcacattcagttccttatcaagaatcacaatatcagcatccttaccctttgccaacgtccctttccggtcatccactccgatcaaacgggcaggagtctcggaagccatgcgcacggcatcttccaaaggtatgttcgctttcttcaccatagtacgcaccaagatatccatcgtagccaagctaccggccagtgctgaatggtctgccatcttacacactccatcctctattatgtagcgtggatcaataggcacagtaccgtcacaagcagcataagccagagcatccgtgacaaggcaagtattttctacccctttcaatttataaactaatttcaagatagtagccggcaagtgtatgccgtccgcaatgacttccaccgtcattccttctgtcagatatacactttctaccgtaccttcgtacttatattcacgacgtttatgaaaacccggcatagcattatagaaatgagcggcatgagagaatcccactgcatatgcagcctttatctcatcatattcggcttcggtatgagtcaccgccgtcataatcccctttgaacgggtgtatctggcaaaatcatgcgcaccgggcaactccgggctgatatcccaacgtctgatgcaagacgtatgttccagcaaaggaatatattcattttcatccggtgttttcagaaatccgtcatattgtgttcccgccatcttcgggttcagataaggcccctcgatatgcagaccgagaatcggagagtctttctccttcatcagattctcgcatacatcgaccgcctgataaagcctttcgaaggaagtagacgacaaagtaggaaacataccggtagctccatgtttcaagtgtgccatagtagcagcacggaaagcctcctccgtcgtttccgtaaaatcatgaccaccacctccgtgcgcatgcatactcacgaatcccggtacgattgtcatcccacgagcatcaatcaccgttgcaccgataaccgccaaatcactgttggtcacctctaatatttttccatcacaaatcaatacggaaccgtctttcaaccatccttgcggagtcaatatccgtccgttaattatctgagtcaacatagtcttcttatttataggatttaaaacagtttattggttccctctaccaattgtcccattgcccacacggctcttacattcaagtccttgtccaaagcaatgatatcggcatccttaccacgttcgagcgtgcccttacgatccagcactcccatgatacgggcaggcgtttcagaaatcattctaatcacatccgccaatgggatttccgctttctgcaccatcgtacgtatcagacgatccatcgtcgccacacttcccgccaaagcggaacggtcggctagtttacaaaccccgtcttcgataatgacacgggggtcaaaagccgtttgactgtcgctcgccgcacaagctaacgcatccgttatcagacaagtacgctccactcctttgatcttgtaaacaaggcgcagaatcgtcggcggcacgtggataccatcggccactacttccactgtcatatcgtcaatcagataaatactctccaccgtaccttcatatttgtactctttccgtttatggaatcccggcatggcattatagaaatgagtagcatgggtatatccggcttcgtatgccgtctgtatatcttcaaactcagcctgcgtatgacctactgaagccagcacccctttcgccgtgatatatttgccgaactgcatggctccgggaagttccggcgcagcgtcccaacgcttgatgcagtgtgtttcctccaacaagggaatatattcttccgggtccggatctttgatattctccggaatctgtccgcccgccattgccatattgaaataatggccttcaagatgaagtccgagtacaggactgtccggttccgccatcattttctcagtggtctccgcagcagcacggatcatcggaatggtagaagaagaaagagtaggaaaaatactggtagtaccatgctgcatgtgggctttgattgccgtacggaaagcgtcttccgtaccttccataaagtctcttccaccgccaccgtgaacgtggatttccacgccgcccggaacgatatacattcctttggcatcaatcagtttggctccgataatggcaaggtcacaattggttacttccagaattttattgtcgcgaataagaactgacccatcctttagccagccttgtggtgtcaggatgcgtgcattaatgatttgtgttaacatatcatttttattaaattaattataggtctacataaaccgatgactctctttcggggggaagtacatcgatttttcacttgcaaaattacgcttttctatccaaattattgataaaatcgtccgctaaacatccaataaggtacaaaaaaagaggttaccagtcttattgaccgacaacctctaaatttatctggagcggaaaacgagactcgaactcgcgaccctaaccttggcaaggttatgctctaccaactgagctatttccgcattttttcaacgggtgcaaagataagtagtttacttgtttctgccaaatcttttcggaggaaagtttaaaaaactatcctccgaaagttcattttatcttccaagcagtgctttctctgctctatccatcccgcaaaagttgaatccatcgaccacttgctgcatcaatgcagagatctctgtattacacaaattgcctatacttccttcatgtgtatgatgtacttccttactatgcgagaatttacctgcttcaatatccagaccgacctttttgtatgcatcgcggaaaggcataccttcgcgtgccaaacggttcacttcttccacactgaaaatgagcagatatttgtcatcatccaagatatgttcatttaccttaatctcgttcatgatgtaagttgtcatctgcaaacagtctttcaattcctggaaagccggaagaaagacctcttttataatctgcaagtcacggaaataaccggaaggcagattgttggcaatcatcatgatttgttggggaagcgattgcaacttattacatttggcacgtgtcaattcaaacacgtccggattcttcttatgaggcataatactggaacccgtagtacaatcatcgggcaacttcacaaatccgaagttctggctgttgaacatacaagcgtcaaaagctaatttggagattgttccggcaatcgtggccaacgcaaacgcaacattacgttccatcttgccacgtcccatctgggcatataccacattataattcatagagtcaaaaccgagcaactcagttgtcatcgtccggttcaacggaaacgaagaaccatatccggcagcagaacctaacggattacggttgcacatcttaaatgcagcctgcagaaacagcatatcatccaccaggctttcggcgtaagcaccgaaccatagtccgaaagaagagggcatggcaatctgcagatgtgtatatcccggcattaaaacatttttataacgttcgctctggcaaatcaatacatggaaaagctgctctaccgcttcggctatttctctgacttgcgtgcgggtaaagagtttaagatccaacagtacctggtcgttacgcgaacggccgctatgaattttctttcctatatctcccaaacgacgagtcagcatcaactccacctgcgaatgtacgtcttccacaccatcttctatcacgaattcacctttctccactgaagcataaatatttttcagttcagccagcaactgctccagttcttctttcgtcagcaaaccgatactttcgagcattgtgatgtgcgccatagagccgagcacatcatgcttggccagataaagatccatttcacgatcgcgtcccaccgtaaagcgttcgatgtccttatttacctgcacggatttctcccaaagtttctgtgccataccaattaataattgaattaataatttataatcgacagcatttcaaccatcttctccaaaccttcctggaggggcttctgcaccatcgctttcataaacggattgatatccatcccgatagtaacctttactttgcattcttcctcaccggtcgccactaattgaatccacatattaaaaggaagcggtgagttggttgtctccaacttcacacatttagaaggttcacgttcaacgatttgcagtgtcagctttccaacaggagaaacactaaaactcaacgtatccgaatcaaaactcaaatcctgtaccttatcttgcggcaaacggtctttaatggcttccagattactcaaatccgaaagcttgttatacactcgttcctgactgtaaggtatcaccttgacactactctcaaatttagtcataatattctatttgtataaaaacaaaaaaagaactatccgggcaaatattgtccgaagagttcttttactgacatatatttaatcaaaaaaagtcttatttaccagcatcccaatgagcagggtctttacgccattcgttcagtgtctggatatcttctttttcaatgtaacctgtacgaagagcaacatcaagcacggcctcataattggtcaatgtcaccaaagtcactttagcgttcttgaatgcttcttcagcaaccgggaagccatacgtataagccgcaaccataccaattacttcacagccatcgcgacgaatcgcctctacagccttcaaactactgccaccggtagatatcaaatcttctattactactactttcatacccggacgaagttcaccttcgattaggttctccaatccatggtctttcggggtagaacgaacatatacgaacggtaaattcaatgcatcagcaaccaaagctccttgaggaatagcaccagtcgccacacctgcaatcgcatccacctgtccgaatcgttccaatatcagacgtgtaatttcaatcttcacaaaattacgaagagaaggataggacagagttttacggttgtcacagtaaaagggggatttccatccagaagcccaagtgaaagggttagcaggttgaagtttaatagctttaatcttcaacagtttctccgcaaatagtctctctaagtttttcataactaaactaactattaattatttgccgcaaaagtacagaaatagaacgagaataaaaagaagaatccgtttattttttactccacctgctcctcttcatcgggaacatcgatacaacgcctgatatctttcagttcaaacccacgactcatagcgaaccgcatcagctttccattcagttcatattcatcctgcgcatggacactttttttcttggaggccagcagtccacgaaggacagcaagatattcctcctcatcaatctcattcagataacgccatgctacgtcggatggaatcttcttcatatagagtccttgcgctattttcatcttcccccacttggcgaaacggaatttatcattcacaaaagccctgcagaaacgctcgtcatcaatgaacttttccgattccagccggtcaagaatacgcgctatggtatcataggctatcccccaacgttgtaacttctcatttatttctgcccggcaatgctcggcagtagagcaataggaggctacacgacttaaagcctcttcgtctgttaattgtgcactcatcggttagctgtaactattctatcttttccaaatatgtcttttataacacgaatatcacgatattggttcatttcaagcatatatgctatttcccggccaaacgcccggttgatttcaaaataaagttttccttccggcagaagcaactcacgccccagagtggcaatcctgcgataaaaccgcaacgggtcgtcatcgggaacaaacaaagccagtgccggttcccaatcgagcacattagcttccatttcatctttctccgcctcagtgacataaggagggttgcttacaatgacatcaaacgacggtgacttttcccaatcgtcagataaaacatccctttgccgaaacagcactcgggattccagttcttcgttgtttgtccgagctatcgctaatgcctcttccgaaatatcccaagcttccacgtcggcatccggaagtctcttatccagagaaattgcaatgcatccgcttcccgtacctatatctaataggtgatgtgctcccggattctcattgacgacccaatctaccaactccgcagtttccggacggggaatcagcacccccggagctaccttgaacttcctcccaccaaataccgcaaagccgcgaatgtactgtatcggctcatttttctgtaaacggaatataatgttttctaattcacgctctttgcattcggataaaatcatatctttgcccaagtaaatatcgagcggatcgaacccgagcatatcgcaacaaatcatcatcgtaagggctttaagctcttccggcggatagatatcacgcagagattggcgaatgcgggtggagatacgattcatacatttacagttttggagtgcaaaagtaagaataatatagcgaagagtaccaaaatggaagaagaaaaatacatgagacgttgtattgagctcgcaaagaacgggttatgcaacgtagctcccaatccgatggtaggggctgttatcgtatgcgacgggcgcattatcggtgaaggttatcatgtccgttgcggagaagcgcatgccgaagtcaatgcaatccgctccgtcaaggatgagtctttattgaaacgttcgacaatctatgtcagcctggagccttgttcccactatggtaaaacacctccctgtgcagacttgatcatcgaaaaacagattccgcgtatcgtcattggttgccgggatcccttttccaaagtagccggacgagggattcagaaactacagaatgccggacgggaagttatagtcggtgtgctggaagaagaatgcctgcatctgatccgccgttttatcactttcaacacgctccgccgaccttttattactcttaagtgggctgaatcggccgaccaattcattgacatagagcgaattgatgggaatcctgtccttctctcctcccctcttacgtcaatgttggtacataaaaaaagggcggagaatacagctattatggtaggaagacggacagccttgctggataatccctctctgacggtacgcaactggtatggacgtaaccctatacgtattgttttagaccgcaacctttctcttccgaatgatttgcaaatattcaacggagaggtcccgacattagttttcacagagaaagaacatccggaagaaaagagcgtcagctatataactattgattttggtcataaccctctgaagctgattatggaagagttatatcaacgaaatatacaatcattgttggtagaaggcggaagccaactgctgcaatcattcattgacaatgaattatgggatgaagcctatatagagaagtgccccaagcggttatactccggtgttaaatcacctgaaataagcaataattttagttactcgaccaaagaacactttggaagacaaatttggtattatgttcatcggatttagctaaaatagtcctattcagggagttttacgtcgataaaaacagtgttattatctataattttatataaaacttacctgtaatgttcattatcgggaaaaatgtttctatttttgcaacttgtaaataaacacaatctttcaaatgagaataaagtttttatcattcattgcgagttttttcatggtgtcattcgttataacgtcatgccttgatgacgataatgacatagaatatagcccagatgcaactatacatgcatttgaacttgatacaatatatgggatatcctacaagttcactattgaccaacaaaatggccttatctataatcaggattcactccctgttcacgcagat

SEQ ID NO: 11802 - DNA, 1317 bp, Unknown
  gut microbiota DNA sequence
cataagtctaaaagcttccatttacggtagggcttttcagtggttcttgtccaaaactccttattacataagactttgtagtgcggagactaaagatttgcagtacgaaaaacaagatacgtttatgcaaccgagaagtggtcaccttgcaaggtgactatcatcaccttataaagggacaaatggcactttatagtgtgacaaatggcaccttataaggcaaccatttctttttagcaaagcgcaaatctataaagatataaaatttatctacaaaaagcaagagcaggtacaatttaatcggatattaattacacattaagtgatattttatcctaatgtttaccgtcgcctcctatctttatataaaattaatattaactcataatatcatgaacagaattagcaaagcatttttagcttgtacatgcggactcttctgcctaggcatacaggcgcaaaaccatacgacatggacaaatgatttctctaatactggagaaacactgaaagtggtaggtcgaggaacatgcagcattgccgataatgtattccgttccaaaggctcctacgctctcttcggtaatcccgaatggacaaattactcgttttccttcaaagcccgtgcccctgaagatgccgaacaagtgcagatatgggcgagcttccgtaattacaaccgattcgaccgatatgtagtaggtatcaaaggagggttgcaagacgacctttacctgatgcgtaccggatatatgggaacagatgaatttatgggagtccgcccgttaggattccatcctgtaccgggagaatggtatcgcatgaaagtagaagtgtgcggcaaccgtattcgagtattccttaatgacgagaagcatccccgcattgacctgatagacaaaaatgcgaacctcgttccatcgggcgaagttgctttaggcggaggatggatagagactgaatttgacgatctcgtcgtaaccccgatgacagacgacgccttgaaaaacgtaaaaatagcggaatatctgaaaaaagcgactccgacagagaaagagaacaaacgccgtcaggaacgggctgactacacacctgtaaaactagcggcactcaccggaagccgcactgacatcacgctggatggcaactggcttttcatgccggactaccaactagacaataaagataaagccatttccccaaaaacggacgatcaggactggcacatcatgtccgtaccgaacttttggactcccatccgtatctggctacacggtgaaacaatgccctcacctaccggagcgcaagctaagggcg

SEQ ID NO: 11803 - DNA, 14113 bp, Unknown
  gut microbiota DNA sequence
agaaagaggaacatttactgaatatccccaatttggaggttcctggcggattcgaaccgccgtacacggttttgcagaccgctgactaagccactcatccaaggaaccgtcttttctcgtttgcggttgcaaaggtagtacaaattttgaaactaccaactatccacagcaatttttctttgtactttttttctttacaccgcactcctttcttttcttttccatcatatcctttagttcacagccacttacacaactgtcacaaggatttccactatctcgcgtacgacgaaaaaaagtataaataccatataccaatcggacaatacagagtacaaccagtacccccactacccattcttgccaattattcatacaaacaaccctccaatctgataaacagtaaatgacacaatccatgccaataccgtagtatagcaagctgcaaaaagcgcccatttccaacttccggattcctgtttgatagctgccaatgccgcaatacatggaaagtaaatcaaaacaaacagcatatagcagaatgcaaccaacggtgttatcggaatccgttcagccaaactaacctcatcagcctccggatcatccacatataaaacccccaaagtacttaccaccaactctttcgctcctacccccgaaatcagaccgatacccagtttccaatcaaaccccataggcttaatcaccggttctatcgcatgcccaagctgacctatatatgaattttcctgctgttcggctaccgtcttatacgcatcatgattcggatagtatcccagaaaccaaatgataatagaagcaatcataataattccccccatctttttcaaatattgcgcccctttctcccatgtatgacgaaagatagattttgctgtcggcatccggtacggaggaagctccatcacaaacggagtatcgtcccctttcaccaaaaacttactaaacagtctcgctaacaagaccgccaaaaatatacctattgcataaatactcaacaagaccagactcgcattgttcggaaaaaatgctcctaccaataataaatagataggcagacgagcactacaagacatcaacggattaaccaacatagtaataagccgactttttcgattctctatcgtacgggaagccataatagcgggcacgttacatccgaaccccataatgagcggaataaacgatttgccatgcagccccattttatgcatgatcttatccattataaatgcagcacgtgccatatatccggagtcctccatcaacgatatacagaaatacagaatcaagatgttcggcagaaaaacaatcacacctcctactccgccaacgataccgtcaaccagcatatctttcaatggcccttcagacatattattacgaatcaaatcaccaatctgctcaaccagccattcaatccccatcataggatattcgccgagtacaaatgtcccttcaaacatcaaatacataaacaggaagaaaataggatacccccaaatacggtgagtaacgatagcatccaacactttggtcgtctgcgcctgttctaaatgattatcagtaaacgtttctttcaatgcaccactgatgaaaccgtatttcgcatctgttatggcagactcacaatcttcattcatcgtgctctgtatgcgtttcaccatcttatcacgaataccgacaatgctttcagcattcggcaaagtacgtacaaaacgttctatatccggatcattctccaataacttaatagaaagaaaacgagtagaatatttatgacgaatgtattcattctttgatacttcctctttcacagcctcaatagccctctccaaatcgggaccatgattaatatgaatatggcgaaagacacgtccggtcttccgatgttcccgcacataatcttcgagatgttcctcttcatggtgtttccggtcttccaaagaatcatgccattcagtcaaatctttgagaacttccggattcatatttccgtgtttatcaaagaagtcgactccctcataaagatttataacgacatgaaacaaggtatccaatccacgattttttttactgacagtaggcaccataggcactccgaacaatttactcaataaacgatagtccaatgtatttccactgttctccaattcatcataaatattcaaagccacgaccatgcggacattcatatcaatcaattgagtagtcagatataaattccgttccaaattggaagagtccaccacattaataatgacatccggagtttcgtcgataatatggcgacgaacataaatttcttcgggtgtataagcagacaaagagtatgttcccggtaaatcaacgatccggaaatgataaccttcgaaatcgaaatacccttctttagcgtccacggtcacaccactataatttcccacatgctcgtgagcaccggaagctaaattaaataaagaagtcttgccactgtttggattgccgaccaaagcgacattaatggtacggcgtttacccagcgctagccgtttcatgtcttcttcttttacagaaatatcctcaggcagtccctcgtggtaaatagtctcttcagccaatttcttagcctcttcttcactgactacctcaatcatttcggcttcctgacgacgaagagaaatttcataacctagaactttatatttaatgggatctcttagtggagcattcaacagcacttcaaccgtttttcccttgatgaagcccatctccacgatacgtttacgaaaaccaccgtgccccaatactttaacgatgacacctttctcgcctgtttttaattcggacaaacgcataactttcaaaattttcggcaaagataattcataactttggagcacgcaaattatttagattgtttttaaataacagatatttcatccacaaaatatccatctgccattaaaaacaagcgacattcacttgagatacttcaataaaccattatctttgcaaaatatgatacaacatcgggttacacaatatatagaaaaagaaggtttattctcttccgaaaataaaattctggtggcattgagcggtggtgccgactcagttgcattgttatgcatcctgcatacagcaggttaccgttgtgaagctgcgcattgtaatttccacctgcgtggtgaagaatcaaatcgagacgagcagttcgtccgccaattatgcgaaaaatataaaataaacctgcataccattgattttgatactacccgatacgcaaccgaaaaacatatttccatcgaaatgggcgcccgtgaactacgttataattggtttgaaaaaacgagaaaggattgccaggcggatgtcatcgctgtcgcccatcatcaagatgacagcgtagaaacaatattgctgaacctcatcagaggaacaggaatcaccggtttattaggaatccgtccccgtaacggagtagtcgtacgccctttactttgtattaatagggaagaaatcattcactaccttcaaagtatccaacaggaatacgtaaccgacagcacgaatctggaagatgaatacacccgcaataaaatacgcctcaaccttcttccactcatgcagacaatcaatccgtccgtcaaaaacaacttgatagaaaccagcaattatttaaatgatgtagccactctatataataaatatatagaagaaactaagacaaaaatcattacagaagaaggtatacggatcagttctctgctaaaagagccagcccccgaagccatcctttttgaggtgttgcatccattaggcttcaactctacacaaataaaagacatcgccagttcgctccacagtcaaccgggaaagcaattttgctgtaaagaatggagaataataaaagatagagaattcttgttattggaagccgttcaatctgtaagcaaagcgactcctccttttcagctgatcagagaagaacaagaatatacttccgactttcagattccacaagagaaacaaacagcctgtttcgatgcagacaaactgaatgaagaaatctgttgccggaaatggcagaccggtgacacctttgtgcccttcggaatgaaaggaaagaaaaaaataagcgattatctgaccgaccgcaagttctctatcagccaaaaggaacgtcaatgggtactctgctgcggagaacgcatcgcatggttgataggtgaacgaacagataaccgctttcgtattgacgaaacaactaaacgggtgattatctatagaatggtctgaggaagtttctgttttttgaaacagtcagacagcaaagctgcaaaaggagtatcatagattcgcgctttcttagtacaggctttcacacaggcacaacatttgatacatttagtctcatccgtatgcaattcatctcctttcgttatagctcctaccggacaacgcgtcacgcacaatccacaatgagtacacatactctcattttctacccacggagtacggggaagaggcataccgcttttgcgcaacttaataacttttctcaaaaaacggaacaaagggaaaaaaggctgactcggacgtgtgatggcgcgcacatctaccggataaagtttatccatattctcggcagcctgcaccttttccattattttttttccaaaatccgcagcaaaagccaaatcaaaattatcaggacgtccggctgagatcggatgcttgtcagtactatacgaatgctcccctataaaagtagccccggcaatcaccttcattccatgaggtgtggcaaaagcgtccaactccatcaaagccttttcataagcccgatttccatagaccgccaccaacaccgtaggagcatccaaaccacgaatgttccgtaaacgttccatcgccaaaggagcgacatgccctccatatacaggaactaccacaatggctaatgcagatgtaggaatcacaacttcctccgctgcttgctgagttacatttataggaaaaatattttttatacctgccccttgaacaatcgcttccgctatttgtttagaagtatgggtgggcgaaaaataaattaaataagcttcatttactgtcatactattttcttttatctagcaaagatacacttttacgtggaaaaaaacggttgattgtatatgaatccaaaaaaaattattatctttgccccgttgaaacattctacgattcaacatatacatccctaattcataataaagaacaaacatatatgctcacatatctatggccatgagctatagcaatactgtccataattcagcaaaaaagaaatattaataacttaccatactatatgtataacattatccaattaaacgacaaagatctgtcggaacttcaaattattgccaaagaactaggcataaaaaaaacagactcatacaagaaagaagaccttgtttacaaaatactcgatgaacaagctattgtaggagccaccaagaaagtagccgcagacaaactcaaggaagaacgcaaagaagaaaagaaaaagcgctcacgtgtaactccggccaaaaaagaggacaaagtggtttccgcaacaaagaccggagaagttacaaaaacaaaagaagctgctactgcaaaagcacagcaaactcccaaagaagaaacaacaaacaaagaaaaagaaactcccgccgttgaaaccaaagcagaaaacgctgttactcctaaacgtaaagtaggccgtccgcgcaaaaattcagatacaactgataaaaaagaagttgaagaaacgaagcaagtagcttccaatagtgtcgaagcgaagcctgtagttgcggagaaaacacccgaaacaacggaaaaaacagctccggcacagcaaccatctgccgagaagaaagaaaagcctagcaaacccactgtggaaaaagataaacccgctgcagaaaaaactgtagaaaaaaaggtggttgccaaaccgcaaaagaaagctgaaccggttattgacgaagaaagtaatatcctgaccggtgctgacgatgatgatttcattccaattgaagatctgccgtctgaaaagattgaacttccgacagaactcttcggtaaatttgaagcaacaaagacagagcctgtgcaatcagctcccgaacaagtagccccacctcagcagcaacagtctcaatctcaacaacaacgtccacgcattgtccgtccacgcgacaacaataatgcaaacaataacgctaataataatttccagcgtaacaacaaccaaaatcaaggccaaaatcagaatcagcaccaacaacgcttgccaatgccacgcgctacgcagcaaaacaatgcgagcgaaaaccttccggcacagcaaccgcaagagcgtaaagtgattgagcgtgagaaaccttacgaatttgatgacatcctaaacggagtaggagttttggaaattatgcaggacggatacggtttcctccgttcgtccgattacaattatctttcctctccggatgacatctatgtatcgcaatctcaaatcaaattgtttggcttgaaaacaggcgacgtagtagaaggagtgattcgtccgcctaaggaaggagaaaaatattttccgctagtaaaagtctcgaaaatcaacggacgtgacgctgctttcgttcgcgaccgtgttccttttgaacacttaacccctctctttccggatgaaaagttcaaactctgcaaaggcggttattctgattctatgtctgcccgtgtagtagatcttttcgctccgatcggtaaaggtcaacgtgcactgatcgttgctcagcctaagacaggtaagactatcttaatgaaagacatcgccaacgcaatcgcagccaatcatcccgaagtatacatgattatgttgcttattgacgaacgtccagaggaggtgaccgacatggcacgcagcgtaaacgcggaagttatcgcttccactttcgacgagccggcagaacgtcacgtgaaaatcgcgggtatcgtattggaaaaagcaaaacgtttggtagaatgcggtcatgacgtagtaatcttcttagactctatcacccgcctggcacgtgcatacaatactgtctctcctgcatcaggtaaagtactttccggtggtgttgatgcaaatgcacttcacaaaccgaaacgtttcttcggagctgcacgtaacatcgaaaacggtggttcactgactatcattgctaccgccctgattgacaccggttctaagatggatgaagttatcttcgaagaatttaaaggtacaggtaacatggaattgcagcttgaccgcaacctgtctaacaaacgtatcttcccagctgtcaacatcactgcatccagcactcgtcgcgacgacttgttacttgacaaaacaactcttgaccgtatgtggatattacgtaaataccttgcagatatgaatccgattgaagctatggattttgtaaaagaccgtttggaaaaaaccagagataacgatgaattccttatgagtatgaacagctaaaaaggaaatcaacaaatataattcttaagaatgcagattaacacagattgccgcagattaattcttattatctgttccagtcttgtgttaatctgcattttaattacagcctattctacttctctcctcctcggcactattccatttttgtacaaattactatcactgacgtccaaaacaactcccctagtcttttctgcattctcttttttgctacttttgcttccaaatcaattattacttaattctaaccagaaatgaaaacgatttatccattcatgggattagccttatgtagcgtaacaactcaggcgcaagaaaagcccaatttcctgattatccaatgcgaccatttaacacaacgtgtcgtaggagcttacggacaaacacaaggttgcaccctccctatggacgaagttgcttccagaggagtgatcttctccaatgcctatgtgggctgtcccctcagccaaccttcacgtgcagcgttatggagtggtatgatgcctcacgaaacaaatgtacgctccaattccagtgaacctatcaacacacgcataccagaaaacataccgacattaggaagccttttctccgaaaacggttatgatgcagtacactttggaaagactcacgacatgggttcactaagaggttttaaacataaagaaccggtagccaagccatttaccgatccggaatttccagtcaacaacgatagcttcctggatgtaggaacttgtgaagatgcagtagcctatttaagtaatcctccccaaaagccctttatttgcattgccgatttccaaaatccacacaacatatgcggatttgtaggagcaaacgaaggagtacacaccgatcgtcctattagtggtactctccccgaactacctgccaatttcgacgtagaagattggaacaacatacctactccagtacaatatatttgttgcagccatcgacgaatgacacaagcctcacattggagtgaagaaaactaccgtcattacattgccgctttccaacattatacaaaaatggtatccaagcaagtagacagcgttttaaaagcactctattccacacctgccggtaagaatactattatagtcatcttagccgatcacggtgacggaatggcctcccaccgtatggtaactaaacacatcagtttctacgatgaaatgacaaatgttccgtttatctttgcaggacccggtatcaaacaccagaagaagcccgtagaccatcttctcacacaaccgacactcgacctcttgcctaccctttgtgatttagcaggaattcccgtcccagccgaaaaagctggaatcagccttgccccgacattaaagggaaaaaagcagatgaaaactcatccgtatgtagtatccgaatggcacagcgaatatgaatatatcactactcccggacgcatggtacgtggaccaagatacaaatacacccactatttggaaggtaacggagaagaactttacgacatgaagaaagatccgggagaacgtcaaaatctcgctaaagatcctaaatatgtcaaaattcttacagaacaccgtgcaatgctcaatgactatatcaaacatagcaaagatgattaccgtactctgaaagtggacgctgacccacgttgcagaaaacatgctccaggttatcccaatcacgaaggtctcggagcacgcgaaattctcaaaaataaaataaaataataaaaagagcgaggattgttttgtaatcttcgctctttttacttcttttgcagatgaactaacgggcaagcagctaattattaagtgaataagcacaaacatcatattatagcagtagctgtagccatgcttatatctgttactctatatgcggcgcacaccaaccaggcacgcctgtctctgctaaaaccgttaatcaaatacaatacaccattcagtaccgagatttctaccgacagtatcactgtatgggagaaattactggaacccgaattagaagaacaacaacattattcacttttattccaactaaagctactgactgtccgggcattaattacagaaggtcatttcagtttggccatagacaaagcgaactcgatgtatcaaaaagcgaaagagatgagttacccgctaggaacagcactttcgctgcaagcaatcggaaatacttacttaaattcatcaacgcctttagcggcaatagaatcttataaagaagcattagagatcatctccaaagtacctgatgcagaccaatatgccaagacgattttaacttgtattattctgacaaagcttaaattctggcaaatggcaaatatagaagcagatatccggcaattggaatctctttcaaacaaagacaagaatctaggagatgtttttttatcttaattattgtcaggcattctataatattcagacgcatcacctacctgaagcccttaattatttgcaacaagccgagtctataaaccgacaatgccaacattcctatttctttttgatgatcgaatatctgtatgcttgttactataccgaatcaaaagaatacactaaagcattaaatatattcgatactattttatcacacactcaaacagccggttcatacaaatctcttctcatactacaagaacgagctcagttactggcattgatgggaaagaatgaagaggcatgccaagcctacgaatcccttaacacactcaaagactcgttggatgcaacgaattatatccggcaaatcaatacgcttcatgctctttaccaaattgataaaaatgaactggacaacctaaacaggcaaaaaataattctctattggagttggctcacgatctcgtgtattgttattaaggctttggaggaggcttaccgaatgcttactgcaaaagaccatcccgtagaccgaatttcagtactgtcacagttaatatcagtcactaaagaaaagaaagataatcaaagactactcaaatatatacaagaacaagaaaatatacttcacaaacatattgccgagaacccttctttgaaagagggatttaccgatgcataccttttcaatgaacttttttacagttattattatctgaatatcaacgctcccgaacaaacatatccccatctgataaaatctaaggaatacttaaataagaatacatatttcacatacagaatactctatttcgatacactcgctcaatacaaccgagctataggaaagtatcagcaagccttgaattatatcgatacaacattgacaatgctgaaaaagaattttcccaacgactatgccgaacagttacttgaaaaagcaagaatatggaaacaggtagggcaaaatgagaaagctatcctattctacgaacaggcgttgtccctaaaagattctgtcacaacagtactttcaaacacccagatgaaacagataaaaaagagatacaatatagaaaagaatgaattagaacaggagaaacgaaataacaggactcagctcctatatctagtttttatattcgttattctgattttgctgtttattttcatggcaaggctcttcatgatacgcaaagctttaaaacattcggaatacgaaatccggaaagctatggaagctgtacgacaaaccaacgaaatgaaaaatcgctttttgtcaaaaatgagttataatatccgtactccgctcaacaatgtggtcggtttttcacaactcattgcctgcgaaccgaatatagacaaggagacaagacaggaatacactaatatcatacatcaaagttcggagaaattaatgaaactcgtcaatgacgttctcgatttatcccgactggaagctcaaatgatgaaatttcaagtacaagattatgatgtcatcgaactatgtaaagaggtgtgttatatggcacgtgtacaaaatgagcaaacaggtattaatgtcgatttctctaccgagatagatagtccaataatcatccataccgatacaagacgactgacactggctttactcagtgcattggtttatccgcaagagcatcgacaagaaaggaatatccgcttcatattaagtcgggaaggagacgtattacatttccaaatcaacaattcacctttggcagacccttcgtttgtatcgcaagagaccatcatacggcatgatatcaacctgttattattacagcatttcggtggaaactacttcataaatcagaaaactcctgaaaatccggaaatagttttcatctaccctattggttccgaatcggaataaagcgttatctttgcaaaatgtaaacttaaacgcttaattatgtataccaacaaacaaatttggagtgtcagttacccgatactgctaagcttgctggcacaaaatgttatcaatgtcactgatacggcattcctcggacacgtaagtgaagtagcactcggagcttccgcaatgggaggattgttctatatatgtgtattcaccattgcattcggattcagtaccggttcacaaatagttattgcccggcgtaatggcgagggacgttatacagatgtaggtccggttatgattcagggagtcatattcttgtttgctatggcattgttgctgttcggcttcaccaaagcattcggaggagacatcatgcacttgctcatttcttccgagtccatttacgaagggacaatggaatttctggactggcgtatctatggtttcttcttctcattcgtcaacgttatgttccgggcgttatatatcggtatcacgcgcaccaaagtattaacaatcaatgctgttgtcatggcactgaccaatgtgatattagattatatgctgatcttcggaaagtttggtatgcccgaaatgggaattaaaggagctgctattgcatccgtactggcagaagcctcctctattctcttcttcctcatctacacatatatcacagtcgacttgaaaaaatacggtctgaatcgattacgcacattcgatccggcgttattgatacggattctgagtatttcctgtttcacaatgctacaatacttcctgtcgatggccacttggttcgtatttttcgtagccgttgaacgattgggacagcgggaactggctatcgccaacatcgtccggagtatttatgtagtattgctaatcccagtcaatgcgctggcaaccacgaccaatagccttgtgagcaatgctatcggtgcaggaggtatccgatacgtaatgccgctcatcaacaaaatcgcccggttctcatttttcattatgctagggctggttgcactatcagcattgttcccacagttcctgctttccatttacaccagtgaaaacgcactcattacagaatccgtaccttcagtatatgtcatctgttgcgccatgctgattgcatcggtagccaatgtcgtgttcaatggtatctcaggaacaggaaacacacaagcggctttgttgctcgaaacgatcacaataatcatctacggctcatatatcatcttcattggaatgtggctgaaagcaccgattgaaatctgctttacaattgagatactgtactataccttactgctgataacaagttatatttacctcaaaaaagcaaaatggcagaataaaaagatataaatacgagagatttttgtacatttgcaggctcaaatattaattagtaattaaacaactatgttcgataatttaagtgaaagactagaacggtcattcaagattctgaaaggtgaaggcaaaatcaccgaaatcaacgtagcggagacgctgaaagacgtacgcaaggctcttcttgatgccgacgtaaactacaaagtggctaagaatttcactgatacggtgaaagagaaagcgcttggtcagaacgtgcttacggcagtgaaaccgagccagttgatggtgaagattgtgcacgacgaacttactcagttaatgggaggagagacagccgagattaatatcgattctcgcccggcagtaatcctgatgtcaggtctgcaaggttcgggtaagactactttttccggcaaattggcacgaatgctgaaaagtaaaaagaatcgcaaaccgttgctggtagcttgtgacgtatatcgtccggcagctatcgaacagttacgcgtattggcagaacaaatagaagtaccgatgtactgcgaactggacagcaaaaatccggtagaaatcgcacagcacgctattcaggaagctaaagctaaaggatacgatctcgtcattgtcgataccgccggacgtctggcagtagacgaacaaatgatgaacgagattgcagccatcaaagaagcaatcaacccgaacgaaattttgttcgtggtagactccatgaccggtcaggatgcagtaaatacagccaaagaatttaacgatcgtctggactttaacggtgtagtactgaccaaactcgatggtgacacacgtggcggtgcagctctttccatccgttcggtagtcaataaacctatcaaattcgtcggtacaggcgaaaagttggacgcaatagatcag

SEQ ID NO: 11804 - DNA, 1589 bp, Unknown
  gut microbiota DNA sequence
acagaacctgcaccgacgacacagatgaccaacaatgagatttcattcgtactcaaggcatcgcctgctgctcctgaaaagcaagctgcttccgttctttctacgcaaaaccggatagaacaaaagtacaagtttgcaaagattactccatacagttattcaccggaagactttttctttacggacagttactctatcctcctctcccaaatacggaagattatggaaagcgaggcgccaatcagtaaatccctgctctgtaagaaaatcctgtccgaatggggaatcagccgcttgggaacacggatagaggcacagatagaaacagcactcgacacattgaatatctatcgcacagaatacgaagaacttgtcttctgctggaacgacaaagagcaatgcgcttcctattcaatctatcgcccggtttccgaccgggaagcaacagacataccacctgaagaaatagccaatgccatccggcaactattgaccgactccatcagcctgcctgcggcagatttgataaaagcatgcgcacaacagttcggctttgcccgtatgggatcgaacatagacgctgccatgcaaagaggtattcgcgaagctgtgaaaaggaattacgccaagatagaaaatgaacgggtaacgattgccaattagattaataccctttctccaaacatttcaaacggttaatagaatcggacacatacgcattgtccggttctattgaccgccaataacaaagttctccaatcagccgtttcagataaacaggatcactcgagccaatccggcgctgatgttccgccaagcctttcgtcaggatgaaatagacattcttccggatctctctctttctggctttagggattgtcagtttcgcaccggaagagacagatactcctgtaataatcttcctgccatactcattgataaaactggtcttcttatgattcggttcgaatttctcatcacggatgatctgtttgatccggggaatgatttgttctttggggaacacatctcccgaaaaagtcaggtcgtcggcatagcgggtataagtcagtccgtattccactgccagtgccgccaatttcttgtccatctcataccccacgatattgcttaacgccggacttgtaggcgctccctgcggcaagtgcctgtacaagcagcacaacactcccaatactttagacacattttccggataaccaatcttctcaaatgtctttttcaccctccggctccgtatcgaaaagaaaaaatcatgaatatccattttcaagacacaccgttttcccagatggggactggcattatcaaccacagaatgaccgctccggaaacctactgccgccggatgaatcattgtcacagatgataatattcgagaattaatagtggtttgaatagattgtaattctttgtcaggagcagaaatcatccgataacctccctttctttttctcatccagaactcccggtaatgttcggaaacatcccgtagaatttccttcaactgtgccgtttccactcccaacaagttggcacaccagacaacagccgattcatcaaacctt

SEQ ID NO: 11805 - DNA, 301 bp, Unknown
  gut microbiota DNA sequence
gacaaatggtttatgattccaataatcctgtttttgagcttcaccagttccaccgccaccagtgcgaaacctccggcattcgcccggtgcgccaactggttgatgttgttggcttcccctgccagtttgcggatggtgtccgcatcctgcctgttcagccggggtatgacctctaccgaaacaaccgcctgccttacatactcactgacacgtaacccagcttccccggctcgctttctgatggcgtaatactgcaactcggtcagtttcgtactgacaacccgttgctgcttctctatcc

SEQ ID NO: 11806 - DNA, 6919 bp, Unknown
  gut microbiota DNA sequence
agttttctatttacacaaaattgtggacagtgccggaaaataaaaacttgctcttcgcgttccatattaattactagtacttttgataattttgatatgacaataactatgtagccaaagttttatatgttttaggtaaaacttcctcttttcttgccgtactttgggagccgcatatttattatttataagcttggcatagtgcattgcttgggtataatctcctatatgtttatattcgctatacagttgatgataatatttatttaaagcatgataatatgattctgtaggtgagagcttaaattttttaatataaaaagaggtaatgtcaatagttgataaaatgaacttttcatttttgattatatctttggaatgacttgctgattcttctagtatccgatatacactagtaacttccgggataaattttattttataatggtaatttatccatagccacataggatagtctcccataagccagttctttttttgcggttctatgtcatctatatattctatcatggcttgtgttcttatgcaagtggttagtgctggtatccggttatatgtaagtaaatcgtaatactcattatattcttctccaaatagatattcttctattttcatcttactttggttatatacttggctaagtgtatagaccattccgtagtcgggattcttttctaaaaaatctacttgtttctgcagtttgagtggatctgtccaataatcatccccttcacataacgctacatattttcctcgaattgcttggtttacaattcgcgctaacgagccatcatgtttagagtattgattttctgtctccaaaatagcatgaatattagaatatttctcggcatattcacgaataatctctgccgttttatccgtagaggcatcatcgtgtattattatctcaaatgggaaatttgttttttgcataacaaatccatctagacattggcgaatgtactgttcatgattataggtcaaacatctgatactggcaagtgggagcgtatttctcatttttcttaaagtaaattattgattataattttccattcccattttcccataaagagggtgaaaataaaaatataatctagtaagtgttaatatttagtttcaacaataaaggaaaaattattgtggatacaaaagttggtaatttctgcgggttatattttttagctacatagtgtagtctttattttctccccatagttttttgaatggctgggtttccatatcctttttaaaatccagtagatagtctttccaactgtattggggaatatattgtaattgttttattgtcttgctgatatctaatacaaattgttgggaacttcttttttcaggacaatggataataggtgatggatgttctttaggggagaaaacttctactattccttgaattctttcttttaaagttgaaccaccacttcctgcgttgtaaataccaccgtcaagaggggattccacacatttatctattatttgtaagaaatccttaatacaaatagtctctagtaaccgctcaggatctccccacatttctattggctcccctttaattgcttgttgtatcaaatatcggtctgaaataaggcattttaccccatctgtgtaagtatatgggttagggtgaaacatatatattcgaggaagacgtaaaataaagcgtttgattccatacatatgataataatgctcgattaaatcaactgctgccattttagctatgacgtatattgcatggtcacctgtcattggggccttgcgtatggcatcgggagatataggaattttactcccaaataaatagctgatatcaaatagagattgcggaaatataattttgtgcgcaccacattgccgggtatattccagaacattaagggttcctttggcaatagagtctatatatttatgtggagtgtatccttccatagtggcgggaagtgcaccggcaaagtgcaatactgtattgatacctgattgaggaagccgcctaaattgttccatattttctatgtccaacgagtaatatgggacattatagtctccgaaaaagccattgtctgattttctatgtccaacagcatatacctgatagcctttttgctgcaaatgagtggttatgtgggctccaagcgttcctgttgcgccaaatacaattacttttttattcatatatgttgatttttatttttttaagatacatggattcgctggtctgcttgatatatgatatatccggaacggtcttgcgactttttaagttcctgtaagggacctttatcaatatgatatttgacagcccactctgcatttttattgttttcaataaatgctcttatataagatacttctttactcaaaaaataaactccggaacatttgtgaaaagaccacttggggatattaaactcaccaagtgcgacttctatcatgccttttacataatcatatcctgtgcttagttttactaaatcatatgagataaaatctcctccaccacgagcaccaacttcaatgaaaaaaatatttccattttgatctatcttgaactctgtatgtgaagcgccgttattaattccaatagcgtttaatatattgcaagtcgcatatttaagtttttcctgaatatcgagagaaagagtagaaggttggtggtgagctgtttcgacgaaatagggggccccggttgtttctttatccgtgatagttaaaacgtaatgcttactatggaatgaaatagattcgacagagacctctttgccttctatatattcttcaatcagtatacaattggcaagagaagcttgcgaagccctgtttagtgcttgtgtgagatcttctcttttattgactttggtgactccgttactgcatgaaccgtctataggtttgactattaccggataaaatgagggtaggtatccggattgataaagtgtgtaagtaggttgttggcaagctttttgatgggataccttctcacgcatctgaaacttattgcgtgcatttaatgctacttcataagggattccgtttaaatcaaggagttctgctacatacgctgcagtaggaactgcaatctctaatgcgttggaaataattccatttattttttctttttgacaaattactgcaatctgttctttatcaacaatagatatatcataataatgatctgcatagtttttgcaataggctccttggctccatgcaaaacagtacgtttcaagccccatttcttttgctttcagaaataacggaagatgaggctcacttgctccaagtatagcaatttttttcatcttattcagtaatgatttttacccacgagttgatacacgacatcattttatgttgctgttgttcgttattgaaacttactactaatgttcctatggcgtcatttgccccattaaatgaatgaataaggtcgccaggctgaacccataagtctgtttcgataatatggttttccttcatattctgttctatttggatatccttgaatattcctgtcctgtccgcatgcagaatgatttcagaccaataaccgttgtaaacacaaggagctataggggggattatttccccaacggctgcacgtacggcattttttataagatcggtttctgttgcataacgtagcatttctgataggcgattgccacctccacgaggggaaacttccatgatataggcttttccgtctgttccaactcgtgtttctatattatatattgaagtgttcatatgtaacaattgtagcaatcgttgtatttcagaagataaaaattcccggtttctatcaagcattgaagaaggccaactgtaggcggagggagtataaggattggtagctttattatcaaaatattggtcggaaaaggagatgaattttaattctccatttatcgagaatgcatcggaatccgacgaatatccttgttgttcaataaattcttcaacaataaaacgatgagaaaaggaatttttcaaagcatatgttatagctttttctagatctgtggttttatctattcgggagactcctttactaccagcagaatcaacaggttttacaataataggccattgaaatgattctatgtcggataatgcttcttctatactattataaccacgagatttcggagtattaaatccgttcttttcaaggaagctccggaaaagagctttgttttggaggatttgtacagaggtatatgggttaccgggcaatccaagtttgtcacagacatatgcggcagttaaaactccgggatctactgcaaaagacattatgccgttaatctttaattctttggctaattccaatacagcatttttatctgtgatacttatattgtgatattcatctgcatatttgtgagctacgttatgaggcaggtagtcgcatgtaattacatagtatcctaattcatgagcagcttggataacaggaattaaatacctcagtccacctaacatcaaaatttttttctggttgttagccattgttcattataagttttaatatacgttcaatatcattttcttttaaagcatggtgcatgggcaagcaaataactttattggccatttctgttgcaataggtaaattttcaggtttggctgattctaatccgcgatatgttgaaaatgtactaatgagtggataaaagtagcgccttccccatatgttgtgttccttcatttttatgtagagttcatctcttgtcattccataaatattttcgtttataaaaataggaaagtaagaatagttgtggcggacttttggcatatcttcaaaaaatgtcactcccggaacagttgctagtatctcacgatattggatggcagtttgtcggcgtttagaaattgcctgatctacaattttaagatttagtagtccgaaagcagcgcgtacttcatccattttgctgttgataccgggagctactacttctgtctcattggcaaatccaaaattctttaaatagtcaattcttttttttgtttgttcatcatgcataatgagagctccgccttccaaggtgttaaatactttagtggcgtggaaacttagtgttgacatgttacctgctttcagaatactttctccattaacttctactccaaaagcgtgcgccgcatcataaatgactttaagcccatacttgtcggctatttcttgaattctttttgtattgcatggtttgccgtatacatgtacaggcatgatggctgttgtccggggagttatggctgcttcaattttatcaggatctagattgcaggttgtaggctcgatatcaacgaatacaggtttgattccattccaccaaagagcatgtgtggtggcaacaaaactgaaaggggttgtaatgacttcgcctgttatacgcattgcttgtagagcggtaattaaaggtaatgtgccattggtaaataaagacagatagggtacctttaaataagtagcaagctctttttctaattttttgtggaaagagccgttgtttgtcaaaattgcactttcccagatttcttttaaagaggatgaaaaatcatctaaagaaggtaacaagggagaagttacatatatagggggctctgtcattgtgttatagtatttaatattggatattatattttcgcaaatatagtcagattattgtatttatcaaaatgtattttttaattaatatatctattcccttttttgaaataagacatatataagttgaataaatagttgttgaaaaattaggcgtacattggatgttggctgactttgcaaaagaatataaaaaactggatttatcaccagtatctaaaaactgggagaggaacgcccggggctgcagtacaaaagtactataattatgggatacaacaaaatattctttgaaaaagttttttctaacaaaaggatggaacgatatttcaagctttatccacaagatgaagctagagctatattgcactaccaatgtaatttatgtttggctgagtccttttatgttagcttatctgtgtttgaggtaactttacgcaatgctttgggccgtgaactcgaaatgatgacagggcggcaggattggtacgctatattcccgaatacacccggattgaccaatttgaacagatatattacccaagccaataaacagattgcaggtcgacacgaaagtgctacaccttcaaaaataatagcggaattgaccttaggattttgggtgtcgcttctgaatagtgagtatgaaagaatattgtggaaagacttgcgaagagctttttccgtttatgctcaaaaagcagaggcagcgtaagaatgtatctgcaccactgaacaccttttgaatttttcgcaaccaagtatttcataatgaatcaatttgctggaacttacagcgggtagaggaaatacatcaagaaatgctcaccgtaatggggtggataaacaaagatgttcctatatggatgcaacaagttgaccgttttcaagaggtatgcaaaggaatacgggatacgatgggatggaggtaaacatacatagagaatgagtggcttgtttataatatcctgacaataaaatattgtcaggatattagacataaataggagcatttactgaatatccctaaacagattgaagttactatttcctgagtcgtcctcgtcgttttggcaaaagtttgcttatttctacgcttgaaacctactttcaaggaaagcgggaactctttgaaggctgattcatactagatgcattttgattcttcatctctcatatctctcataaattaacataatcctttaatttacaacaaactatattatgagagatgcagaaatctaaagtatctct

SEQ ID NO: 11807 - DNA, 1375 bp, Unknown
  gut microbiota DNA sequence
gcttacttacgcccgctctcacgaattgcctaaagtctatattttgattgatgaatatgataatttcaccaatcaattacttactgcctataatgatccactctatgaagaagttactactaatgacagctttctgcgtactttttttaaagtaattaaaaaaggtattggtgaaggtagtatccgtacttgtttttgtacaggtgtgctgcctgtcactatggatgatttgactagtggatataatattgcagagatattgactcttgagcctaatttcctgaatatgcttgggtttacatacgaagaaactgaaacatatctacgttatgtgcttgataagtattctacaggacaggatcgctttgacgaaatatggcaactaatagtgagtaactatgatggttatcgtttccgtccgaatggagatcggttattcaatgccactatccttacttacttcttcaagaaatttgcagccaatgccggtagtattccggacgaattggtagatgaaaatctacgtactgacattcattggattcgtcggttgactctttcgctggataatgcgaaaacgatgttggatgcattggtaattgacgatgaattgccttataatgtggctgatcttgctagtaagtttaataagaaaaagttttttgataaagagttttaccccattagtttgttttatttgggaatgacgacgttgaaggataaatttgtaaccacattgcctaatatgacgatgcgtagtgtatacatggactactataatcaactgaacaaaatagaaggcaatgcacaacgttatgttcctgtgtatcggcactatgattccaatcgaagcttagaaccactcgttcagaattatttcgaacaatatttgggacaatttccagcacaagtttttgataagatcaatgaaaactttatccggtgttctttctacgaactggtatcgcgttatttaagtagttgttatacctttgccatcgaacagaataattctgtaggccgatcagactttgaaatgaccggtattcccggtacagattactatacggatgatcgtgtggtcgaatttaaatattatcgtatgaaagaagctgaaaagatgcttgcgctttccgagcctcttcccgagcacgtggaacaggtgaaaagatacggtgaagacactaagaaaaagtttcctaattataatgtacggacatatgtggtgtacatttgtgctaataagggatggaaatgttgggaagtatgagacttcgttgttttgcggttactctgctgatgtatatctgtaattcgggtatctttctctgtaatttgtctacattcgatatacttttatttccatatttttgca

SEQ ID NO: 11808 - DNA, 8533 bp, Unknown
  gut microbiota DNA sequence
ctttcgtccagtccacgcagaggtggaaattcggacgtactttgtgatgagtttatgaaaggtgctcttgaagagggtaatgaagtggaaaagatttttctgaaagataagacggtacatccttgtacggggtgcagtgtttgcagtatgtacggaaaaccttgtccgcagaaagacgatgcggctgagattgtggagaagatgattgccgccgatgtcatcgtaatggcaacaccggtttatttttatactatgtgcggacaaatgaagatgatgatcgatcgctgctgcgcacggtatacggaaataagcaacaaggaattttattttatcattgcggcagctgaaaacagtaaagcgatgatggaacgcactattgatggttttcgtgggttcctcgattgtctggaagcaccgcaggaaaaaggggttgtctatggggtaggtgcttggaaagtaggggagattaaagatactccacatatgaaggaagcctacgaaatgggaaaacgtatttgacgaaaaccaattattttagtagataatagtctggattgtttgttctgctacggaattgttataattttgtggcagaactttttgtcatgtgcaatatctatctaaaagtacattattatgaattataaaataaccactctggtggagaattgcgtttatgggcgcaagctacaggcagagcatgggctttctctttatattgaaacggcagaacataaattactctttgatacaggtgcatcggatttattcattagcaatgcccgtctgcttcacatcgacttgcgggaagtagactatctgatactctctcatgggcatagtgaccatacgggaggtttgcgccattttctggaattgaataccattgcaacagttgtgtgcaagcgtagcattttcttacctaaatttaaggatgatcgtgaaaatggaattaagcataccgaaacgtttgacttatcccgttttcgctttattgaccaacggacggaattgcttccgggagttgtcttgtttccctcgataaaaatcgaagataaggaagatactcattttgaacggttctttgttcaacaagatgacggcaacaagattcccgatacttttgaggatgaactggcggtggcgctggtcagcgatgaaagtttctctgtgctgagtgcctgttcccatcgaggaatcactaatatattgcgaacgatacggaacgcattttccggtctcccttgtgagctgcttttgggcggttttcatatccataatgcggaagagcaaaaatatcatgtgatttcagattatctccaacggtatatgcctcgtcagataggagtgtgccattgtacgggagtagacaagtacgcttttttctgtaaggattttggtgacaggatattttataatcacacaggaagagttatttagaaggactgttttagacataaatatagactaattaaatatgaagaaacttatcacttgtttatcgtttgcgctggccgcagtatccgtcggctatgctgctgtaactcctttatggatgcgcgacgcgcgtatttcgcccgatggaagcgaaatagtcttttgctataaaggcgatatctacaaagtatccgcacaaggaggaactgccgtccaattaacaacacaagcctcttatgaagccaatccggtctggtcgcccgatggagagcagattgcttttgccagcgaccgcaatgggaattttgacctttttattatgtctgccgatggaggtgctgcccggagactgacttatcattctgcttcggaaattccctccacctttacaccggatgggaagtatgtgcttttttccgcttccattcaagatccggcaaccagtgcattgtttcctacaagtgctatgacggaactgtatagagtgcctgtcgagggggggaataccgaacaagtcttgggtactcctgccgaatgggtttgttttgacaaggccgggagtaatttcctttatcaggaccgtaaagggtttgaagacgaatggagaaaacaccatacgtcatccatcgcaagagatatctggctgtacgatactcaaacaggagaacatactaatctgacgaaccgcgacggggaagaccgtaatccggtttacgctcccgacgggaagtctgtgtattttctgagcgaacgtaatggaggttcattcaatgtatattctttcccattgaatgctccgcagcaagtgaagcctgtaacgactttccgtactcacccggtgcgttttctctctgtcagtgataagggaaccttgtgctatgcatacgatggggaactttatacgcaactgccgaactcccgtccgcaaaaggtgaaagtggaacttgtccgtgatgatgacaaggatatcgcatcattcagattctcacagggagctacttccgcctgtgtttctccggatggcaagcaggtagcgttcatcgttcgtggcgatgttttcgttacgtcaactgattatccgacaactaagcagataaccaatacacctgccggagaatcgggcctttcgtttgctccggacaataggacgttggtgtatgccagcgaacggacaggcaactggcaactgtatatggcaaagattacacgtaaagaagatcctaattttcccaatgcaactcttattgaggaagaggtgttactcccctctaaaacagtggaacgcagatatccgcaatattctccggatgggaaggagattgcctttatcgaagaccgcaaccgtctgatggtactcaatctggagacgaagaaagtacgtcaggtgacggatggatctacatggtacaatacagggggcgggtttgattatgaatggtcgccggacggcaaatggtttacgttggaatttataggaaaccgtcatgatccgtattctgatatcggtattgtcagtgcgcaaggaggagcaatcactaatctgacaaatagcggttatatgagcggttctccgcgttgggtacttgacgggaacgctgttcttttccaaacggaacgctacgggatgcgtgcccacgcttcgtggggttcacaacaggatgttatgttggtattcctgaaccaggatgcatacgatcgttatcggttgagcaaggaggatttcgaattactcaaagagtttgaaaaggaacagaagaaggcgaaagagaaagacgagaagaaaaagaatgaaaagaaaaaggacgccggtaaagataaaaagaaagatggagataaagatggagacaacggtaagtccgacaaagataaggaaagtaaaaaagagattgtagtagagttgaaaggtattgaggaccgcattgtccgcttgacacccaattcttcggatttaggtagcgccattgtctcgaaagacggacagaacctctactatttttctgcttttgaaggtggttatgacctttggaaaatgaatcttcgtgaaaaggagacaaagcgtctgcataagctcaataccggttgggtttccttatctatggataaagatggaaatatattcttgttgggcagtaggaatatgcagaagatggatgcaaagtcggatgcgttgaaaccgattagttatcaagcggagatgaagatggatttggctgccgaacgggaagctatgtttgaccatgtatataagcaacagcagaaacgcttctataacttgaatatgcacggagtgaattgggatgagatgagtgcggcttaccgtaagttccttcctcatatcgacaataactatgattttgccgaattgctgagtgagtggctgggcgagttgaatgtatcccataccggaggccgttattttgccaacggtaagggagatgttacttctaatttggggcttttgttcgattgggaatatcggggaaaaggcatgagaattgctgaagtgatagagaaaggtccgtttgatcattcccgtaccaaagtaaaggaaggatgcattattgagaaaatcaatggacaggaaatttctcaggaaaatgatattactgttttgctgaacaacaaagcaggcaagaaaacattgatttcactatacgatccgcagagtaaagagcgttgggaagaggtggttatgcctatttccggtggacgtttaaacggactgttgtataaccgttgggtaaaacaacgtgctgcggaagtggaaaaatggtcgaacggaagattgggatatgtgcatatacagtctatgggtgacggaagtttccgtactgtctattctgatattctgggtaaatataacaactgtgaggggattgtcatcgatactcgtttcaacggtggaggccgactgcatgaagatattgaaattttgttcagcgggcagaaatattttacgcaggtagtacgtgggcgtgaagcttgtgatatgccgagccgtcgttggaataaaccttccattatgttgcaatgtgaagcgaattactcgaatgcgcacggtactccttgggtatataaataccggaatatcggcaagctcgttggtatgcctgtaccgggaacgatgaccagtgtttcttgggagactttgcaggatccttcgttagtattcggtattcctattgtcggttatcgtttggctgacggtagctatctggaaaattctcagttggagcctgatattaaggtggctaatagtccggaaactgttgtaaagggtgaggatatacaattgaaggcagcagttgacgaattgttgaaagagattgatagtaaaaagaaatagattcgctatagatgaggggtgtaccataattcattatgacacaccccttattcttttatatagttaatggttccggtttattcttcttcattctcttctttatttttctttcctagtcctaaaaggccgaaaatgaaatctttcagatagcttattatgccgatgactactaaagcggcaaatccatagaaaagaatactgccaccccatttgtcccaaaatgtaggagtggggataaggctgctcagttcttccacattcaagtcttttttaatgacttctgcgtattcgtctgaaatttcataataagtgtcgggcttcgattctgagaagagtactaaagtacgttttccgtcttcttcgatgtaccctaaatccaaatgagcgccttcatctgttttgtaataagaactatccggaagagcggcaactttcgggatactgttgtctaccggaattctgattttcatacgtgcttcggcattgctcacgaaaagtccggcaatgacagtcaggataaatagaaattttttcataatcataaaatataaagatttaataatgtgtagttgttagtcgcaatcacaattaatctgtttttgtgttccaaagataaatgaaaaatatgaaaaccaaacaattgttttgttttttatttgattgaatagttgaaaaataagaataggttgatgtatactgtctgttatgacaattacatcaacctataagagtatatagtgaattggtagtatgctttatctgataagtgcagtgatatcttctacaatctgttcatccgtcaggtgattggcacgaagaaattcctgtagatcataacggtctacaaattcttttttggctccgtaattgagaactttcatgtcggaagtgccataatagcggctaatcttttcgccgaatccaccatccaagacaccatcttctaacgtgattactaattcatggtcggctttcagctcattcatgagctcgctgtctattccggtgatgtaacgcggattgatgagtgtcgcgtcaatattttctttttcttttaggagtgatgcgaccgactgtcctaatccatagaatgagcctaaagctacaattgcgactttcgaaccgcgatgagtgactttatagcgattaagaatgctgtaatcggagtccaccggctctccgcaactaataacctcggtagccggaacacggatggcaacagggtgttcattttgacggatgctccattctaacatggcaatatattcttctttgcaagtcggtgccagataaaccatattgggaatattactgatgaccggaatatcgaagaaacagagatgtgtcacatcattcattccggataatgtaccccagaatacgagcaggacagctggattattgttgatgcagaggtcttgtgaaagttggtcgtaagaacgttggataaatgtactgtaaactccataaaccggctttccaccgttggctgcaatgcccgaagcaagtgctaccgcgtgttcttcagcaatacctacatctacgaattgtttgcctgcttcttgccgacggtccggagtaaagcccagaacagcgggagtgcccgaagtaattgttactacacgcgggtcttctttcatcttttgcagcaggtattgggcggttacttcgctataatcttcttcttcatcgtttactttggcttctccggtctccggattgaatggagtacgccaatgataagtctctttatcttgctcggcacgtgcatagcctttacctttgagagtattgatgtgtactactatcggatgttggatatcttttattttagagaaagcttcgattaatgcctgtacattgttgccatcatttacatacatataatccagtcccatagctttgaagaagttacactcacattgaccgttgctgtcacgtaattcttttagattcttgtataatccgccatgattctcggcaatagacatttggttgtcattgacgatgataatcatgttggtacccagctctgccacatagtccaacccttcgaatgcttcaccgccacttaaagaaccgtcgcctatgacagctatgatattttcattaccgcctgtaaggtcacgtccttttgccagtccgctggccaggctgacggaagtagaggtatgtccgatgataaagaaatcgtgctcactttcttgcggttcggtataccctgatacattgtcgtatttggtcggattgaggaaagcatctttacgaccggtcaacatcttgtgtacataactctggtgcgatacgtcaaatacaattttgtctttgggcgagttgaatacatagtgtagggcaattgtcgtttctaccattccgaagttggggccgaaatgtccgccatgttcacttagcttttgcagaagtgcggcacggatttcaccgcttaatttatcaagctcttcaatcgatagtttttttacatcttcaggcgaataaatattttctaaatacataccaaacagtttttataaataatctttttacttatttctttatgacattgcaaagatacggcagaatttgtgatttacttgtatatgaattacggattaacttacccctattactgttctttttcattggaagagtgtctgtctttatctttctaaaaagacaatagatgttaattaggcttttgccttgtgaactaatatttgatacaatatgttgtttgaagtaaataaagaacttaattatgaactaaaaaattagacatggctaaaccaagcatatctaatgatttagcaggtaaaacataatattttaaacttatgattatgagaaaatctattattctattagcttttgtattgggtggatttacagcaaatgcccaatctgtcgtagaaggtacaaaattaacagacaactggtctgtagaactaaaagcgggtgcggtaacccctctcacccataatgctttttttaaagggatgcgtcctgcgttcggaattggaatatcgaaacagttaactcctattttcggattagggtttcagggtatgggatatgttaacacgacccaaagtaaaacagcttttgatgcttcggatgtcagtttattgggtaaggtgaacttgatgaatctgtttgctggttataacggtactcctcgtctctttgaggtggaagcggtagctggaatgggctggttgcactattacgcaagtggtgatggagacgaaaactcttggtctacccgcttcggattgaacctgaattttaatttgggtgaaagtaaagcatggacagtggggcttaaaccagccatcgtatatgatatgcaaggtggcttcccggagtcaaagagccgtttcaatgccaacaacgcagcgtttgagttgacagccggattgacatatcactttaagacaagtaacggaacacatcattttgccaaagtgagagtatataatcaaaccgaaattgacggactgaactcttcaatcaatgcacttcgtgcagatgtaaacaacaaagatggtgagatcagcaatgcaaaccaacgtatcaacggattgcaggaagaacttgaagcatgccgcacaaaagtggttccggtggagactgtagtgaaaactgcccgtgtacccgaatctatcattactttcagacaaggtaaatcgtcagttgacgcttcacaacttcctaatgtggaacgtgtagcttcttacctgaagaaatatgctg

SEQ ID NO: 11809 - DNA, 989 bp, Unknown
  gut microbiota DNA sequence
caagctcatcgctcgtctggaaatggagttggaagcaggtcctcctccgagaggaaaggacgtttcttgtattccggcttgcacacgaacttcttgaacgggtgcttgtggatccatccctcgtccattgccagatacatcagccatttcagtgtgttgacgcgctcgaaggacgttgacttggccagcccgcgcacggaaagcatccagttgtaatagttcttgatgaaatccatgtccagcgacatcaggaggatatcctccgtacccaacttgtccttcaggtaacaggacagacacttgtactcgtccaccaaccctcggtaggtgctttgggctttcgtcttgccgatctgccgtttgtaatcccggatctggatattgaagatctccatcaacgaatggatctcctcgccaaagccgttatagcggtcatagaccttcttggctgtcaggaacgaatcgtggtccgagagatattgatagtgcttgccgatctgtgccttgatgttctccagctcccggttcagccgtcttgcctcctcggatttgcctttgacatcccaaagggcaaggggaacatcacgcttgcagctgaaactcgccgtcgttccgttgacggtaatacgccccatgacagggacacggccattttttatggcctggttcttggtgtagaacagaactcgaaaggtactcctcataactcgattatttttgatagaaaattactatttatcgagttgtcttaagctataaagaataatgcaaacaattgaaaaacaaccgcttatattgtctgttttatagacttggacaaggtaacgattaggtaacgtaactcacgctcaaatgtactttttgtagcgtcgttttcaaatggaagtgaaatacaatcccattaattcgctgaattcaagcggtgtgtcgccattatgcaactatttctaaaaatctccgactttatataaaaagatcaagaactttca

SEQ ID NO: 11810 - DNA, 5377 bp, Unknown
  gut microbiota DNA sequence
aaataaacacactaattatattgaaaaaagcgaggaactttcgagtatcctcgctttttttatacatttgtactcaataaataataaaacacatagattatgaaaaaactattgatgtcggttgcagtacttttattagccgcaaccacctttgcgcaaacacccggttatgaattcacaaccattgtatcgcacaaagcgactcccgtcaaggaccaggcttccaccggaacctgctggtgctttgccaccgcttctttcatggaatccgaattacttcgtatgggaaagggggaatacgacctctcggaaatgtttattgtccgccaaaaatacatgaaccaaatggaagacaactaccttcgccggggcaaaggaaacattggagaaggaagtctggcacatactttcaaaaatgcctataaacaggtggggatcgtaccggaagaagcctattccggtctgatcaatggtaatacggatcataatcacggagcattatgccgctacttcaaagctttggtcgatgccaatatcgcttccaagaaacgtaccccacagtattattcacttattgataatctattcgatacgtatctgggcaaactaccagagaagttcacttataaaggaaaagaatatacaccgcagtctttcactgaaagtctgggactgaacatggataattatatcgagttgaccagttttacccacaaaccttattatgaaactttctcaccggaagtacccgataattgggaaaaccagccaatgtataacctccctctggatgaattgatagaagccatcgactatgcattaaacaaggggtataccgtatgttgggatggggacgtcagcgaacaaggtttctcttttaagaacggaattgccatcaatccgcaagtggaagatataaaagactactccactaccgaccgtgcccgttttgaagagatgcctaaatatcaacgtctggatgaagtttttaagtttgaacatccttatccggaaatcaaggtaacaccggaaatccgccaagaaggctacgagaaatttgtaacgacagatgaccatttaatgcacattaccggtattgccaaagaccaaaacggcactaaatactatataactaaaaactcttggggagcggacggtaataaattcgggggatatcttaatatgtccgaaagctatgtacgcgctaaaacaatctgcgtcatggtacacaaagactccctgccgaaagaattgagaaagaaactcggaatcaactaaaagatataagtcctataattgagataaggatatcctgaaataaaaaaagcaactacttcattgcgaattagttgcttttttagggatattcagtaaatgtccttgaaataatctgtgataatttgcgttaatctacgctttaaccactttttcctcttatttctttcttaatgtgacatcactgatttctacaacgccacctttattctgagcaagaatagctacatagcagtctttcaagatagcagcgtcatcatccgtatcagatacttccaaatcagcatttgctttcttactgctgatagcgttcacaacttgtcccatgtcgtaataaactaccactttcgtccatttgtctgcatccttaattttgaagttgtactgtgctcccgaagcattcggttgagaatcagcatcataatcacgacgcataaagaaggtggtattgtacttgccattatcattcttttcttcattcgtctgcttgatatatacacttaccggagtaccggcttcttttgctttcgcataaaaagtaaggacatagatacctttctgcaacccgtctgtaacacgctgtcccaagaaagccttgtaccaggaaatgttctttgcagctccggagttgtctatcttcatggcattaggatatttggcatcacccgtctgttcccaagcaatggtagttgcaccgtcagcttcattattcatgatgaaccattcaccggctgtcgccttattcggattggtcaccttgttcgttacttctgttgcgaatttctcgtttttaatcagattctgagcgcttacgcttactcctgcaatagccaaaaggccggcaaatactacttttttcatcttactgtgatttaattgtttaatacctttataattctaagttcttattttacttcacttgttgaatgacaaacttataattcccagtcgctttcttttcttctgtcttcagtgtgatgcgataaatctccttgccccaaacattagaaaggcggggatcatccaatttaatagtttccagttctgctttaaactgagacggataatccaactctactttctgtcctttcacttcaacacgcactttgccgggagaaggaaagctaacctttccccaagtcaggaaattaagttgattgggagccagtgcctcattcaatgtatagttgtccgtaatcatcagtttacggtcgtccaatgcatacgaacgaatccaactctttacttttgcttctgccggataagctgtggcaatatctgcagaaaaaatacgcttcttttcattgcaaacagtattggtcgctttatattgttgaccgaatttttgcggaactccgtttatcatcggtaagttatgataattgctttgcatggtccagatagtataacggtcttttccgaacgtctgcttggtataggtaccgactccggcatcaataaatacaggaatcgtgtttacatacaaagagaacgttcctacatcattatggttatggctttcattattgaatccgcctttggcagcgagcagcataccattcttatttttcatgtagcagaattcagtttcgggataccaggtaacatccggcatatcgtgtttcggggtcgctttttccaggtcattacagcaaagcagggattgaagggaacggaaagcgtcattgcccatagtagcatacggctttctgccattcagcaagtaagctgcaaaatgcatcatttcatcactgctgaccgctttaccgaaacggtaaatcaacagagggtcacccccaccctgtgccgaagcatcggcgaagttcactacccagccattgcctacgtaggaacgggacatatattcacccatccggcgaatcatcggttcattaaacaaggatatcttgcctcctgtaccatcggaaagaatttggagataatcatagagttttccggcagcatgtccccaataagaggttccttcttcacaagcgccatcggactttacgaaattaatgaatttatccacagacttcatagaacgataaacggctttggccagcttgtccttattattttccatcaggaagaaacattgcaaagcattggaattacaccaaggattccagttattgataatttctcccggttgccagttgaaagccatccaccacatttcatcatcattcatataaggatcgagaatacgttctttgattgctttacgcatttgtagggatactacaggattgatcttatcgaatggcttacggaaaaaatagtgtacccacgccatcaaggctccatacccccctgagcccaaatcaataatctgttcacggaaatcgggaagcgaacgtttactgctctgacggggcaagtgtgcggataaaacccatgaattcatttcgcagctcatataagctccattgagcagttggtcaataaagcgtccctttccctccgccagttcggcaagcatcagggtattaagtgctctacgattatcatcgtaaggaacctccatcacttttcggttgccgctacgctcgtattccaaataagcggtggcaggaatcagttgccatttgtagttgagaagtttttcaccggcttcgataagacgttgtttgttgggacccatcagcgaatcccaagcggcacgatccgtataagcaggataaggcacccacgcttgtttcatcactaacacatttttcaatgtagattcgtctgccgctttttgcagcatattgcgttcggtgtaagcattggctttgaaagtgaaacttcctaaagcggctactaaaagaacacaaagcaaatgtttcattcgattcatggtatttttgttcatttaagtaaggcaaagatagtatatatcttatgaaataaggtgagtaaatcatacgaacctaatggcaaaaaagtacatacctccaaaatcgtactcgtcattgccttattttaagttcaatcccaatcactaaattcaaaactcaactgttcccaaacgccgtgttgttcatcggcttcctccttcggattagagacggatagtccgataaggcgaatcgggtgctgttcatattccacacttttaagcaattcttttgtaagcggaagtatacggtccagggttgttaattcttgcggctgggtaagacttcgggttatctgactaaaatcatgaaacttgattttcagcgttagggtgtttcctttgaaatccttatggttgagtcgttcgacgagctccactgccacatggtatagttcgataatcaccgatgaacgggtagaaatatcccgctccaatgtacgttcgcacccgatagatttacgaatacggacagcctccaccggacgttcatcaatcccccgtgcacattcgtaataaagagctcctacctttccaaaatgcgctgtcagcatttccaaagagcatttccgtagttggagtccgttacgaatgccgagtagatgcattttcttggcggtcacaggacctactccccaaaatgattcgatagggagacgagcgataaaatcaagcgcttgttccggatgaatggtacataatccgtccggtttgcgatagtctgaagctattttagccagaaatttattataagaaactccggcagatgcaacgagattgagctgttcacgaatcttttgctttatttctttggctatgtccactgccaatgaaatgcctttcttattctccgtcacatccagaaaagcctcatctaaagaaagaggttcaataatatccgtatactcatggaagatttcatgtatctgccgggaaactgctttatagacatccatccgcccatgcacaaagatcaactgcgggcaaagacgtttcgccttttgggaggacatcgccgaacggacaccataacgccgggcttcatagctggcagcagccacaactcccctctcctctgcatgacctaccgccaaaggcttgccacgaagttcaggattatcacgctgttctactgaggcgtaaaaagcatccatgtcgatatgtagaatctttctatgagtcattggaagacattagcagagcgaagttactacaaaa

SEQ ID NO: 11811 - DNA, 335 bp, Unknown
  gut microbiota DNA sequence
cgtgccaatggtagagccgttcacccagagtatttcgggcggcacttcgtaagtgtccgtcacctttagatgaatggttttccaaagggctgcgaaatcctctttctgcatggtgatgtcctgcccggcttctgtcgcttttctattttccatagccgttatttctttagaggacggttaaggatatacttctgcgcttcctgctctatctgcgcctgcgtcttgaccgggttctgacgcaaccatgcttccaactccgctttctcaaaataaagcattttgccctgcggcttgtaatggggtatcaagttacccgaagtcagcttgtacaggta

SEQ ID NO: 11812 - DNA, 69055 bp, Unknown
  gut microbiota DNA sequence
tcctatttcaggaatatccctaatattttatagaattcttttgcgataatttaccgttaatctgcattctgatacactactttcctgtatcttctcaaatcagtgagcggatcattcttcagtttttattgattcgtcaattaccttgattttctgtaaaaccaagtccagatctgcttttaatttgtctaccttgcgattcaattcagttaacaggctactacctttctttgaagtggaagtcaagaagcccagattgttctcatatgtctgtagttcgttcttcatattctcataagcacgtaccagcttttctcgttctctgtataaagattgcgggccacttccttgaatattgctgatgttagaacggaaattacttagcttcttattggaagtgttgatgttgaaacgatcaaacaattggtcaatcaagctgtggtattgcttgtaaagtttatctttctctttgaatggcacatgaccgatagagttccattctttcattaactcccgaacaagtgtactggcttcttccatatccatgttttcttcgatggcggacagcttttcgatcaatgctttctttttctccatgttctctacttccacagaacgttgtgaagaagtagctttgtttttctggtcgaagaaatagtcgcaagcggaaatgaaacgtttccatactgcatccgaatgtttcttggctaccggcccgatagttttccactctttttgaagtttggtgagagcgtcggcagtagctttccagtcagtgctgtctttcaaggcttccgctttctcacacagtgcttttttcttttccagattttcgttcattccttctttcaagctcttgaagaattctccttttttcttgaagaagtcatcacacgcatgacggaaacgttcgaatatcttcacattcatcttttgaggtgcaaaaccgattgttttccatttgttttgcaatgcaattacttcctgagtcttgttttcccaagcagagaatgttttcagttcattatattctatcgcttctacgatttcgcagataacggttttttggtctagattgtgctgttctgtttccttcagtgcttcaaaatgttgctgatggcgacggttgacagcggtagaagccgccttgaagcggttccatatttcatcacgcaactctttggctaccggacccgtatcacggaattcctgatgcaatttttggagttggtggaaagcggaaacaacatcttcttcgtcagccaacttttcggcagcttcgcaaaggtgagtcttgatttccaagttcttcttgaagtcatattcgcggaattcgttgttcagcttcaataagtcgtagaatttctctacatataattgataattcttccacagttcatttactttgccttgcggaaccagctttgtctcattccactgctgttgcagctttttgaattcggtgtaagatttattggcgtcatctccggattctactaattccttcagttcttcgatgatggaaagtttgacttgtaggttttcttctttttgtcgttctaactcggcagccattttgcttcgcttttctttgataactcccatcagacgtttgaattcttcttcttccgggtcttcttgcggaacaaaatcctcaatggctccaccgttatctgtgaactcctttttagcagcttccagttcgacgttatgtaacttgtagaatgattgtttcagattatcgatatcctgcttgtttgcattttctgcattctgtgcaagctcctttaataggtttaatacatcttcctttgtagcaggtttaggagctgcttcagtttgaacttcggcagtaacttcttcagttggagtctctgttatagcttcagaaacctcgactgtttttttttcttcttctaattccccttggttcaagggttgattagtgtcatgagcgtccatcattgtatattagttttgggtcacaaattaatgaaataaaacgattacttcatactattttgcttatttttttttgtttagcctgtttttatgataataaaaccgtaattcccatgtacaacatcatgccgataatgtcatttgtgatggcaataaagggacccgttgcaatggcgggatctatttttagcttttcgagcgtcattggcacgagtgttccaaaaatagaagcgaacatcactacggcaaacagactgatggatacggaatacgtaaccgtagccgttgcgccgaagcggatgaaattatatgtatataccaataaagagatgattgtagcattgattaacgccactaccgcttctttggtcacttgcttgaatgtgtttttagcatccagcgagctgtttgccagcccttgcacgatgatagccgaagattgtgttccgacatttccacctgtaccaccgataagcgggatatagagtgccatttcaggatgggcggcaaaggttgaatcgaagttacccagaatcatggagtttccgataccaccgagcataccgatcaataaccaggggagacgggcagtagtctgcttgagtacgttgtcgtcggtttctacgtcttgcgaaagaccggaagccaattggtaatcacgttccgactgttcacgaacctcatccatgacgtcgtcgacagtgatttgtcctacgagccgcccgatgctgtcgataacgggaatagccaccaagtcatacttctcaatcgcttgtaccacttcgtcgataggagtgtctacgtgcacggaaatcggatctttctgcatcacatgctttactttggacacggatggagaagtaatcattttcttgagtgggaagataccacgcaaacgttcgtcgtcgtcgatgacatatacataatagatctcatccagctcctccgcttgttgtcgcatctctttcagacactcgggcatactccagttctcgttgacaagtaccatttccgtacccatcaaaccgccggcggtattttcgtcgtatttcaacaagtcgacaatatctcctgcctgttcgatgtcttcgatatgcgaaagaacttcttcctgcttgtcctcgtcaagttcacgcatcaggtctacggcgtcatccgtatccatatagtcgacaaagcgtttggcgatagtctccgaaggaagcatttcgagaagctctttacgtgcatcctcgtccatttcgaccagcacgtcggcggccgtttcgttatcgagcaagcgataaatgaatctggctccttccgcattcaagtcattgcataactcagcgatgtcggccggatgaaggtcgatgaggagttcttttaccttatcagcgtctttctgctctataaggtgttttacggtgtcaatgtattcctcgttcattgttgtttcagtgcttcttccactttattggtcaagtcgataaattcttctaccgatagttgttccggacgtttattgaataatgagtcctctgtcaacggacaatctttgcctaagatcggtttgatggaattgcgcaaagtcttgcgccgttggttgaaggtggttttcaccacctgcttgaataacttctcgtcgcatcccagctcttggacttcgttgcgcgtcatacggataacggcacttttgactttgggaggcgggttgaatacgtgttcgctgacagtaaacagatattccaccttgtaccacgcttgaatcaatacgctgagaataccgtatgttttgcttcccggtccggcggcaatacgttcggcaacctctttctggatcatacctgtgcaacaaggaatgatatccttattatccaacatcttgaaaaagatttggctggagatattatacgggtaattaccggtcagaacgaaaggtttcccatcaaacaaccggtgaagattcatcttcaggaaatcgtcttcaataatatggtcttccagtgacggataggcttcgcggagataagcaaccgattcatagtcaacttctacgacttttaccagccggtctttcttcaccagaaattgagtcagtacgcccatacccggtcctacctctaaaatgggcagttcgggaaaggtgtcgaccgtatcggcaatatcctgagctactttcaaatctttcagaaagtgctgtccgagaaactttttaggctttactaatttcatttaccaactaaataattacttttgcagtcgacaaaggtaattcttttaaatgaagaacgtgccactaattaaaaataaatgatatgccagtgcagctaatgaagaattaaggatgaagaaactgttaaaaaagacgctgaaactgatattaccgattgttttgggcggctttattttattctgggtgtatcgcgactttgattttgcagaggcgggcgatgtgttgaagcatggtacaaattggtggtggatgcttttctcgctgttgttcggaatatttgcgcaagtgtttcgtggctggcggtggcggcagacgttggagcctttggatgcgtttcctaaaagaagagattgtgtgaacgccatttttgtttcttatgctgccagtctggtcgttccccgtatcggagaagtgagccgttgcggaatattggcaaaatacgatgatgtgtcgtttgccaaatcattgggaacagtcgtgacggaacggttggtcgatacgttgaccattctcctgataacaggaattaccgtcttgctgcaaatgccgatatttgtcacttttcttcaacagaccggaacgaagataccttccatgatgcatctgttgacgtccgtatggttttatattgtcttgttctgtttcatcggagtggcgatgttactttattgtttacgaaagacattattcttttatgaacgggtaaaaggttttgtcttgaacatctgggagggaattatgtccttgcgtggagtgcgcaatattcctttatttatattttatacattagctatttgggcttgttactttttccacttttacttcacgttctattgctttgctttcactgcgcatttaggcatgatggcggctttggtcatgtttgttggcggcacattcgcagtgattgtgcccacccccaacggagcgggtccatggcactttgccgttatttctatgatgatgctttatggagtaaatgtgacaaatgccggaatatttgccttgattgtgcacggtattcaaacctttttagtagttttgttgggcatatatggtttggcggcattgccgttcaccaacagacagcgaaagtaatcacttaataaaatagatttgttatgagtactattctttctttagctccacaaaacgtatggaagcatttttattcgttgactcagattccccgtccgtcagggcatatggaaaaagtgactgaatttctgattaactttggaaaaggcttaggactggaatcttttgtagacgaagcaggcaacgtgattatacgtaagtcggcaactccgggtatggaaaatcgcaaaggcgtgattcttcaggcgcacatggatatggttccccagaagaacaacgatactgtacacgattttgaaaaagatccgattgaaacttatatagacggtgactgggtaaaagcgaaaggtacaactttgggtgcggacaacggactgggggtagctgctatcatggccgtgctggaagcaaaagatttgaaacacggtcctttggaagctctgatcactaaggatgaagagaccgggatgtatggtgcgttcggtctgaaaccgggtacggtgaatggggaaatcctgttgaatctggattcggaagatgaaggtgaattgtatatcggttgtgccggaggtatggatgtcactgctactctggaatataaagaggtggctccggaagaaggagatattgcagtgaaagtaacattgaaaggattgcgcggcggacattcgggactggaaatcaatgaaggacgtgccaatgcgaataaattactggttcgttttattcgtgaagccgttgccaactatgaagctcgcttggcaagttgggaaggcggtaatatgcgtaatgctatcccgcgtgaagcgcatgcggtaattacaattcctgccgaaaatgaaaaagagctgttgggcttggtgaaatattgcgaagacctgttcaatgaagaatattcggctatcgagactccgatcagtttcacggcggaacgtgtggaacttccggctggtgaagttccggaagagattcaggacaacctgattgatgcgatttttgcttgtcagaatggggtgacacgtatgattcctactgttccggacacggtagagacatcctccaatcttgccataataacgattggcgaaggcaaagcggctattaagattttggctcgcagttcaagcgacagcatgaaggaatatctgactaccagtctcgaatcttgtttctctatggcagggatgaaggtggagatgacaggcggttactccggttggcagccgaatgtcgattctccgattctgaaagcgatgaaagcgtcctataagcagcagtttggagtagaaccggcagtgaaagtaatccatgcaggtttggaatgtggcattatcggtgctattattccaggattggatatgatttctttcggcccgaccttgcgttcaccgcattcaccggatgaaagagcgctgattcccactgtgcagaagttctatgactttctggtggctaccttagagcagactccgattaaataagagcgtacctatacctattatatataggtagatataatttagcaaaaggcacggatgaaatgtcatctgtgcctttttgtcttattaactgccactctgttacaattgctttttataacaaataaattaattgacgcaagtcaagaaatatgctataaaacataaatttatctcttttgggggtacaacgtataaacaaaggccgtatttttgtgttgtaaaacatgtaattaggaggataacaaaatgaaaaggttaaaaagattgtttagaaagatcggtgaagccgatgtacatgtttggggatattcgacaattaatgcaacccctaacaagtaagttttagttttcaggaattagtaatttaaaagatttaagattatggcaaagaaaatgagttctttagtaagaaaaatcctcagtgaagtaggtcgtaacgaaatgctgtcatgggggtatagaattgagaaatgagaacgagtacattaactaagtttagagtggggatacgttattgaaaacgatatccccactttgtttatattctgtaaggtcggttatccgttctgtatatctttgaattacagtaaggatgaaagcaaaatttaagctaaaaagtacaaatctttaaactttatttctttactttgttgtttaagcaaagatatctatcaaacttaaactggagagattatgaaagtaaggcagatttgtatgatggtgctgcttggactgggagtgattccggcaatgcaagcacagactttcgacaaattatggaaagaagtgaagcaggcggagaaaaagagcttgcctaagacagtgataaaactgactgatgaaatttatcagaaaggagagaaagaaaggaattccgcacaaatgctgaaagcatatatgtggcggatgaaaactcaggatatattgacaccggatagcttttatgtcggtttaagagacttggagcaatgggcgaagcagacagaacagccgatggatcgcgccatattacactctttgatagcggaattctatgccaattatgccgccgacaaccagtggcaactccggcaaagaaccgagattgtaggtgagactccgtccgcagatatacgcgaatggacggcgaatatgtttgtagagaaagtgcggactaatgtaaaggaagctttggcggattctctcttattgctcaagacttcttcactcaattacattccttttgtggagctgggcgaaaccagcgaatattatcatcacgatatgtaccatctgctggcttcccgtgccattagggctctgaatcagattgaaagactcgaacgcggcagtttcaatggtatcacagcttctcctgtgaaacaggatatttccaatatatatgagcgtatgactgacgcttatgagacggccgggcttaaagaggggtatgtattgaccatgcttcaatatctggaatggaaacgtggcaatgataacaaattgcagcctgtccaactaaaaaaaggattgggcgaatggacggcagacacatataatgccgctttggacgagcttaaaaggcagttcaaatcagagccgatatgtgcggaagtctatttggcacaagtccgctatgctgttgagaagatgcagcaagtcaatgctttgcaactttgtgatgaggcgatccgtctttatccgggttatcgcaggataaatgcgctgaagaatctccgtgaagagattttagcgcctttcttgaatgtcagtgcagtgagccaggcctttccgaatgaagaaatcaagttgaatgtgggacataaaaatctggatggctttactgtgcggctgtatcaggcgaagaaactggttaaagaacaacattattccgttcttcgtccgaaagattatcgggcaaaggatactgtatttacattcaaagctccggatttgggaacttacgtgatgcgtattattccggatattcgtgccaagagggatagcgaaagcaagtttaacgtgacgcgttttaaagtattgacttgccgtctgcccgaaaaccaatacgaggtggtgactctggacggacagaccggacatcccattcccaatgcgaaagttacactatacagtagtgacgagaaagtgttgcaagagtttacgaccgataaagaggggaaagtggtattcctcaggaataccaagtatcggtatctgaaagcctcgaaaggcacggatacggctatgccgaaacaaggaatttatggcggaagttatggatactatggcaataaagataaagctgttgaggaaatgacgttgttgaccgaccgttctctgtatcgtccgggacagactgtgtatgtgaaaggtattgcatttgcccagaaatcggacacagctgatgtgattccgaacaaagcctatacagtgactttgtacgatgcgaactatcaggaagtgggacggaaatctgtacgtaccaatgaattcggttcgtttgcgactgattttgctttgccttccgcttgtctgaacggagtcttttctttaacggcgggagagggtggaacgactgttcgtgtagaagattataaacgtccgacatttgatataacttttgaaaagcagacggaaagctacaagcttggagatgaagtgcaggtgaaaggtaagattcaatcttatagcggtgtgtcgcttcaggatcttccggtgaaatatacggtaaaacgttctgcatataacctctggagaatttcgggggctgtgcagattgcttccggagaggtgactgccaatgagaatggagaatttacgatacccgtccgtctggaggaaagtgacgagtataagaataatgatagagtatattaccgttattccatcgaagctactgttaccaatgtggcaggtgaaacgcaatcttctacagatgtgattccggcgggtaaccgttcgttggttctacagatggagttggacaagaagacatgcaaagaccggccgtttgatattgtgtttaaagctcagaacctgaacgaacagcctgtggaggtgaatggcaattactatctgtatcccctcgaagagacaaacgtgaaagagagtagcctgaaagaaaccggctttaagaaggcaagtgagaatcccgttgcaacaggaacatttacttctaataaggaaatgacgcttgactggaagaatcttccatcgggaacttatatgttgaaagcggtagcgaaagacagtcagggaaaagaagtggagacggaggctcagacgatcctattctctatcggcgacaagcgtccgccggtgaaatcacctacttggttttatgcggaaaatacggagtttgatgcaacccgcccggcagtattctgtttcggtacttcagaaaaggacacttatgtgatgatgaacgtcttctgtggtgataaacaactggaaagtaaggcgttgaacttgtccgatacgattgtgcgttttacctatccgtatctggagagctatggagacggtatttttgtgaacttctgtatggtaagagacgggcagctttatcaggaacaggtctccgtagagaaacgcttggcggataagacgttgacgatgaagtgggaggtgttccgtgacaaattgcgtcccggacagaaagaagagtggaaattgacgattaagacaccgcaggggcaggccgctgatgcggaaatgctggctacgatgtatgatgcgtcattagataaaatttggaatcgccgacaggatttccggctttactataatcggatacttcctaatttccgttggatgaatggctatttgggaaacaactcattcaattactggtggaacaataagacgctgaaagtgccggtgctggcgtatgactatttcgtaatgccgtcaaggatcggaaatgtgttctttgaatccgaaatattggccgatggagtgatgattagaggggggggagtgcagaagaaagcagcaatgacgggcagtgttgcaagtcggagcaatgtggtggaagtgaaatatgtgcctgccttagtctctgaggctactgatgcggaatttgaagaagaaacccttcctgatgcgcccgccgacttgcgtacgaaccttgccgaaacagctttcttctatccgcagcttcgtacgaatgaacagggagaaatatccttctctttcactatgcccgaaagtctgacacgttggaactttcgtggatattcccataccaaaggaatgctgacgggaacgttggatggtgaagctaccacgagcaaggaatttatgttgactcctaatctccctcgcttcgtccgtgtaggcgacaagacgtctattgccgcttctatttccaatatgacaggcaagccgcaggcaggtacagtcagtatgattcttttcgatccgatgacggaaaaagttgtcagcacgcagaaacagaaattctcggtagctgccggaaagacaatcggagtgaatttcagatttaccgtgaatgataaatacgagatactgggttgtcggatgatagccgatagcggtacgttcagtgacggtgagcaacaacttcttccggtgctgagcaataaggaacatttggtagagacgcttccgatgcctgtacgtggagaagaaacccgtacattctcactcgacagcttgttcaatcagcatagtaaaacggcgaccgaccgcaaactgactattgagtttacgggaaatccggcttggtatgccattcaggcactgccttcgctaagcctcccagtgaataataatgctatttcgtgggctacagcctattatgcaaatacattggcttcttacattatggacagccagccgcgcattaaggcagttttcgatagttggaaacttcaaggcggtacgaaagaaaccttcttgagtgatttgcaaaagaaccaggaagtgaagaacattctgttgtccgaatcgccgtgggtactcgaagccaagacggaagaacagcagaaagaacgtatcgctacgctgttcgacctgaataatatccgcagcaataacattgcggctttgaccagattgcaggaattgcagaattccgacggtgcttggtcatggtttaagggaatgaacggcagtcgttatgtaacggcttatattgccgaactgaatgcccgccttgcgctactgacaggtgcgccattgagtggaaccgcccttgacttgcaggctaaggcattaacttatcttcatcagtcggctttagaagaatacaagaatatactgaaagcgcagaaaaagggagtgaaacagacaggagtttcaagcggtattctgcaatatctgtatattgtcgcgatttccggtgaacaggttcctgcggcaagtaagattgcttatgcttattatctgtctaaagtgggagagttgcttacctcttcttcgatggaaacgaaagcgattgcagccattgtacttgataaagccgggcgtaagaaagaagcccaagagtttgtcgcttccttgaaggaacatctgacgaaaacggatgagcaaggaatgttctttgccttcaacgagaatccgtatgcttggggaggtatgaagttgcaagcccatgtagatgtgatggaagcattggaactgattggcggaaacggaaaccgggaaacaatcgaagaaatgaaactctggctgttaaagcaaaaacagacgcagcagtggagttctccggtagctacggcggatgctgtgtatgccctgttgatgaaaggcgccaatttgctcgataatcaaggggacgtacgtattgtgattgccaacgaggtactggaaacggtatctccgagtaagacaaccgttccgggattgggttatatcaaacgttcgttcacacagaaaaatgtggtagacgcccgtaagattgaagtggaaaaaaggaatccgggtatcgcttggggagctgtttacgctgaatacgattctcctatcagtgatgtgaaacaacagggtggtgcattgaatgtagagaagcaactgtacgtagaacgcatagagaacaacgttgcacaattgcagcctattacttcaaagaccgttctcacagtaggtgataaagttgtttcccgtctgaccattagtgtagaccgtacgatggactttgtgcagttgaaagaccagcgtggcgcctgcttcgagcctgtcggcagtatttccggttatcgctggaacaatggattcggctattatgtagacattaaagacgcctctaccaacttcttcttcgaccatttgggtaaaggcgtctacgtactggaatacggctaccgtgtgagccgtgaaggaacttacgaaacaggactagtcactattcagtgtgcatacgctcccgaatacgtttcacattccgcatcaatgacaattattattgaataaccaaaagcgaagattttagtttgcagacaaggcatgacaggcctcgtctgcatgtaaagtcttttcccaatctgtgttaatctgtgtaatctgtggtgagaaactcatctaaaagtcctacatttgtgcaccaaaataaaaaagtatcgcatgaaacgtagtttgctatttatattttctctactcactgtcgctttggcggccgttgcccaacctcgcatctcttccaataaagagacacataatttcggacaaatagaatggaaacgcccggtgacggtggaatatacaattaccaataccggtaaccagccattggtgcttaccaatgtcactacctcttgcgcctgttccgtagccgactggaccaaagaaccgattgttcccggaggaaaaggaattgtcaaagcctcctttgacgccaaagctttgggacactttgaaaaaacagtaggaatatacagcaatgccacgcccagcctgatttatctgaaatttatcggtgaagtggtgcaagagataaaagactataccaagactcatccttatgcaataggcaatatccgtatcgatcgtgacgaatttgccttccccgatgtgtatcatggtcagaagcccacgatgacttttagcattgcgaacctatccgaccgtccgtacgaaccggtgttgatgcatctgcctccttaccttaaaatggaagcggagcctaaggttctgctgaaaggtaaaaaaggcactgtgaaactgacgttggatgccaaccagttgaaagactacggattgacgcagacatccgtttacctttcccgtttttccggtgataaggtgagcgaagataatgaaataccggtttcggctattcttcttcccgacttctcgcgtatgacagcgaatgattctttgaatgcgcctgctatacgaatctcggaaacggacatcgatcttagcgtgccgttgataaagaagaagaaagccagtcatgatatcctgatcgctaatgccggaaaaactccattggtaattagtaagttgcaggtattcaactcatcggtcggagtcagtttgaaaaaaacggtacttcctccggatggaatgacgaagttgaaagtgactattcgtaagcgtgatgtgggtaataagaaacaccacttgcgtatcttgatgataacaaatgacccgttgcgcccgaaagttgaaatcaatatcaaacgttaaatcctatcgctatggaacatcctgagaatagtgaagaatataaggggcttgttgtcaataaaggcattgaacagccctcgtcggtgaacccttatctgaaacggaagcctaagaaacgccagctctcggtggctgagtttgtggacggcattacaaaaggtgatgttactatactaagtcaggctgtgacgttagttgaaagtgtgaaacccgaacatcagtccgttgcccaagaggtgatagagaagtgtcttccctattccggcaattcgatccgggtaggtatcagcggtgttcccggtgcaggaaagagtacttcgattgatgtcttcggcctgcacgtgctcgaaaaaggcggtaagttggccgtgctggcaattgacccgagtagtgagcgtagcaaaggaagcattttgggagataaaacccgtatggaacagctttccgtacatcctaaatcatttatccgtcccagcccgtcggccggttcattgggaggagtggcacgtaagacgcgtgaaacgattattctttgcgaggcggccggatttgataaaatctttgtggagaccgtgggagtgggacagagcgagacggctgtccattcgatggtcgatttcttcctgttgattcagttggcgggaacaggagatgaattgcaaggtatcaagcgtggcattatggagatggcggacggcattgtgattaataaagccgacggagataatctggaacgtgccaagctggctgccactcagttccgtaatgcgctgcatctgtttcctgcgcccgaatccggatggacaccaaaggttctgacttattccggtttttacaatataggcgttaaggaagtatgggatatggtttatgagtacatttgctttgtaaaagaaaatggctattttgaatatcgccgtaacgagcagagcaaatactggatgtatgaaagtatcaatgaacagcttcgcgacagtttctaccataatccgaagattgaagccatgcttcaaaagaaggaacaacaagtattaagtggtaatcttacttcattcatagccgccaaaagtttgctggacacttattttgaggacttaaagatgtagttcaccacagattacagttcttttcctatcttttcgaagtcggctcttgatttgctctgtgtcacgatatatactcccaagaacacgagtgcgatagccagtcctttctgccagccgaagcttcctatccccatgatgatggcagcgattgtagctacaatcggctgcatatagttatacatactgacaacggtgggacggagtagtttctgtgcggtcatgatgcagagataggcaaggaaactgcctcccaatactacgtaaagaacctctatgatggcgattgtggagactgccccccattgaatgatggaaatgtcgtgataagagaacggtatgtaacacatcgaagcgtaaacgaacatccacttattgatagtgactgccgaatattgctgggataatcccttgaatacggttaagtagatggagaaactgatctgtgccaccaaacaaagcaggtcgccgattaagcttccgtttccgttgtttcccgcttggctgctcataatgaggataagcgctcccatagcgccgacgaaaatacccagtacctttttattggtaatcggttctttcagataaatagccgctacgatcatagtgacaatcggtaaagtagtggttacgatggaagcgtcgatgggtgaagtcattgaaaggccgaaaatgaatactccctgattgaacaccaaagcaaatagtgaagcgaagaatatcttcagcatatcctgatgattcacgtgttcctgtttgcagaaaatggaaagtatccaaaaagccgccgccgctcccaccatccgaaaagtggtgacggatattgcggagaattcctgaagcgctgatttaccgataggagacatcagcccccacatgacgtttgccgtaagtgcaaacagatgaccttgcagattcttgttattcttcataagtgtgtatacgcctttttaattgttacctttattgaaaactgctgcaaaggtagctaatttgtcgtatgatttgtttatatttgccttgaataaaattgaatattatggaacaacaggccaactatatccgtcgtatcgaaattcatggactctgggagcgttttaatataggatgggatttgcgtcccgatgtgaatatcctttccggtattaacggagtaggaaaaactaccatcttgaaccgttcggtaggatatcttgaagaactctccggtgaaatgaaaagtgacgagaagaacggtgttcgtcttttcttcgacaatcctcaggcgacctatatcccatacgatgtgatccggagttacgaccgtcctctgattatgggtgactttactgctcgcatggccgataagaacgtgaagtccgaattggattggcagctttatctgttgcaacgccgctatcttgattatcaggtcaatataggtaacaagatgattgaaatgctctccgataatgacgagaaagtacgggtcaaagcagctactttgtccatagccaagcgtcgttttcaagatatgattgacgaactgttcagttatacacgcaagaaaatagaccgtaaacggaatgatattgctttctatcaggatggagaactgttgtttccttacaaactttcttccggtgagaagcaaatgctagtcattctgttgaccgtgcttgtgcaggacaacagccattgcgtactgtttatggatgagccggaagcctctctccacattgaatggcaacagaagttgattgccatgatacgtgagttgaatccgaatgtacagatcatcctgactacccattcgccggccgtcattatggagggctggctggatgcagtgacggaagtaagtgatatttcaacattatataataatggcaacttcactacgagataatctgacatcttcttatttcaatgccgctcataagctttattcaaagaaggcccgtcggcgtatcatagcttatgtggaaagctatgatgacattgctttctggcgtacgttgctcgaagaatttgaagatgacgaacactatttccaggtaatgcttccttctactacttcattggctaaagggaagaagatggtcttgatgaatacgttgaataccgcggaactgggaagaagcctgattgcctgtgtggacagcgattatgatttcctgttgcagggcgcaaccaatacttcccgtaaaatcaaccgcaacaaatatatcttccagacctatacatacgccattgaaaactatcattgctttgccgaaagccttcatgaggtatgtgtgcaggctacgttgaacgaccgttttgtgatggacttcaatgcttacctgaaaagatactctgaaatcgtatatccgcttttcttatggaacgtgtggttctatcgccaacgggatacttacacctttccgatgtatgattttcatgcctatacttctctgcgtgagataaatctcagacacccggaaaagagtcttgaatcattgcagcaacgggtaaatcagaaattgtcggaactgaagaaacgtttttcccgcagcatgaatcaagtaaatgccttaggaacagatctgagagagttggggctatttccggaaaatacctatctgtatatgcagggacaccacgtgatggataatgtggtgatgaaacttctgattccggtttgtacggtattgcgccgggaacgggaacaggaaatcaagcgacttgccgaacataatgaacaatttaagaacgaattgacttgttatcagaacagtcaggtaaatgtggaaatcatgttgaagaagaatgtagcctataagcggcttttccactacgactggctgcgacaggatattcgtgaatacttggaacgagggaaataagaacaagaaagaagaatagagagaagattactcatgaaagaagtaaaagaaatagttgataccgtgacagttgagttggccaatggcggaacgcaggaggtgactgatgtagtgattcaggaagtgaaccatgcattgctttcggcaggaatggatgaggctttggcggataaggtggacaactttgtcattttgttgctgattattggtgtggccttattagctaatctgatttgccgtaagatcattttgcgtacggtagcgaaattggtgaaacagaccaaagctacttgggacgacatagtgttcgaccataaggtgatggttcacgtcagccggatggtagctccgatattgatttaccttgctattcccatcgcttttccggaacatgccgactccaacttgctcgatttcctgcgacggctttgccttatttatatcttggcggttttcctccgtttcatcagtgtctttctgtcggcggtatatcatgtttacagtgaaaaggagcaatataaggacaagcctctgaaggggttgttgcagactgctcaagtcgttcttttctttgtcggggccattattatcgtaagtattctgattaagcagagtccgatggtgttgcttaccggattgggagcttcggccgctatcctgatgttggtgttcaaggatagtattatgggttttgtttctggtattcagctttctgccaataatatgctgaaagtaggcgactggattgctatgccgaaatatggcgccgacggaactgtgatagaagtgactttgaatacggtaaaagtgcgtaactgggataatacgattacgacgataccgccttatctgctggtcagtgattctttccaaaactggcaggggatgcgggaatccggtggacggcgtgtgaagcgttccattaatatcgacatgaccagcgttcgtttctgtacaccggagatgttggcgaagtatcgtaaaatccaattgttgaaggagtatgtggaggcaacggagaaggtcgtgaaggagtataacaaagagcatcatattgacaactccgtattggtgaacgggcgtcgccagactaacttgggcgtctttcgtgcctatcttacgaattatctgaagagcctgcctaccgtcaatcaagacttgacgtgcatggtacgccagcttcaacctaccgaaacaggtattccgatggaactttatttcttttccgcttctaaggactggattccgtatgaaggcatacaggcggatgttttcgatcatgtgcttgccattattccggaattcgacttgcgtgtcttccaaaatccgtcgggagcggacttgcgccggataggagtaaagatagaaaactgatagaggatattgcagtgtaataacattgcaatgactctttcaattgattgtattttctttgtctcaatcttgtaatacagcccatctacctttgccgacgtaatcaaaaacgtagagtaaaggtagatgaaaaagctatttcttatccgattttcagtggtggccttcttttgtctgctgtgtgtacttcctgcattggctgccaatatcaagattaaaggagctgtaaaggacaagttatccaaagagcctttgataggtgcgacgatacgcttgcttggaacccaggccggagcggttaccgatatgaacggtaattttgagctaaacggtgtgggagtgttggagggtatgtatgatatcgaaatcaaatacgtaggatataagactgaagtacgtcggaaggtccgcgtagagaatgggaatctggtcattctgaatctggagatggagacggatgcgcaagaactgtcggatgtggttgttgtggcgaaaaagaaccgggaaaatgagaatatggctttgctggaacagcaaaaggcggtcattgccgtgcagtcagtcagtgtgaaggaactttcacgcaaaggagtttcggatgcggaaggagctgtgacgaaagtcaccggaatttccaagcaggacggtgtgaagaacgtattcgtacgtggattgggtgaccgctataatactactacgttcaatggtttccctgtgccgtaggaagacccggaatacaagaatatctctcttgattttttcggaaccgaccttatacagtccgtaggagtcaacaaagcatttactgccgggaacggaggcgatgtagggggcgcaaatattgatatctcgtccaaagaactggtaggtgacggttacattagcgccagtgtatcggccggtgtgaatacacagaccctttcctctgatttcttccaaccggatggagtgaatctgctgggatttgccaatcggatggaaccgggcacggatgtgtggggctttaagaacaaactcgccccgtcggcgcaaaacttccagatggaccgcagttataatatcgcaggcggaaagaagttttatgtaggtcggcaacgggatgctctttcgttctttgccactgtgggacattccgttgattatcgatatacggatgaaatcatacgtaatacaaatacgggcggtactatatacaaagatctgaacggacataagtcaacaacgaatatcagtcagttggcattggctaatgtagattatgatatgcacaatcgtcatcatttgtcttacaacttcatgatggtacatagcaatgtacagtcggtgggaaactacgaagggaaagacgctactttcagtgatgattacggtaatctgggaatgacccatcgtcagcaggtgaacgacaatctgttattagtcaaccagatcatgacgaactggggattgacagaccggctgagcgttaacgcaggagcctcttataatatggtgcgcggatatgagccggatcgccgtatcaaccagataacccggaatgaaaccggatacggattggtaggaggtaatacacagttccgtactttttcttctctgacggagaatgatctgaatcttcgtgccggagtggtttatcgcttgaaagacgattgggaagaaatctccagacttcggttcggatacaccggacgtatcattaacgatgatttcaaacagacggaatacaatatgattaccttgaatggtccttcatttacttcggtggacgatatttcattggatgacttttattctgcggctcatttcaacgaccgtttcacgctggacaatgcggtggataaatatacggtgaagaagaacatacattcggtgtatgcggaagcggtctatcagttcacccggcattgggtgatcaatctcggtttgaagtatgataatgtggatatgaccgtagactacaatgtggataaaggaaactccaaaggcaagaacaatatccggaaaaactacttccttccgagtttgaacatgaggtataggctgaatgataagaacgccttgcggcttggattgagcaagacatatactttgcctcagtcgaaggaaatctcaccttaccgctatgtgggtgtcaactttaagagtcagggtaacgcaaatctgaaaccgtcggacaattacaacatagacttgaaatgggatttcaaccctacatcaaccgaattgatctctgttactgctttctacaaaatgataaagaatcctatttcgcgtatcgaaacgccaagtgccggaggtttcctttcatacgaaaacgtagccgaccaggctactgtgacggggattgaactggagatacgcaaaaaaatattctcacgcccgacagccaacaacggtatgaaccgcctgacggcaggattgaacggatcgtatatctacacgaatgccaaagtgaacgaccccgatattgccgctaccgatacggatggctcgcaactggaaggggcggctccttggattgccaacttcgatctgtcacacacctatgtttcagccggatattcatttaccaatacattggtcctcggatatgtgggagaaaaagtgtacactatcggtacacaagggtttcaggatgtgatggaagagggagtggctacgctcgacttcgtatcgcaagcgaagttaggtaaacatattgcccttactcttaaagcacgcaacttgcttaatccctcctatcaactgagccgtaaggcgaacggtagcggtcagaaagtgatattgggcgactataaaaaaggaattaacgtgagcttgggagtgtcgtgtacattctaagccctatataaacagaaatattatcaattaaacgctaaaaagatgaaaagattattcttaagtatgatggcaatggctgctatcacaacaactttgactttaacttcttgtggtagtgatgatgacgggaatgatacttccgacggggcttctattctagctgccgacggtaaaacattgatgggaaacctgaccggtaaacaaacgttggaagaaggggaatacattctgggtggaacggtgattatcgaaaatggaggcgaactgactattcctgccggaacaacgattaaagcgactaaaggtttcagtagctatattcttgtagcacagggtggaaaactttatgctaacggtacgtcttcacaacctgtcacatttacttctggagaagcgacaaagaaagccggtgactggggaggaattatccttaatggtaaagctcctatttccggtgcgggagcagagggtactaatacagccaatgcggagattaacaatgcttacaaatacggtggtagtgacagagccgacaattccggtgcgctgacttatgtgaatatcctctatgccggtgcacgtaatacggctgatattgagcacaacgggctgactttgaatggtgtgggtaacgggacgaaaatccaaaacgtttatgtgttggaaagtgccgatgacgctatcgaattcttcggtggaacagtaaatgtgactaatctgctggctgtcaatccggatgatgatatgttcgatttcactcaaggatataagggcacattgagtaattgttatggtatctgggaagacgggtataccagcacggaagaagatccgcgtggagttgaggctgatggtaatctggatggaaacggagtagaccatgtgggacagtctgattttatcatagacggaatgacgattatcaataacacggtagatggaaatacgactaccggacagaagaatgcaatggacgatgtaatcaaggtacgtcgtggcgcgactgctactatcaagaatacattggtagcttctacttcggctgatgcactgaaagcgaaagacctggttgacgctaccgactcaaaagggggaggcaccgtgactatcaatattacgacttcttctttctcatatacaaacgaaaaagtggtggattatgttgataaaacaaatcccgataagaatgtcgttgggcagggaactatcacactgactaatccatcggcctctaatgccggtgcaaacacttccgtttttgcttggacaaactattcttttccgactttgaattaataaaagattaaagaggtttttcaattgtttgatgcgtgcgtcgataccgacgtacgcatttattgttctgtttgtcaacgattttgtttatacagccttgaattttgagttgtaaatagctgtttgtaatgtatttttcttatatttgtgtctttaaaaatcaatattatgcatacagattacgagcggtatcgcaaaatggcttctttggctcaagtcggatggtgggaagcggatttgacgggaggatattatctttgttccgactttctttgtgatcttttggatttggatggagatactatctcattttctgattttctgaacttggtgcgtgaagattatcgttgtcagattgcacatgagttccgggcaaatagttctatccataaggatttttacgaacagacctttcccatctattcgaaatatggcgaagtctggttgcatacccgtttggcttcccgtgagaaaggaacggggactaatgggggagacaaatcttttggagtgattcaacgcgtggaggctcctgaacaaatagaacagaagaaagctctgaaacgtgtgaatgacttgcttctccgtcagaactacatttcgcagtctttatatcgttttcttcgggatgaaagagttgaagaatgtgtaacagagattttaaaggatatactgaatctttataatggaaaaggacgtgtctatattttcgagtacaataaagaacacacttatcgcagttgcacgtatgaggtcgtttccgaagggatgtcgacagaaaaacaatgttggcaagacataccggtcgatcggtcggaatggtggaatcagcagattttgtctggcaaagctatcgttttgaattcgttgaaacaactaccggaagaagtatcggaaatgcgacgagaatttgctgaacggggagtctattcattcatggtaacgcctttgatggctggggatcatgtatggggaggaatgggtattgaattgatagatagttatcgtaactggagtaatgaggattttcaatggttctcttcgttgggaaatattataagcatttgtattgaactacgcatagcaaaagataaagtaacttatgaacagtctttcttacgtaatcttttccattttatgccaatggggtatatacgtatgtctgttcttcgtgacgagaacaacaagccttatgattatcggataacggacgctaaccagatcagtgcccatttctttggcaaacctttggaacaatatgtaggtgtgttggcttcggatttgttttccgatcattcagagaaaatggattttatccttgaagtgcttgatggtaagtcttataaagaaaaggatgagtattttcctcaaacgggattgtacactcactggattgtgtattcaccggagaaagatgaggtggtaggattgtttacggactcaactgaggctgtagaggctaatcgtgcattggaccgtagtgagaaactttttaaaaatatatttgctaatattccggcaggagtagagatctatgataaggatggatatctgcttgatctgaacaataagaatttggaaatattcggaattgccaataaagaggatgtaataggtattaacttctttgaaaatccgaacgtgccgcaaacgattcgtgatcgtgtacgaaatgaggatttagtggatttccgacttaattattctttcgaccagattaaaggatattatcgtaccatgcgttctaatgttatagaactgtattcgaaagtaactaaactgtacgatagagagggagagtttatcgggtatattctgattagtattgataatacggaacgtattgatgcaatgaaccgtattcgtgattttgaaaatttctttttgatgatatccgattttgcaaaagttggttatgcgaaattaaatcttctgaatcggaagggatatgccatcaagcaatggtataaaaatatgggggaagaggaagacattgcattaagtgatgtagtaggagtctatcgtaaaatgcatccggaagaccgcaaaggtctgcttgatttctataaagaagtcaaagtcgggaaaagaaaacattttcaaggggaaatgcgtattcttcgtcccggaacggaaaatgagtggaactgggtaaatacgaatgtgatggtaacccaatataaaccggaagagggtgaaatcgaaatcattggtatcaattatgatataacgaaactgaaagagacggaggctgaactgattcatgcacgtgataaggcggagatgatggatcgtttgaaaagtgctttccttgccaatatgagccatgaaatccgtacgcctctgaatgctatcgtaggcttttccgatttattggtggaaactgcggatatagaagaacggagagagtatatgaagatcgtgcgggaaaataatgatttgctgttacagttaatatcagatattctcgacctttccaaaattgaggcagggacatttgaattttcgcatggagatgtggatgtgaatctgctgtgtgaagatctggtccgttctatgcagatgaaaacgaaagagaatgtaaagttagtattcgaaccaaatttttctatttgccatattactagtgaccgtaaccgtatatatcaggtgatatccaattttgtgaacaatgcgattaagtttacttcagagggcaatatccgtgtgggatatgtgctgaaagatgaaggattggaattctatgttcaggacacggggataggaatagagaagaaacaattaccgcacatctttgagcgttttgtaaagcttgattcttttgtgcatggcacgggattaggactttctatttgccaaagtattgtggaacaattaggtggacatattggcgttgattccgaaaaaggtaagggatcgcgtttctggtttacgattcctggagtggtcatgacggaagaaagtcttcagtgaaaaactacaaatctaaacaaaaaagcgtatgccactttaaagtgacatacgcttttttgtttagattccaaatgccagtttgtcgatagactggtatacaacgcttgcgatacctagtccgatgatgcccaacgtacagagtgccagtccccactttgtgcatcggtcactgcggaaagtcggaatcgggttttcggacggggtgatatacatcgctttcacgatcagcaggtagtaatacagtgaaattactgtattgaccaatgctataaacaccaacaaatggaaacctgcatcgaaggccgccatgaagataaaaaacttggagaagaatccggcaaatggaggaatgcctgctaatgagaacaaagaaagggtcatcaggagggcgatcttcggattcgttttataaagtccggcataatcttcgagggtgaacttctggctgcgcaatgccacaatagtgattacggcaaatacaccgagattggcagctgcatacacaagtacataatatactagggctgtcattccctgtgccgtgccaccgattacaccaagcatgatatatcctgcctgcgagatactggagaatgccatcagacgtttcaggttctgttggcggatagcgaatatattcgcgatggtgatggaagctatcgttacccaatagagcacttcctgccaatcgtttatcataggagcaaataccttgatgaggatagtcagcaatacaaatgccgccgatcctttggatacaacactcaagtaagcggtgaccgtactcggggctccttcgtaaacgtctgccgtccaaagatggaacggaacgagcgataacttgaatgccatacccgtaaagaagaatacaaatgccataatctgtaacgggtttccgtcaatatgggcgggaaggtcatcgaaatacaaggttccggcagaaccgtaaatcatagacaaaccgaacagcaacaatgcgctggagaagagtgcggtaagaatatacttggctcctgcttcagcggagttgtgacggtatttatcgaaggcaatcaaagctgccatcggaacggaagcagtctccagtccgatgaagaacatcaggaagtgtccggcggaaatcatgagatacataccgaacagagtagagagagtgagtacatagaactctccttgcttgaatgaagtgtcttcacgcttcatccattcgtgcgccatcagaaagacgattaatgtacctacgttcaggattgacttaatgactgtatgcatgggcacatagtggtacataccgccgaaaatgtcggcagtggtacccggtatcaggttgatagccgtatggatagccatcagaatgacgggaaacattgtattcagtcgtgcctttccatcgttcttgtgcgcatccgggctcatgaagaggtcggctagaaacagtagcaacagaactactacgagcgacagctcttctcgcatatgtagaaattgtgaataatccatctttatcaattaaattagagattaaaaattaaagagctagggtatcagttgtgagacaacgggcaatacactttcaccaatcatgtggcttacccagaaaggagccatacccagtccggctacacaaacgatgaggcagataacggctacacgctcgtcccaagttgcatcggtcagttcgaggtgatgcttgttggtacaggtcccgtacagaatcttacctaccagacgcaagatatagactgctgtaatcacgatggaggagcaggctataatggtcagtgtgcggtggaatacatcattgtcttggaaagatccaacaaagatggtcatctcggcaataaaaccgctcaatcccggcagaccgagattggcaaggccggcaatgacataacatacactcaggaaaggcatgatcttcatcaaaccggcaagctcgcgtacgtcacgggtgtgggtacgtccgtaaatcataccgataagcgcaaagaacaatgctgtcatcagtccgtgcgacaacatttggaggatagcgcctgtggctgctgtctggttcagcatgaggattgcgaaaagaactaatccgcaatgggatacggaagagtatgcgttgatatatttcaaatcagtctgtacacaagcggagaaagctccgtaaacgacagagataccggtcagtatcaggaatatccaggaaagttcgttagcggcttccggcattagatacatggcgatacggaaacaaccataacctcctaatttcatcagcactccggcatgaagcatggaaactgctgtcggagcggaggcatgaccgtcgggactccatgtatggaaggggaaaagagcgcctagcacaccgaaaccgagaaatgtcagcgggaaccagatacattgttgtgcaaaaggtatgttgtgcaactgtgcgatttcaagaaggttcatggtagtggctcctgcaccgaaatagattccgagaataccgatcagtaggaaagcggaaccacccatcagcataagtgtcagcttcatcgctgcatattccttacgtcccgaaccccatacgccaatcagcagatacataggtatcaaggctatttcgtagaacataaacatggtgaacaggtctacggatataaagaatccgaacactcccatcgccaacagcgtgaaccaaaggaaatattctttggtcaacggttgcaaacgccaggaagcgaatgtgccggtaaatacgataatggcggacagtaacagcatagctaccgagatgccgtctacgcctaccgagtaggagatatgaagcggtgcgtaccatagtgtgtctgcacggaaaagcatttccgccgtgtttccggcgctacgctctcccaaatacatgaatgtaagtacgacagaggctatcagaagcgctgatgcgcccgtaaccataaccccccggatagctttaattcctcgtgccgcccaaagtccggccaacatcaggagggggataagtacgaatattgataagaaattcatctttatgatttactgtttaaagatttactattacttgtttagagaaccagcagaagaataagtgccagtgcaccgcaaaggaacacatacgcatattgttgtacctgaccgctctgtagaccgcgaatctcatcgcttgtcgcatttgtcgcccatgccaggaagtcgaagaatccgtctacgacatgacggtcccaccatgcgataggagtagagatgcaacggaaaataatcttatgcgtaatgaactggtatatctcgtcaatatagaaacggtgataggcagccttatgcaatcccttgaactgttgagccagcgaatcggcgacaggctgtttggcgttcttatacatccaggtcgcgatggcaatggaaataatcgcgataacaacacttgtgatagccactgacgggtcaagatgaatggagtaggattcaccgttggaactgataaagtgtccgaaaggaataaatccggctccacaagtcactgccgccagaaacatcaatgggaaagtcatagccaacggactttcatggggagtgtgatgcgcatgaagttctttgttctcttttccccagaagataccgtagtaaaggcggaacatatagaaagcggtcatagcggcgattaccgtcatcacccaacccattacagagctgtattggaagcaagctgccagaatctcatctttcgagaagaaacccgagaatggggggatacccgcaatggcgagacaagcaatcaggaatgtccaatgggtaatcggcatatatttgcgtaatccgcccatagccgacatctcattagagtgtaccgcatggataatgctaccggcaccgagaaagagcagcgccttgaacatggcgtgcgtgaaaaggtggaacatggatgccatgtatcccaaaccgccttcatgaggattcattgatgtacaaacccctaaagccaccatcataaaaccaatctgcgagatagtagagaatgcgagtacacgtttgatatccgattgtacacaggctacacttgctgcataaaaggcagtgattgcacctacccaggcaaccatatgcaacgtattcggagcatattcgatgaagagcggaaacatacgtgccaccagatagactccggcaactaccatcgtagccgcatgaatcaaggcgctgacaggagtaggaccttccattgcatccggcaaccagatatgtagcgggaacatcgcactctttccggcaccacctacgaacattaatccgagagctaatggaagcatagccgctccgccgctaaccagcgataccgtatccggagtaaaaccgaacgttcctccgtaatatccgtaaatcaagataccgatgaggaagcccaggtctgcaaaacgagtgacaataaacgcttttttggaggcggagattgcagcaggttttgtatagtagaatccgattaatagataagagcttacgcccactaactcccagaaaagatacatctggaaaatgtttgtagctactaccaatcccagcattgacatggtgaacagggaaaggaaagcgtaataacgttgaaaaccgatctcgcctttcatgtaaccgaaggaatagatgtgtaccattagcgacacggtagagatgacaatcagcatcattacggatataggatcgagcagaatgcccaaatcgaaatgtaacgtctctgtaaaaggtagccacgtaaaattataaggtatcaatgtggcaaatgttccgtcttccagtcgcggggctgagaaatattggaaagcagtcacgtaagacagtactgctaccgctcccagtaccaacgtaccgatggcacctgccgtccggtgtgacatccattttcccccgattcccaataggagaaaggagaaaaaaggaagaaggagtattagaattgttagttccatacagtttattttaattacttgagttattattacttatacttaccatttcaagtcgtccagattgcgtacctggatgcttcggaggttacggtaaatgttaatcataatcgcgatggctattgcggtttccgcagccgagatggcgatggaaaacaatgcaaagaaatagccctccattcctcccggaaagataaaacggttgaacacggcaaagttgatatctgtagcgtttagcatcaactctacggaaatcaggatagccagcgtattgcggcgggtaaagaatccatagattcctgcaaacatcatgatggtagagaccaccagataatattccatgtgtatcatatcagtgattcgttttttagtgattaatgattaacgtttgcgggcgatcatgattccaccgatgatacaggccagcaataagatactgactgcttcgaaaggcagtacataaccgtacttgtcgctactcaacaaagcgtgtccgatcgtatggatgtttatctcctgcggggcaagattggctgtctgcatgaagttatgcttcagcgtgataaacaggattatcgccagaccggcaatcattgtaaagagtcctgccagaaacctgcttcgtttcagcctttcggcacggtcaccttctccactggtcagcaggatggagaatacataaagcacaacgataccaccggcgtaaaccataatctggacagagcccagaaaggtgtagcccagcaagaagtagatacccgctgtgccgaaaagcacgaagagcaggtaagtagccgagcggacaatgcgttgggtagtcaccgtcatgatggacatagcaataataaatgctgccaaaaagtagaatactactgtttcaagtgttgatcccatatctatacttcttttttcttttctattactttactgccgggacggttcagttgcaagacgagcttcgtccggtcgaatactgcgtgttcgaagttctggtcgaatgtgatggcgtcatgcggacacgcattcacacaaagttggcagaagatgcaagatcctaagtcatattcgtattttgccagaattttcttctttttgccgtcttccgtttcgattgtttcaccggtcactttgatagtgtcattcggacaagccatctggcacaatccacaagctacgcagcgatgttcattattttcattgtggggcatgttcagtgttccgcgaaaccggtcaaacattttcagttccttacggttctcgggatattgctcggtcactttcttgcggaagtacaccttgatactggttttcatacccgttgccagtgtactgatgccatgcaccagaccacctaaatacgtatattttttatctttatattccataatctaatcaaaagtggaggccgaaggctacgcaacatgccattaataataggtttaccatagagataggaaccagatatttccattccagattcagaatctggtcgatacgcaaacgtgggaaagtccatttgatccacatcagcaggaatactacaaagaatgccttaccgaagaaccagatgaaaccgggaatgtaatccatcacggcattgaatccatccagcccgacaatgtgcaacggcatccatcctcctaaaaagatagtggcggcaacgctggctacgataaacagattcaggtattccgccaagtagaagaaaccgaaacccataccggaatattcggtgtggtatccggctgtcagctcactttccgcttcgggaaggtcgaacggaccacggttacattcagcgtttccggcaatcaggtagatgataaaggcaatcacggcaggaatatgtcctttgaagataaaccatccgttggcttgtccttccacaatctcagagaattgcatggttcccatcagtactaccatcgtcatgatactcatgccgacggaaagttcataactgataatttgcgctccgcttcgcatggcgccaatcagagagaacttattgttactaccccatccggcgagcaaaataccgaccacaccgatactggaagcagccagtagaaagaatacacctacattgaaattcagaattgccgctcccttgttgaaaggaatgcaggcgaaagtgaggaatgaagcgataattaccataaatggagcaaggttgtagaggaaatgatcggcgcctttcggcatgaagatttcctttgtcagcattttcagcacgtcgcataccacttggatagaaccccatttaccgacacggttcggaccgagacggcattggaagaaaccgcaaaccttacgttccatgtagattaggatgatggcgaggatggcgtacaatgcaacaaggcacacaccgacagccacacattctataaagatggccaatccttccggcatgacggagaggagtagctcatgtatccagtttgtaactatactaaagtcgaacattttttagtgttttagtggttagtgattaccggtctatatccggaactacgtagtctattgttccgccaatagcgatcaaatcggctatcttggctccccgacaaatcgtgtctatcgctgcaacaagcggcaaaccggtagaacggtagtggagacgataaggggttttgtcaccctggctttcgaggaatacaccgaactcaccgcgacttccttccacggcggcataataacttccttcgggaacgcggatgatgggtttcatcttttcctgatagggtccttcgggaatattgtctatcaattgctcgatgatattcaggctttccatgatttcgtccatacgtaccagataacgggcaaaacagtcgccttccgtataaatgatttccttgaaatccactttgtcatatacaccgtatggcattcgtttgcgtacatcgcaggcccatcctgaagcgcggcccgtacctcccgtacaaccaaaagaaatcgcatcttcacgactcaatataccgacacctttcatacggctttgtgcaatgatattgcctgtaaatatatcgtggtattcgtggataactcctcttaaataaggaatgaactcttttactcgtttgacgaagttaggatgaaggtcagcctgtacaccgccaatcgtattatagttcataatcaaacgtccgccacaagtctcttcaaagatatcaaggatcttttcgcggtcgcggaatccatagaaaaaagctgtcaaggctcctaagtccatagccagacaggagtagaataacaagtgagaatcaatacgttgcatttcgtccatgatcgtgcggatatattgcacacgttcacttacttcgatccccatcgctttctcaatacacatacataatgcgtgacgattctgatgcgcacccagatagtcaagacggtctgtcaaggccaatgtttgcggataagtgaggctttcattcatcttttcgataccccgatggatataaccgcagttggcgtcaatcttacggatgatctcaccttctagtgaaacacggaaacgcataacaccatgtgtagcagggtgctgcggaccgatgttgaccacatattcttcttccccgaaaagtctggtttctttgtttttaattgttccgtcagggttcagctcgatttcttgagttgtatcgaacgtctcctcattggtcatgcagagcgggttgtctttttctggatcattgtctttgcgcatcggatgacctacccagtcattgcgcaggtaaagacggcgcatatcgggatgacctataaaggtgataccatagtaatcgaaaacttcccgttcatagaagtcggctattttccatatatcgctgacagacgggatttccggttgttcgcggtttgttgtcgcagttttcagtgctatccgttcgcccgtaatggtagattccaaatgatagactacgcctaatccacggagcttctccggagcgtctttctcatctgccactccccagtccataccggtaaggctttcgagaaagtccatctgcttctcatttcgcaagcgcaacatctcgtcgtgtaatgctgcaggggctataaattgtatttcttgcataaatcctttttaataccttattcttcattatttaaatagtccggcttcttctcttttctgttcactccaccaaagaatcgttctattttcactttgcgttgcaattgcatcatgccataatagaaagcttcgggacgtggcgggcatccgggaatgtatacatcgaccgggagaatcttgtctactccattcaccacatgataggatttcttgaaaggacctccgctaacagcacatccgcctacagcaattacatacttcggatcgggcatttgatcgtacagtcgtttcaataccggagccatcttattagtgattgttccacataccataatcatatcagcctgacgcggactggcacgggctacttcaaacccgaagcgggccatatcataacgggcggcaccaagtgccataaattcgataccgcaacaactggttgcaaaagtaagcggccacagtgaattgctgcgtccccagttgatgaagtcgtcaagaactccgagagcgatgtttgcccctccggcattgagctctttgaccaacttttccaatgattcattgtcaatgaactcctcataaggaattgattttattttgggctttttggttatttccattccaaagctcctttcctccaggcatacgcaaggcccagaactaagataataaagaagaagagaatactaacaagtccctgcgggcctaaatcttgcatgaccactgcccatggaaacagaaaagctgtttcaacgtcgaacatcaggaacaggatggcaaacaggtaatagcccacacggaactgcatccatgatttaccacgtgtcgggataccacattcgtaagcctcgaatttttgtgcgttgtacgaacggggagagatagcgcgtgaaagagctatcaccacaccgacaaaagcaagcgctgtcagtaaaacaacaactaaaaatgtaaaattcataattcaatagctgtttagattgaatattatatagaaataaacaattagtttgtccaccctctgggggataaaaccaactgtaagagatgacgaatgaaagtgtcgactgtaccgtcggctaaaccacaatctttcttaacccatatatataataggagataggatcgtagaaatattcggaagagtgaagcgaagatgagggaggcggactttggaatttataatgttcgcaaaagtaagtgatcagtaacagtatacttttatctgccggaacatgtgcgacgtccgtatgattcatatcgcaggattgggtggaataaagatggtaaaggcgttccaaagcattatgtaccggacggtcctgagacacatagcacttctcctgccgataagtcggggaggaagctttgctattgttttccattgccccgtctgtagcgcaatgaatgagcaaagccagtaccaaaagtagtccgaattttaagctttgtttcatctttctcttttaatggctgcaaatatagaactaatatttatactttttgcaaagtcggggtggcaaaaaaggtttttttagcactccggttgatttatatcaatctttgtttagttcttcttccaaaagtcggaagtgaaaagcaataataccgtaaataattccagacgccccaacagcattaaaaaagaaagcagccatttggcggcatcaggcaattcactccatgagaaggccgggccgcatgtaccgagtcccggtcccatattacccatacttgagataaccgttccgattgattccagaaaaccgactcccagccccatcatgataagtatgctgatgatagaaattaccgcgtacaaaaaggtgaaagccaatactgtagattggatggaaggggagataacctgtttgttcacccgtaccggaagtacggcattgggatgcaggatatgtttgaattcattttttactaccttgaagaggatcaccatgcggatacatttgatacctccggttgtactgcctgcgcaggctccgatgatcattacgataaggagacacccccaaagaatagaaggccagagcatatagtcggctgtggcgaatcctgtcgaagtctgtagtgaaataacttggaagagggatttgcggaatgcttcttccacgctcatcggagaagtctgatagagccagactgcaatgaatatggtgaagaaagatacgcataggaaatagaatttcagttccgcatcatggatgaacttctttattttaccattgaacatgagcagtagcaacgtaaagttgatacctgaaaggaacatgaaaatagagattacataatctatataaggcgaatggtaatactcgatactggcctgtttggtggaaaagccacctgtactggttgttgtgaaagcatgacatacactgtcaaatatgctcatgcctcccactgtcagtaatataatcagagttcccgtcattccggcatagattccccatatccatttggcggtgacaccaatacggggatgcactttgtcatgcgttggtccgctggcttccgctgcaaatacctggatacctcccacaccgaaaatcggtagaacggcaatggtgaagaatacaattcccaaaccacctatccattgcgtcattgcacgccagaataggattccgtgaggcattgattcgatattgttcaagatagtggcaccggtactgctgaatccggacattgtctcgaagaatgcgtcggcgacattgggaatatatcctcctatataataaggtaacatcccgaaaagggaaaatgtaacccacgccacactgacaatgacatatccgtcacgtcggttgagtgatttttccgcccctttgccgatggcgagcaatacaacgcctataccggcagaaagagctgatgagattaggaaactttttaaatccccttcttcatagaagagcgagacacctccgcagcatagtaacatggctgtttctatcagaagcagaaagcctagaatccggaatatcatcttcgagttaatcataacaattacctgatacttactatctaattaaagaatttaattaaagaacttctcaattttcttaatcatcatactcaggcagaacaccactacgtggtcacccggttgaaccaacgtatcaccggttaccagtattccctctccattacggatcatacctccgatggtagttcctttcggaagccctaagtctttgatcaaatgcttggttatcttagctccggggggaacggtaaactctgcaacatccgcattggcgaatgtcaggcattttacattagacacatcagcatccagcatcatctggtagatgtggctggcggcgatcatttttttattgataaccgtgccgatgtcgagactttccgccataccgatatagtcgatattctccacctccgcaacagtcttttccactcccatgcgtttggcggcgagacaggcaaggatgttggtttcggaattcccggtcagggcaacgaaggcttctgtgtttttcagcccttcttcaataagaagatccatgtcacggccgtccccgttgataatcatcgtcttgtcatccaataattcggtcagtcggttgcaacgattgatatcattatcgacgattttcacttgcatatagtccggcacatattgggcggtacggacagcgatgcggcttccacccataatcattacattacgcacgtcggcataatcctctttcccggctatcttacgtatataaggaatatatttgcgggtagtggtgaagtaaacaatatcatttagtttgattacatcgtctccgcgcgggataatggtttccgttccacgtttgatggctactacgtgatatggaatggtgggaccgcctaactgatgtaggggaatatttagaatttccgctttcttacgcatctttgtaccgatcagcacgagtgctcctccgcaaaactcccaccattgacgtacccagctcatacgcatggaagatacaatctctttagcagccaacatttccggatagatcaatgaatctactcccagtttttggaagaactctttgtttttaggcagaagatattcgtagttgtcgatacgcgctactgtcttctttgctcccaagttggtagccagcatacaggcagtcatattgcggctctcatccggagtgactgcgataaacagatcggcctctttgacacccacctcctttagtccggaaatggaagaaggagaggcggcaactgtcagcaagtcgaagttagagctgagagcgcttagcttctcttcgtcatcatccatcaagataatatcttgcttttcacgcgataacaatttggccaaatgggtgcctacgtttccggcaccggcaataatgatcttcatgtcagttgataaattcttttattttagtcagaataccttcttcgtccataccgcataaatgatacagctctgcaactgaaccatgttccacaaatatattaggaatgccgatacgttttaaggtcggcttatattcattgtcggccataaattcaagaatcgcactacccataccacctttgatgataccgtcctcgatggtgaggatacgttgatgcttccgtccgatttcatgtaatagcctttcatccaaaggcttcaggaaacgtaagtcgtaatgagcgatagacttgcccagttccgattcagcacgggaaatggcacgggcggcagtgttgcctatcgggccgattgttataaccgcaaggttgtcaccatctttcagtttcctaccttttcctaccgggatttcttccaacggacatttccagtcaaccactaccccgcgtcctcgcggataacggatcacaaacggacctttatccggcagttgtgctgtgtacatcaatcggcgcaattcatgttcatccattggggaggagatggtcaggttgggtatcggacgcaaataagccatatcgaaagctccgtgatgagtcggaccgtcttcgccgacaagtccggcacggtcgagacacaatataacggaaagattttgtatggctacatcgtggatcatattatcatacgcccgttgcataaacgaggaatagatattacagaatggcaacatcccgtctttagccattcctccggagaaggtaacggcgtgtccttcagcgataccgacatcgaacgcgcgttcgggcattttctccataagaatattcatcgaacaaccgctgggcatggcgggggtcacaccgacaatctttggattagcttctgcaagctccactagggtatgaccgaatacctcctgaaagagaggaggcattccctccgtgttggctatgaaacgttcgccggtgacaggatcgaacttgcccggagcatgccattcggtagcgtgttcttctgccggtgcaaatccttttcctttgattgtgtgcagatgaaggattttgggaccttgcaaatctttaatatcatgcaacacccgggctaggttcttcacgtcgtgcccgtctatcggaccgaagtaacggatattcatcccttcgaaaatattctgttgttgggcagccatcgatttcaagctattgccgaaacgtatcagcgctttgcggcgttcttcattcagaataccgagcttgaacaacatccgtgaaagtttgaaacgcaattggttgtaacggttggaggttgtcagattgaaaagatattgtttcattcctcccacgctacggtcaattgccatatcgttgtcattcaggataatcagcaggttattaggcgtagtggatgcgttgttaagtccttcaaaagccagtccgccactcatcgaaccatcgccaatgatggctacgacatgacgttggatttctcctttccgggcagcagctacagccatgccgagagcagcagagatggaattggaagcatgtccgcaagtgaaagtatcatattcactttcttccggtgacgggaaagggcggattcccccaaatttgcggttcgtggaaaaagcctcgcgacgccctgtcagaattttgtggccgtacgcctgatgtcccacatcccatacaatacggtcgtatggcgtattgtaaacatagtgtaaggctacagtcaattccaccgtccccagactggcagcaaaatgtcccgggttgcagcagagctctttaataatgtcttgccttagttcatcgcatacttccggcagttggtctacgtctagttttcgtaggtcttcggggtaattaatagcatttagcaagttatatatcggttcattcttcatgattcgaggaaatttagcgcaaaaatacgaaaagaaagtatacttttgcccacgaaacgtaataaaatgtaggaaaatcatgatgaactttcaaacatctgtgggattgccggtcggactaccgcctatcagccatatatcccctattcttttgatgggatcttgttttgctgagaatatgggaactttcttgacagaggccaagtttcaactggatttgaatcctttcggaattctgtataatcctttgtccatatcctcagctttgaaagagattattacaaaaaaagaatatacggagaaagatttgtttgcttatagagggctgtggcatagtactatgcatcatggctctttttcggctattactccagaggctacgttgcagaatatcaatgcccgtttgctgcaagcccatcagactgtgccgaagcttgattggctgatgttgactttcggaacggcttatgtttatgaagcaaaagagacaggaaaggtagcctccaattgtcacaaattaccggagaatgattttaatcgccgacttttgtctgtggatgaaatagtagatgaatacacttcattgattaccgatatggctgcttgcaatgcaaccttgaaattcttgtttacagtcagtcccatccgtcatatccgggatggaatgcacgccaaccaattgagtaaatcgactttgttgctggccgtcgaccggttgcagcaatcgttcccggaacaagttttctacttcccctcttatgaaatcgtattggatgaattacgcgattatcgcttctatgcggatgatatgttgcatccgtctccgttggcagtccattacctttgggaacgcttttccgaaaccttcttttccgctgaaacaaagcaggttatccgcgaagtagaagacatccgccgggacttggcgcacaagccctttcatcccgggtccgaagcgtatcaacgctttttaggacaaatagtgttaaaaatagaacgacttatcagaaaatacccgtacttagattttcaaaaagaaacagaactatgtcatacgcgattgaatccatagcccaaagtatcggcgcccgccgtgtgggtgaatatgaagtgactatcgattggctcttaacagatagccgttccctgagttttccggaagaaacccttttctttgcattaaccaccaaacgcaatagtggagtccgctacatccccgaactgtacgaccggggtgtccgaaactttgtgatctccgaggaagagtttaaacaagttgagaatggagagttgagaattgagagtgctatgcaggatgatgatgcgcagccaattctcaattctcaactctcaactctcaatttcccctcaactctcaatttcctcatcgttcccaaccctctgaaagcattgcagaaactggctgaggtacatcgggagaggtttaatattcctgtaatcggtatcaccggaagcaatggaaaaaccattgtgaaagagtggttgcaccaattgctgagtccggaccgttgtatcgtccgttctccgcgtagttataattcgcagattggtgttccattgtctgtgtggcaactttccgaagaagcagaattgggaattttcgaggcgggtatttctgagatgggggaaatgggggcattgaaacggatgataaagccttctatcggtattctgacgaatatcggtggtgctcatcaagagaactttttttcattgcaggagaagtgcatggaaaagctaacccttttcaaagattgtgatgtcgtgatttatgatggtgataatgagctgattagcaattgtgtggcgaaatcaatgctgactgcacgtgagattgcctggagtcgtacggatattgaacgtcccttgtacatcagccgtgtgacaaagaaagaagaccataccgttattgcttaccgttatctgaatatggataacactttctgtattcctttcatcgacgacgcctccatcgaaaacgtactaaactgcttggctgcctgcctttacttgatgactcccgccgatcagataacggaacgcatggcacgcctcgaaccgattgccatgcgccttgaagtgaaagagggaaagaataactgcctattgattaatgatagctataattcggatctggcctctctggatatagctcttgacttcctggtacgccgttctgaaaagaaaggactgaaacgtacgctgattctgtcggatattctggaaacaggacagagtactgccacgctttatcggcgtgtagcccaactggtgcagagtcggggtattgataaattgataggagtagggccggaaatctcttcgtgtgccgctcgttttgacgacgggatagaacgttatttcttccctaataccgaagcgcttcttaaatcggaactgctcaaatcccttcattcggaagtgattctgataaagggttctcgtgtgttcaactttgatctggtgtccgaagcgctcgaactgaaagtgcatgaaacgatactggaagtaaatctaggcgcgatggtggagaacttgaatcattaccgctccatgttgcgccatcctgagacgaaaatgatctgcatggtgaaggcgtcggcatacggagccggttcatacgagatagccaagactttgcaggaacatcatgttgactacttggctgtggcggtagccgatgaaggttccgaactgcgcaaagcgggtatcacgtcctctatcatcatcatggatccggagcttacagcgttcaaaacgatgtttgactataaactggagccggaagtttataatttccatttgcttgatgcgctgattaaagccgcagaaaaggaagggatcaccaatttccctattcatgtgaaactggatacgggaatgcatcggctgggttttgaagcggaagatattcccttgcttatccgtcgcttgaagaatcagaatgcggtaattccccgttcggtattctctcatttcgtaggcagtgattctcctcaatttgacgctttcacccggcagcaaatcgaattgtttgaaaaaggctcgcaagaattgcaggcggctttctcgcataaaattttacgccatatctgcaatacggcaggaatcgagcgttttcccggagcacagtttgacatggtacggctaggtatcggactttacggagtgagtccgatagacaactcgattatacataatgtcagcacgctcaagacaaccatacttcagattcgggatgtccccgaagaagatacggtgggatatagccggatgggacacttgatacgtccgtcccgtatagccgctatccctatcggttatgccgatggcctgaaccgacacttggggcgtggaaatgcttactgtctggtgaacggcaagaaagccccttatgtgggcaatatctgcatggatgtctgtatgatagacgttacggacatcgactgccgtgaaggtgaccaagctataatcttcggtgacgacctgccgatcacagtattgtccgacaagctggatacgattccgtacgaagtgctgactagcatatcgacgcgggtgaaacggatatattatcaggattagttcaccacagaggacacggagttttttcaaagatacaaatcagatactgaggatactgacagcgtattatgaaaaaaggactctgtgccctctgtgtcctctgtggtgaataaaaatctgtgttaatccgtgtgatctgtgatgaaaataattatctttgtaccgactaataaaaacctctttatcaaataaacttatgacaaacttattattgttaggctttttgcctagtgggtccgaatggattattatcgctttggttatccttcttctttttggcggaaagaaaattcctgaattgatgcgtggcttgggaaaaggagtgaagagcttcaaagacggagtgaatgatgcgaaagaggaaataaataaggcaaaagaagacctggacaaaccggcggactcaagtaagtaaagcaagtacggatggcagaaatgaccttttgggatcatttggatgaactgcgcaaggtacttttccgggtgatcggagtttggtttgtattggcaataggttattttattgctatgccttacctttttgatcatgtgatattggcgccttgccacaatgatttcatattctacgatttattacggcatatcggtcaggcgcttgatttgaccgatgatttcttcacacaagaatttcaagtgaagctggtcaatatcaacttggcggctcctttctttatacatatgtcgacagccttttggatgtcggtagtcactgccatgccttatcttttctttgaagtatggcgctttatcggtcctgccctttatcccaatgaaaagaaaggagtgcgtaaagctctgacagttggaacggtgatgttctttgttggtgttttgctgggttactttatggtttatccgttgacgctccgttttctttccacctatcagttgagtgcggaagtggagaacattctgtcgctcaattcctatatcgacaattttatgatgttggtactctgtatggggctagcttttgaattgccgttagtgacctggctgctatccctgctgggaatagtcaataagtctttcttgcggaagtaccgtcgccatgcgattgtcatcattgtgatagctgctgccattattactccgacaggcgatccgtttacattgagtgttgtcgctattccgctttatctgctatacgaaatgagtatcctgatgataaaggataagaagaaaaccgaagaggaaatagaagatgaaattgccctgtcagaagagtgaagcgatagaatcttatgaattacttctagcagtctgcaaggcgggagaggatgaactgaccgttggttacaagcagatgcgcgacttgctcgaacgtatttgccgggcgcaaatgcagagcagcagtttgcaaatgaccgacctctcggcgcgaatcagttttattgctgccaagaccggactttcggtaggagagcagaaccggcttcatactttccgcctgacttccaatcaaatcctgaaccgctgtctcgaaccgaacagggaaaaactcttgcgggatgttaaaacactggcctttctggtccgcaaactttcgggagagaatattccggatgagttataccgtttgcttccccgtgcggacgctacctatctggttgcccctcctgcctgtgaacgagttcggcgaatgcgtgtctgttttcaatatgcggacgaacaatatctgtatgtgactcctttggacgaagtctcggagagaccctatcttgtccgctataatatacctcaaataaacgaagagtttgcagaaacctgtaagctgctttggcaacatgcccagatgaatctgcttgacgttgcgatagatgaggcgggaatccttaccccttcttttatcgttctcgaaccggattatctgattgatatcagttcgcttgcagagtgtttccgcgattacggacaccatccgggaaactacttcctttcccgaatgcaaccgattgagaatgcccgtcccctgttactgggaaatattgccaatctttttctggatgaatggattcatgcgccgaacgaggatattgattatcggacttgtatgcaaaaggctttccgccgctatcccatcgaattggcggcttgccccgatttgcgggacagagagaaggaacgtcaattctttgatgattgcaaattgcatttcgagcatatccgcgaaacggtgaatgatacttttcatactgccggatacgaattggacaagacggatgcggtgcttgaaccttcttatatctgcgaagcgctcggactgcaaggtcgccttgattatatgcaacgggatatgtcctccttcatcgaaatgaaatcgggtaaagctgacgagtacgctatccgtggtaaggtggaaccgaaagagaacaacaaggtgcagatgttgctttatcaggcagtattgcaatactctatggggatggatcaccggaaagtaaaagcctatttgctttatacccgttatccgcttctttacccttcacggccttcttgggcaatggtgcgccgtgtgattgatttgcgcaaccggatcgtagccgatgaatatggtatccagttgcataacaatccggaatatactgcacggaagttagaggagatcaatgcttccacattgaatgaacgtggcttgcgaggacgtttctgggaaacctatttgcggccgcccattgatcgctttcaggagaagttgcagaggctttccgccatagaaaagagctatttttatgcggtctataattttctgacgaaagaactttatacttctaagtccggtgatgtggattatgaagggcgtacgggtgcggcttccttgtggctttccacattggccgagaaatgcgaagccggtgagattatctataatttgcggattcgtgaaaatcatgccgccgacgagcataaagcttatttattattggtacgttccgatttcgaagaaaaggaactgccggagacagtagcggacaatgatatacaaaacgtacttcctaatttccgtcaaggtgatgccattatcctctatgaacgaaactgcgggacggataatgtaaccaataaaatggtattcaagggcaatatcgaacatctgaccgatcatgaaataagtattcgccttcgggctacacagcagaatccttcggtgctccctgccgatagcctttatgcgatagaacatgacacgatggatacgacattccgctccatgtatcaaggattgtacgcttatctctctgcaacacaggaacgtcgcgacttattgctggcccagcgtccgccgaagttcgacgaatcattggattctcttgtttcacaggcgaaagacgacttcacccgtgtcgcattgaaagcgcaagccgcacaagattattttcttcttatcggtcctccgggaaccggaaagacctcttgtgccttaaagaagatggttgaaacattccatgcggataaaggcgttcaaatccttctgctttcgtatacaaaccgggctgtcgacgagatatgcaaatcgcttgcttccattcgtcctgccgttgattttatccgtgtgggaagtgaattgtcgtgcgacgagacttaccgcactcatctgatagaaaacgaattagcctcctgcaaccgccgttcggaagtttacgagcgtattcggagttgccgcatcattgtaggaaccgtagcggccatttccggcaaaccggaattgttccgtctgaaacattttaatgttgccattatagatgaagctacacagatattggaacctcagctattaggcattctttgtgcacgtggcgaagagggtgggaatgccattgataaatttatcctgattggcgaccataagcaacttcctgccgttgtgctgcaaagttctgaacagtccgctatctacgaggagtccttgatgtctatcggactgaccaacttgaaagattccctgttcgaacgtctctaccgcaactgcaccgctcgtcagtcacccctgacctctcatccttcctacgatatgctttgccgtcaaggtcgtatgcatcccgaagtggctctgtttgccaaccgtgctttttatggagggcgtctgattcccgtcggtttgcctcaccaactggaagactccgatactgtttgtcgtctggctttttatccttccataccggagaagacaggaacatctacgaaaataaaccattcggaagcccgtattgtagcggatttggttgcccgtatctatgaggattgccggatagatttcgatgaggcgcgtacgttgggaatcattaccccttacagaagtcagatagcactgattaaaaaagaaatagccgcattgggcattccggctctgaatcggattatggttgatactgtcgagcgttttcaagggagcgaacgggatgtaatcatctattcctgttgcatcaacagttattttcaattaaagtttgtatcgaatttaacagaagaagacggtacgctgattgatcgtaaactgaatgtagctcttacccgtgcgcgaaaacagatgtttgtgacaggagtccctaagtatctgaagtccaatccactctacgaaagtttattaaatttaatggagtataaagagtgatttgctaatttttgcagatgttagtttttattctctctttatgcgattcattaacacctctatgttgaacaaacgcctatatttgcaacacgtttttttcatagagatttagatttaaggttagaagaattgtggaagtcgtgagacttccctttttttcatcttaacgtttactattcttcattatgagaatgcaatgacacttcatctcaagtgttgcaattgaaaatattgcaggaagatggtgcagaataagtaaacctaaaaagccttcttcgtgagaagaggcttttttatttttttctttttcaaagaaatttattgttaatacaagagagagggggaactcgtgatgagttccccctcttgtttgttatctaacgtatgtggatgaattaatccaatacgataggtttgtatttcggaactaatgctttcataatcaaccatccgagcaggtaagatactgcacagatacagaacatgatgaaatatccggcaggtttgccttcaaatcccatgaatgtcatgtgggtttcgtcagcatgcacaaataatacgcctgcaccgtattgcataagcatagaacctacgccaccggccataccgccgatacctgtaatacttgcaattgcggtttttgggaacatatcgcctaccgtagagaagatattggccgaccatgattggtgagccgctccaccgataccgattaaaataaccgggaaccacggagaaagtgttcctaacggctgtgccaacaatactaccaatgggaagaatgcgaaaattaacatcgctttcatacgggcagcatacgggttcatacctgtcttattaataaagatagtcggaagtttaccaccgtagatagacaacatggtcacagcatacaacgtgaaaatcaatgccatacccaatccatcggatgtcttaatatcaaattgggtgttcagataagatggagtccagaacaggaagaaccaccacacaccgtcggtcataaacttaccggcggcaaaagcccatgtctgcttgtatgtgaagcattggaggaagctcattttcttttcttcctttacttctgcatttgcggggatctcaccttcctcaaacttatcttgttcgatatagtccaattcggctttattgacgtgcttgctcttgtcgggagaagtatacatgaatacccacattcccatccagataaagccgagagcaccgataacgataaaagccatttcccatccccaagccttggcgagcaatgggatagatacgggagcgatcagagcaccgatagaagcaccggcattaaaaatggaagttgcataagcgcggtctttcttcgggaaatattcggctgttactttgatagctgcagggaagttaccggcctcaccaagtgcaaggatacagcgtgcagccaggaaacagtacatacttacggtagccagcacgacaacaacgtctccggtagcggccatcagttcggctgcgctgtgcatacctacgtattgctcggtcacgattccgcaaagtgcgtgcatacaagcacctgccgaccatacgccgattgcccagagataccctttcttggttcccatccagtcgacaaagcgtccggcaaacaacatgcaaatggcatagacaatagaaaatacggaagtgatcgtaccatagtgtacctcattccaatgaaattccggtttgataaattcgtcccaggtcaatgaaagaacctgtcggtcgagataattgactgtagtagcaaagaatagcatagcacagatggtccatctgtagtttgtcatcttttcgcctgttttttgaaatgcattcatgataatggatttaaatagattttgattcgctgacaaaggtcggtatttcgactggatttcatttgtaaaaattggtcgaattcatgtattatccgttacattatgtatgtaatttgtttcaaagggggcgtcataacgaataataaaacgcaaattaacgcagattatcacagaagtaattttataggccgttggttaacctatatataattaaaacaatctgcgataatttgcgttaatctgcgtattaacacattctcttactgatatgtaattcagagctgcgcaacgattagcgcatttctgtatatttaatcttgtccatgtctccatagtccagattttcacccgccataccccagataaacatatagttgctggttccggcagcggcgtggatagaccattccggtgacatgatagcctgttcgttctgcatccagacgatacgttcttcctgcggttcgcccatgaagtggcagattgcattgtctgccggtacgttgaagtagaaatatgcttcgatacgacggctgtgagtatgtgcaggcattgtgttccatacgctgcccggtttcaattctgtcagtcccatctgcaattggcaaggaccttcttcaagcacgttgttgacaatcagctgattgataacgcggtcgttgctctcttccatctttccggcagggaaagagttcgctttcagagaacctttgcgtccgtcgattgtaatcaactgagtcttgtattccttgtgagcagtagccgagttgatgtagaacttagcaggattgcttgaatctttactcttgaaagtcactttctgtttgcctctacctatgtacaaagcatctttgaatttcaatgtgtattctttaccgtctacggttacgataccttcaccgccaatgttgataacacccagttcgcggcgttccaaaaagaatttagctttcagcgggtcgatagtttccaataccagctctttagttgcaggaactgctccaccgaagataaaacggtcatacatggaatatgtaacgttgatttcgttcggaaccattactttttccatcaggaagctactacgcaggcggtttgtatcatacgttttcacgtcttgcggattgcaagccacttgcatcttgtaatttacttgggctgaagcagacatggctgcgatacccaacatcattgcaattgctactcttttcatatttcgaatttttattggattattatgtcattgattatttgttctctaatgcttctttcgcatcttttctagtcatgcggatacggttgtaaacagccattccgagcgcaagtatcacaaggatagccgggccgacaatcttcaggctgtaagtcaggtggaagataccccagcagaagagactggaagcgaagtcgagcgcaccgccttcaaagcctgcgggaatatttactgtcgggtcacccgtagctgcatatacgtctttggcagccagtgtgaagaatcctgccagttctgtaacgaagtacagacctactatcaaggctaccagaccgatgatgaatgatttcaccacattgccttttgtgataggcagaatcatcgggaacaagtagaacatacctgccagagaagctagcggtaagaaacggttgcccggaaggataacagccaggaagatagtgacaggaatcaaaagcagagataccaccagtgtagtaggatgtccgatcaccaaagcgggactcataccaatgcttaaaccggtgctgttcttatatttcttggcaatcaactcgcgggtagcgtcggagattggtttcaaaccttcgataaagaggctggtgatacgcggaatcaattccattacggctcccatcttgatacccaatcctaaaatgccgggaatgctgtccactacttcttgccagcttgcgcaacccagcgctccgataccgcaaccgattacgatacccaggaacaacggttcgcccatcagtccgaatttctttttcataccttccgaatcgatattcaacttatcgaatcccggaatcatatcaagtaatttattgataacaatagcgaatggaacaaaactttggcagaacggctgaggaatagagataccgtccattttgtcataaaacttctggaaagcgggagcagtcatatccgccattacaagcgtgatgatgtagcagatgatagcggcgaagaatccccaaagaatactgtcggaagcaaaataaacgatcgctccgataaaagcgaaatgccagtagttccaaaggtcaatgttgacagtgcgtgtcgttttggtaagcagcatcagcaagttgacccccaaacaaaccggaataataaaagcaccgacagatgtattataggctactgctgccgcagaaggccaacccatgtcgaaaatacccaattccaatccgtatatttctaccattttactcagtgcaggacccagactgctggtaagcaacgctgtgactaccgacaaaccgacgaaaccgacacctactaataaaccgcttttcagcgctttcggtagtttaataccgatacatactcctaagactgtgaaaatgaccggcatcattactgccgctccaagaccgataatgtacttgaatacttcttccattctgttcttttttctctgttttaatgatatattactgtgtttccccagagggtattagttgtaaaccgtgccaaaagtacgaccttttccgctttcttccaaaacgaaactcttaatttatcagatattgcatcaaaaatggacatttttgacgtttacgtgcacaaaattagtcgtttccgtgcacgaaaaacaaaaaatacacctagttgactaaaaaatcctataggatttggaggaaaagcgctactttcgtaccgtgaaaagacctgaatgtttaatccttaaaatagcaatccatgagacgaactctcttttctgatttttttatgttgtttttattcataacaaccattcctttagtcttgtcggctcagcaggtagacagcaaattgccctggtcggtgaggatgactgaatcggaaatgatccgttgccccgaatcctggcagctcgatttccaaccgaagttgaagtgggactattgtcacggacttgaattgggggctatgcttgatgtatatgatgcgtatggcgatgagaagattcgtgattacgccatcgcttacgcggacacaatggtacatgaagacgggacgattaccgcttataagctgaccgattacagtctcgaccgcatcaactccggtaaaatccttttccgtatttatgagcagacgaagaatcctaagtataagaaagcgctcgacttgctttacagccagtttgaagggcagcctcgcaatgcggatggcggcttctggcacaaaaagatttacccgcatcagatgtggttggacggcatttatatgggagctcctttctatgcggaatatgcgttccgcaataatcttccgcaggcttatgcggatgtaatcaatcagtttgtaacctgtgcccgccacacatacgatccaaagaatggactttaccgccatgcgacggacgtgagccgcaccgaacgttgggcggatcccgtcacggggcagtccaagcacacttggggacgtgcgatggggtggtatgcgatggctttggttgatgcgctggagtttattccgaagcatgaagccggaagagattctctgctggatattttgaataatgttgccgtacaagtgaggaaacttcaagacccgaagaccggaggatggtatcaggtgatggacagaagcggggataaggggaattatgtggaatcttcctgctctgctatgtttatttattccttgttcaaggcggtacggctgggatatattgataaatcatatttgaatgtggcgctgaaaggctataaaggtttcctgaataattttatcgaagtggacaagaatggagtggtaactgtcacgaaggcttgcgcggtggcaggattgggaggaaaagtataccgttcaggcgattatgactattatatcaatgaaacgattcgcaataatgacccgaaggcggtaggtccgttcataatggcgagtttggaatatgaacgtcttttgtcctatgagcaacagcaaaagcaagacacgttggttgtgtcacgtgatggaacgggtaagtatcgtaatatccaggacgctgtggaggcggtacgcgcctttatggattatacggtgactatctatataaagaaaggggtatataaagaaaagctagtgattccttcgtgggtgaagaacgtgcaactggtaggtgaagattccgaaaagacgattattacgtatgatgatcatgccaatatcaataagatgggaacattccgtacctacaccgtgaaagtggaaggcagtgatatcactttcaaggacttgacgattgagaataatgccgctcctttggggcaggcagttgccctccataccgaaggagaccggctgatgtttgtcggctgccgctttcttggaaatcaagataccatttatacaggctcggagggtagccgtttgctgtttaccaactgctatatagaaggtactactgattttatcttcggtccttccactgcactttttgagtattgcgagctgcatagcaaacgtgattcgtatatcactgctgcttcgactcctcaaaatgaagaattcggctatgtctttaaaaactgcaagctgacggctgctcccggagtgaaaaaggtctatttaggccgtccttggcgtccatatgccgctacggcttttattaattgtgagtttggcggacatatccgtcccgaaggttggcataattggaagaatccggagaatgagagaacagcccgttatgcggaatttggaaacacaggagacggtgcggatacatcgggacgcgtggcatggggcaaacagcttacaaagaaggaagccttgaggtatacaccggagaatattttcaaagaaaatagcaattggtacccttacaagtaagagaaatggggtaaacggtcctttgccgacttgtttccacttgtttcgccacagcgaactttttgtttcacggcatgaaacttcggtttcatcggtgtgaaactgtagtttcaccggtaagaaactctagtttcatcagtgagaaactttagtttcaagcgcttgaaactttctgttcggctgcttgaaactctttgctttgtaccggcaaacacttagctttacggtgataagcacttggcttcacggtgataggtgatagaggaaaacgtttttttgtatgtaggagagtagtataattaaagtaagataagtatgaaaatacaaggaaataaaatgatatggctgctggcggcggcttttatccttttgtctgcattccgtgcggataaacctgttgtcactatctttatgatcggtgattcgacgatggcaaataaaaagatggatgggggaaatcccgaaaggggatggggaatggtgcttcccggtttcttttccgaagatgtacggatagacaatcatgccgtcaacgggcgcagttctaaaagctttatttctgaaggacgttgggaaaaagtgatttctaaagtgaagaaaggagattatgtctttattcagttcgggcataatgatgaaaaaacggattctacccgtcataccgatccgggaactactttcgacgataatctccgtcggtttgtcaacgaaacccgtgcgaaaggcggtatccccgtactattcaattccatcgtccgtcgtaactttgttcagccgaaagacgcttctattgcgaaagacatccgacggatacccggtgcatccaaagagcagcccaaagaaggaaccgttctgttcgatactcatggggcctatctggattctccccgcaatgttgccaaagagttgggagtgaccttcatcgacttgaataaaatcacgcacgacttggtgcagggacttggtcccgtagagtcgaaaaagctgttcatgtttgtagaacccaatcgggttccggcctttccgaagggacgtgaggacaatactcatttgaatatctatggggcaagaaccgtagcgggattggcggtgaaagccatcggcaaagagattccggaattggcgaaatgtatccgtcattatgattatgtggtggctcaagacggcagtggtgatttcttcactgtgcaggaagccgttaatgctgtccccgactttcgcaaaaatgtacgtaccacaatccttgtccgcaaaggcacttacaaagaaaagataatcatccccgaaagtaagattaatatctccctgattggcgaagatggtacgatactgaccaatgacgatttcgcaaacaagaagaacgtattcggtgagaacatgggaacttccggttcgtccagctgttacatctatgctcctgatttttatgccgagaatatcaccttcgagaactctgcaggtcccgtggggcaagcagttgcctgttttgtttctgccgaccgtgcctattttaagaactgtagttttctcggcttccaggatacactctatacatacggcaagcaaagccgccaatattatgaggactgctacatcgaaggcacggtcgattttattttcggctggtctacggctgtcttcaatcgttgccgcattcacagcaagggggatggctacgtcactgctccttctaccgataaaggaaagaagtacggttacgttttctacgactgtcggctgacggctgatgcggaagctacaaaggtctatttgtcacgtccctggcgaccttatgcacaggctgtatttattcgctgcgaactgggtaaacatattcttcctgtcggctggaataattggggtaagaaggaaaacgaaaagacagtcttttatgccgaatatggcagtaagggcgcaggggccaatccgcaagcacgtgcggcattctcccgtcagttgaaaaatctgaaaggttatgagccggtaacagtgctggcaggagacgatggttggaatccggtgagggacggaaaccggttgttggatgtgaaacgttgattatatctcccgattctgcaaaatagctgttgaagatagcgccagaatgcaagtatttttctatctttacggcacagaatcgagtgatatatgataaagaaaaccttaatttccgtaattctattgttggctgtcgtattcacggcacatacacagcaacattgcttctttacccactattctacagaggacggattgtcgcagaacacagtcatgaacatccttcaggaccataaagacaatttgtggtttgctacttgggatggtatcaaccgttttgacggctacactttcaagacctataaggcacgtcagggagattacatcagtctgaccaataacagggtagaccatatgtatgaagattgttatggtttcctctggctgctgacatacgacaaccgtgtccatcgcttcgatcccagaacggagactttcgagcaagtgcccgctgcgggagaagagggaagtacgttcaatgtacataccattgaagtaatgccgaacgggactgtctggttgctgaccgacaatgacggagcgatccgtatcctgacccatcccgaagaaaataaccgcctgacatgggatatttactccggcaagtcggaattgttcccttctttccatgtttttaaagtctatcaggataaagcgggaaacgattggctgttgacggataacggattgggcttgattcgtccgggcacgcgggaacctgtttcctactttacggagacaaaaggaaagaacggtggcatgaaccaggctttttatgcggcgcaggagaatgacggacacatccgtttcgcttccgatcatggacgcatctggtcttatcggaaagaaggtggcgactttacattgtttgaactgcctacgaagagccgcatcacctccattcacgaagtagctccggagcagacggtggtcacaacggactcggatggtttctttacctatcatctgaagacgaaagctgccgtacattattcttctctgacttgcaaagcgttgcccgaccgtccgattctttcggcctacgtagaccgttcttctgaagtctggtttgaacaggaagaaccgggtgtcgtggctcatttcaacccggcaacaggagtagtcacccgtgaacagattctgattgaatacagtaatcccgaacgttcgcgtccggctttccacatttttgaggacgtgaacggtttcctttgggtgcatccatacggtggcggtttctctttcttcgaccggcaaaaagggcgtctggttcctttctataatgaattgggcagtcacgactggcgtttctccaataagattcattcggctttttctgataaacaaggcaatctatggctttgtacgcactccaaaggattggaaaaggtgacgtatcgcaatgttcccttttcgatgatgattcctgtattgcacgagcatgaatctctgcataacgaggtgcgtgctttgtgcgaagataagttgggtaacctgtgggtaggagtgaaagacggtatgctccgcctgtatgatgtccgcagaacgtacaaaggttatctgacggagaacggtactgtctctaccaccggtactccgatgaggggaaccgcttatttcgtcattcaggattcaaaaggtatcatttggattgcgacgaaaggtgacggactgatccgtgccgagtccacctctccggacggtatgtcctacaggctgacccgctatcttcatcaggaggatgatatgtacagtttgagtgataataacgtgtattgtgtgtacgaagaccatcacgggcgtatttggctagctacttttggcggaggtatcaattatatcacggaggacaaggaccggaagactttgtttatcaatcatcgtaataatctgaaaggttatcctatcgacccttgctataaggctcgctttattacttccgacaataacggtcgcctgtgggtgggaactactacgggggctatcgctttcgacgagaactttgaaaaaccggaagaggtggagttccatcatttctcccgtgtgccgaacgacacgcaaagtttgagcaacaatgacgtgcattggattatccctactcaaaataaggaactttatctgggaacatttggcggcggtctcaacaagctggtatctatcgacaaagacggtcatgctaaattcgagtcctattcggtgcaggatgggctttcttcggatattttgctttccatccgcgaggaccataaacggaatctatggatcagtactgagaacgggctttgcaagttcagtccgtcggaagaacgcttcgagagttttgatgaacgcagcattacttttccggtgcgtttcagtgaggcggcctctacgctgactgccaaagggagtatgcttttcggtgccagtggcggtgtctttattttcaatccggattctatccacaaaagcagctatgttccgtctatcgtattctccaagttgacggtagccaatgagaacgtcgtccccagaaacggctcgttgctgaaagtggatattgatgatacagaccagttggtgctttcgcatgacgagaatattttttccattcattttgcggcattggactacaccaatccgcagaatgtgcagtattcatatattctggatggttttgaaaagcagtggacgtttgccgacaagcagcggagtgtgacttatacgaaccttccgaaagggaaatatgtgctccgtgtccgttctaccaacagcgacggggtgtgggtggagaacgagcgtgcgttggatatagtgattcttccttcgttttgggagacccctgtggcgtatgtgatgtatgtactttttgttttgattattatcctcgtggctgtttatatcctgttcacgatttatcggttgaagcatgaggtgtcggtagagcagcagatctcggatattaagttgcgcttctttacgaatatttcccacgaattgcgtacgccgcttacgttgatagccggaccggtggagcaggtgctgaagaatgataaattgccggccgacgcacgggagcagttggtggtggtagaaaggaacaccagtcggatgcttcgtctcgtcaatcagatattggacttccgcaagattcagaacaagaagatgaagatgcaggtgcagcgtgtggatgtcgtgccgttcgtccgtaaggtgatggataacttcgaggctgtcgccgaagagcaccggattgatttcttgtttgagacggaaaaggaacatctttatctttgggtggatgcggataagctggaaaaaattgtgtttaacttgctttccaatgcttttaaatatacgccgaacgggaagatgattacgatttttatccgcgaggatgaagaagtcgtttccatcggtgtgcaggatcaaggtatcggtatagccgagaataagaagaaatcgctgtttgtccgttttgagaatctggtggataagaatcttttcaatcaggcgagcacaggtatcgggctctcgctggtgaaggaactcgtagagatgcatcaggctactatcagtgttgacagccgtttgggagagggcagttgttttaaagtggatttcctgaaagggaaaggacattacggtaaagaggttgagtttatcctcgaagataccggcgctccgatggaaatgggacaggtggtggatttggccaattcctccattcagtccgaaaggttggttgcggacgcagaggaggtggggaccgcttcttctgtggaagaagaacaggaaacggaagagggaaacgctaaggaactgatgttattagtggaggataatcaagagttgcgggtatttttgcgtagcatattcgcttcaaattatcgggtggtggaggctgctgatggtatggaaggatggagcaaggcgttgaagtatgtaccggatattattatcagcgatgtcatgatgccggagaaggatggtatcgagatgacgcgtgaactccgggcggatatgacgaccagccatataccaattatcttgttgacggccaagactacgatcgagagtaaattggaggggttggaatatggcgcggatgattacataacgaagcctttcagtgcgacttatttgcaggcgcgtgtggagaacttgctgtcgcagcgaaagaagttgcagagtttctatcgggagaatttgctgaatataccggttgcggactcgaacggtagtttgtccggtgtatccacaacgtccgaaacggttgtcgggggtacctccgaagcacaaaagaacgatgtggacggacaggtgtcggaggttccggtgatgtctcccaacgatcgtaagtttatggataagttggtcgaactgatggaaaagaatatggataacggagaattggttgtcgatgatctggtcagtgaactggcagtcagccgttcggtattctttaagaaactgaagaccttgacgggactggcgcctattgagtttataaaggagatgcgtatgaagcgtgccgtgcagttgatagagacgggtgagtttaatatgacgcagatttcgtatatggtgggtattaatgatccgcgatatttcagcaagtgtttcaaagcgcaagtggggatgacaccgactgaatatagggataagaaacagggaaaataggatttgtttaaatgcggattaacgtgaattaacgcggattttcgcaaagataaactcttaatctggagtctgatctgcgaaaatccgcgttaatcctgcgttttatccgattgtggtatcgcggaatttacttttgaggaaacaagtgattgaccaggctgttcatgtagacttccagattggtgtattctttgctaagtccataaaccgtcccgtcagcaggatcattcggattcaatccgttctttttctcccattcgtcaggcataccgtcaccgtctgtgtcggcaggtgcggtggttgttttatattctggccatccgcctacatctttcggttggtcgatcattccgttggtgctgccatgagaaccttcgtaagtatacttccctttctttgtttcttccacgatgcgttggtctaccgcgtcgcggcgataagaagctccggcaaattcgagaacatccttgtacgctttcttggcaggttgcaatgaggcgcgttcggctatatcaaatattttggaagagagaacctcgtcttcgggtgcgaattcctttttgataaccaatccgtaagcattgtcccggttcactttgtagagagcttccttttgtttgtctgtcaggctggaacaggtaggatccatatagttgccgtcaaaatagaacactccgtgaactccggctttattattgttctttccgtcatcggcgtatgcggtgaacaggcgtttgtaagaacctttggtggcactgaaaggtcccggcttgtagtagttgttgatgaaattgtacgaaccgccttctcctgcgtatgctccgtcactgccgtaattgtatattacgttattgaacaggtctaccttttcttcttccggcttgccggtataacggcttccgcagagacgcggtgtgcggttggtgtggtgtgctagcagattgtggtggaaagaagctccttgaccgccccatatacctccgtagccgtgtgctcctttttcatggatggagttggcaaggctttcgctgatgatacaccattggagggtgaagttacggttgtcatagaatgtggcgcattcgtccgtgctccaactcatggagcagtggtcgatgatgatattctgatgcgcttttgttccgttcatggcatcgtcacctttttgcttgatgtcaactcccatacgcgaacggataaaacggacaatcacgttgtccgcttggatggagaatgtatagttcttcagacatataccatcgcccggtgctgtctgaccggcaatagtcaggtctccgttattcactttcaatgatttctggagttcaatgatcccgctgaccgcgaaaacaatggtacgcggacctttttgattgatagcccagcggagtgttccctttgaaccgtcgtcggctaaggaggtgacggtgtagactgcgccaccggcaccgcctgtggtgtatttaccggctccatcggctccgggaaaggcggggactttggagcggtcgatgggactaggacaattttcccctattattgcagcacttgcagcaaggggaagcatgaataatatgcagagtgttcctaataatactttgttcataatatgatttttattttatcggatataagttcttgactaggtcgtttatgtatacctccaaatttgtgtattcagcactcaattggtattttacgccgtcggatgtatcattgggattgagcttgtttgctgtctcccagctgtcaggaataccatcgccgtcagtatctagtggagcactttctgattggtaagtaggccatccgcctacatcctgttgtgaatcgatgattccgaatttgcctccattgcttcctgggtatgtgtagctcccttcctgtgtctcttgtatgatacgcgtatctacagcgtcacgtttataagaagctccggcatactttaatacatctgcgtaagcctcttgcgctgattgtgtaaaggtactgacatcatttgaaataacaaattccgtttgtgattttaatgcattttcatcattgtttggataaggaatggtttcgtccacaccgttgacactgattttctggtttggctgaaaacctacccaattgtcattgttgacttctgcaataagtgatttgttgctttggtcaagagcggctgacgtatcgtcaaaatagtttcctttcagatgaaatactccccatacgccttttgcctggttgttagttccatcatcgggacctggagcgacaatacggttaatgacaattttcttcgtgttggtagcagcacccggcttataataattgttgacgaagttgtaatttcctccttctccggcatagcctccgttgcctgctccccaattgtaaaatacgttattgcgtacgtctaccttttcattgtcgggcgagttgctataacgacttccgcatagacggggagtacgactgacgtggtgagctaataggttgtggtggaaagtggcgggagaaccaccccaaatgccaccgtaaccgtgagcccctttcggatgtatgctgttggcaagactttcggcaatgagacaccactgcattgtgaaattagtgttaccataaaaagaagcgcattcgtctgtgcaccagctcatagaacagtggtctatgatgatgttcttttgattcctgccgaaaatggcatccgcgtctttggtttcttcgttattgatttgctcgtctcctagacggaaacgcatgaaacgtatgataacattgtcagcctctagaataaccggatatcttttcaggcagataccgtcaccgggggctgtttgtccggcgatggttacatttcctttttgtatagtcaggttttgttgcaggtcgatgattccactgactgcaaatacaatagtgcgagtttcagattggttgagtgcccagcgcagagttcctactgcaccattgtctgcaagtgacgttactgtgtagactttgcctcccgcacctcctgttgtgtagcggccagccccgaatgctccgggaaaggctgctattttggtacggtcaggtgttggatagtctattaactcttcatcattaggttcttctgtcttatctgaatttccgggaaaatactgataactgttggtgagtttcgcttcgtcttccgaacaggctgcgaatgaaattagtaaaccggaaagaaatgctccgaataataacttgtgcataactttaatattttattgattgtttattcactaagagttccgtatttgttggcggcttttacggtgtaggttgcatctgcatcacttacggtaaaagaagtgtcagtcgtttgtccttcaaaacttccgtctgccttgaagatcaggtaacagattgctttgtaacgggcgtcccaacttaaggtcgttccgttgagtgatacattttccggggtttccaattgttccataaacttcttgggattccagccgtctgaaccgtttacaatgttctcgtaagtatatttaatgtattcggagtaacttaattcggttttaccttcataattatatgatgtaccattgatagtgtatttagtctttcgctgactcatatctaccgcctttccttttttgtccgtcgtgttgtattcagcatacaaagcaggtacggcgcccatatctctccatccggcaggatcaatgtcgaatttcagtttggtgtttagaaatacagtgataggattgttctgccagggtcttcctaatgtttgagcagttcctttactcggttgatagtcgaggctttctgttccatatttgtcaggatctactttgttgataccgtcaactgtgcaattgttgaatacatatccccaatttgtgccggtagtatgattagcggcagttataacacttccgtagcgtacattgtataaggtcgtgttttctatcaatacgtttccgtttccatagaaatagtcaacggcgccttctatccagcaatcactggcataatgtctggcattgataccattctcagatgaagactgtactttggtttgccatgtatcttggaaagatctgaatttacaattgtagaaagcaattctgtcattggctgtgtacattgcttccgccataggaccgatcagtttttctgttccccatgtattcacaaaagatatattttctgcataaaaatcggtagcatagatcatagttacagcttcttggaatctttggctttggttagcctcgtttctccacgaatactgccatgcttcttctccgccgtcaccggtagcattgctggcactggttaacttacgtgcgatgattgtcttttctttgtcctgtccgatcaaatgtatgaaaggcttgattttgggaacattgatgaattcttcataagtcccattcgcaacaaaaataagataaggttccgtacggttgcttggaacagcatcaatggcatcctgaatactggtatagtcaccttttccattaggatcgactataacgtcgaacagttttggggtgatcgcttcttccatgatcttgaaattcagagtcagtccctgatacgggtttccgctataatcgagcaatgctccggaaggtattttaaaggtacagtctgtattgtctgatgtgctgtatttatagcgcaccacattattaagaatgataattcgtatatcggcatcattgaatgtgatggatgtattgggggcttggcgaactttcttgttgaaagtcagttctacatagccactgttactttccagtgtggcaccttctgtaatgttggaagatacgagcgtcaatgcgctcgtgtcttctgaattatcatcgtctttgcatgcgaaaacagctaatgccagcatacaaatgaataggtaattgcttattttataaatatattttgtattcataagttgtctttttattgttatttattccaacgttggtcaccgtaagttttataggtgtctatttttacggtgaagtcaccgttcgcgggattctcaaaaag

SEQ ID NO: 11813 - DNA, 287 bp, Unknown
  gut microbiota DNA sequence
accgggtaggctttcttccccagccgggtgaactgttcatacgccatgcgcttgtaatcttcatccgccccgacctgctcggcatcccgcttgcgcatcccggcaatggagtgctgggggtagtcgcaatcgaccaccgccacattgtagcctttgaggtagtataggtaactcgccgccagcacggtacaggtggttttgccgaccccgcccttttgtgtggaaaaggcgacataaaggggtgttttctcgttttccatattgcttccgttcattattggttgata

SEQ ID NO: 11814 - DNA, 15211 bp, Unknown
  gut microbiota DNA sequence
agctaataacagtcatattattgaaggacataattattggaaaaaagagagttttaaataaacaggaactatcatattatttctgttgaattttattgttgggtagatatgagaagaacgatattacatcatctgtaatatcgttcttctattgattagagttgtttataatttacttcttatcgttttcgcgaatctctacccggcggatcttaccgctgattgtcttaggtagctcttctacaaattcaatcacacgcggatacttataaggagcagtcactttttttacatgattctgcaattccttaatcagttcttcacttgcacgggctttgtagtctttcgaaagaacaatcgtagcttttactacctgtccgcgaatttcgtccggtacaccggtgatagcacattcaatgactgccggatgcgtcatcaacgcgctttctacttcgaacgggccgatacgataaccggaacttttgataacatcgtccgcacggcctacaaaccagagataaccgtcttcatctttccaggcaacgtcaccggtgtagtagataccgtcatgccaagcttcgcgagtacgttccgcatcacgatagtactctttgaagagaccgatgggtttacctttgctggtgcggattacgatttgtccttgttctccggcttcaacggaacgaccttcgtggtctatcaagtcaacgtcatattgaggattcggcagtcccatgcttcccggtttcggttccatccatggcatcgtggctacggtcagtgttgtttcagtctgcccgaaaccttccattagtttgatacctgtcaattttttgaaggtatcgaatacggccggattcaatgcttcgcctgcaatggtgcaatatttgagtgaggacaagtcgtatttcgtcaggtcttcatgaatcaggaagcggaaaatggtgggaggtgcgcaaagtgaagtgacatgatagtcgtgtatcttttgcaggatatctccgggagtaaatttctcgtggtcataaacgaagatattcgctccggcaatccattgtccgtagagctttccccaaacagcttttccccaaccggtatcggcgatggtaagatggaggctttcctcattcagattgtgccagaaactaccggttacgatatgtcccaacggataggtaaagtcatgtgctaccattttgggttcgccggtcgtgccggaagtaaaatacatcagtgagatgtcatcattggtattggcatggcggggacgtacgaacggagcggcattctcaattccctgatggaaatcttcgaaaccttcgggaatctcaggaccgacgctgaccagcttctccacagtgggacagtcgggcatagcctccttgatatgttggagaatcactccttcaccggcagccacaatcatcttgatatcagcggcgttgcaacggtagactatatctttctttgtcagcaggtgagtggcgggaatgacggtcgctcccagtttatgaagtgcgataatgctataccaaaattcatagcgacgttttaaaatcagcattaccatatccccgcgtccgatccccagactttggaaataagaagccgtcatatccgtataacgtttcatgtcggcaaatgagaactgtcggctttcgcctttgtcgtttgtccaaagcagggctttcttgtcgggttgctcggcagcccaagcatccactacgtcataaccgaagttgaaattctccgggacgtttatttttaagttcttgatgaaatcctcttgtgaggcaaagttagtctttgctaaaaatctttctatcatgatattgttacataattacagccagaaaacgtaccgttttgccgtcgagcgctttcatgccatgtggaagtttggagttaaaataaatgctgtctccttgattaaggataatttctttcccttcgatgttgataagcatacgaccttcaatcacaaggttgaattcttgtccgttgtgcttgttgtaatgaatcggctcgtcatcacctttcggctcaacggtcacaatgaagggatcggcggtgcggttcatgaatccggaagccaatgactggtatttgtaggctttcgtacgttctatactgacacctttgcctgcacgggttacgaaataactgctcatcttgggctcctcaccgaacatcagcgcatcaagggctatgttataagtgcgggctatcttttgcagcatactgacggagatgtcatagtcgcctgtttctgcgagccggtattcttcggcggatatgtcactgtcgcgggcgatgtcctcagcggtcaattccaacacatcccgcaatccacggagacgttctgctatttgtctaatctgatcattcatgttatttagtgattagtttgttagtgattaatgatttgcagcagccattatttgctggccttcatggctttaatgatagcggaggtgaaaccgttatgttccagctcgttgattcctttgatggtgattcctcccggagtagtcactttgtcgatttccacgctgggatgagtgtcattattcagaatcaatgaggcggctcctttcagagattgtgccaccatagtcatggcgtctttcggacggatacccatttcgatacccgcttgcatggctgcctgaacgtatttcagaacgtatgcgataccgcaggaagccaacgccgtagcggctgttattttgtcttcggggataagcatgactgtgcccatctcgctgaatagccggaggatgaacttgtcttgttcgtcatttgtattgcgggcagcaacgagtgtcatactttccagttcactgatggcggtgttagggatgaggcggaacatcggcatttctggtactaccacataatgtgccagctcttcaaaactgattcctgcggctacggatataagtatctgcttgcccttcagcttcaactcgcgcattaccggctgcataaaccaaggctttacggcgaggataacgatgtccgctcccgttgccgcttccgcgttattgtgagttgtagagatgttcggaaattctttcttcagctgttccagcttgccggcgctggggttggatacgataatgtctgaatcttctatcagacttccttttgccagaccacgggcgatagaaccacccatgttgcctgcaccgataatagctattttcatacgacgcttgtttttaatgaattgttacagacaaaggtaacggttaattgcgaaaaaacaaaaagcagcccggataagaaataaaattctgaggtaggctgctttttatcgttggctgtttattaatcaatatgagcggttagagtacttttttgaaccgggcgaggaattcgtcggcctcctccatactgagacagagagggggaagcaggcgaagtacattcgtgccgcttgcgccggtaaatacatgttcgtcataaatgagacggctacgcaactctttgatcggttcttcaaattcgagtccgatcatgagtccgcatccgcgcacttctttgatttgcgggaatttcttaagttcttgcagcaggtagttaccaaccttagccgcattctctacgagattctcctgttcgatgacgtccattacggcaagagccgcagaacaagcgaggtggtttccgccaaaagtcgttcccaattgtccgtatacaggtttgaacatcgggctgattaagacgcctgccatcgggaaaccatttccgatccctttggctacagtgatgatatccggcttgatgtcacaatattgatgggcgaagaatttaccgctacgtccgtatccgctctgaatctcgtcgagaatcagtatcgttccagtttcgctgcaggctttgcggagttcctgcataaattcagcggtcggtatcttgataccgcctaccccttgaatcccttcaatgatcacagcacaggtatctccttttgacaattcttgcttcatcgcgtcgatgtcgttcagagggagataggtcacgtgaccgttattgttgataggtgcgatgatcgacggattgttggtggcttctaccgccagagacgtacggccgtgaaacgccttgttgaaggaaacgattttggtacgtccgttatggaacgaagccaatttcagagcgttctcattggcttccgcgccactgttgataagaaacaggctgtagtcctcgtagccggagatttttcccaatcgttcggctacctgttgttgcagcttgttgatgacggagtttgaatagaaacccaagtttgctacttggctactgaccatttctacatagtgcggatgtgcgtgtccgatggagataacggcatgacctccgtaaaggtccagatattccgtgccgttttcatcccaaacgtgacaacccttccctttgactatgttgatattatataaaggatatacgtcgaataatttcataattctgttatttttaaaaagcactcggcttcaaacgtaggcctacggtttcttccagattgaacatcaggttcatgttatgaacagcttgtccgctggcgcctttcagcaagttgtcgatacaagagataatcaatagcttgtcgccatgcttttccagatgtatcagacatttattagtattgacgacttgtttcaagtcaatattcttgtctacgatgtgtacaaaggagtctttggcataatattcttcatacatacggacaatctcttcctgtgatactttggtctttactaccagagtggcaaagataccgcgtggaaagtcgccccggtacgggatgaaattaatctctgcatcgaagctgttctgcaattgcttgagtgactgcttgatttccggcacgtgctggtgttcgaatgctttgtacacactcatattattgtttctccagctgaaatgactggtagctcccggttttacgccggctccggtacttcctgtaatggcatttaccatcacgtcgtctgtcaacatcagattcttggctagcggaagcaagccaagctggatacaggttgcaaaacaaccgggattggctacgtgcttcgccgtacaggtggcgcggcggttcagttccggcagtccgtagatgaagtcatgatcgtcacttttgatgcggtaatccatggaaaggtcgataatcttcaagtcttccggtatgttatggctttccatgaatttctttgtgtcaccgtgggcagtacagaagaagagaacatcgatttcgtccaaaggcaattgatcggtgaatctcagatctgtctcaccgtacaatccttcatgtacgtcggtaattttatttccggcattactgctgctgttgataaatacgatttcggtttccggatggttgagtagcagacggattaattcgcctgctgtatatcctgcgccaccaatgattcctgctttaatcatatctcttcgtctttatggttattatagtaaacacgcaacggagtagaagtcactttgataaagcctttggcgtcttcagccgtccagcctttctgcatctcaccgtattctccgaatttagtcttaacaaggtcatcttcggattctacgcctacggtagagaaagaaagcggacgaagttcgaggatagccgtaccgtttacgttgcgttgactttcctgcaacatcgcttcgatatcacgcatgacaggttccaaatactggctttcgtgcaggaacataccataccagttggctacctgatctttccaatattgttgccatttgctcaatgtatatttttcgaggaaacggtgagcaccgataatcaacatcggagcggcagcttcgaatcctacgcggcctttgataccgataatcgtgtcacctacgtgcatatcacggccgatgccgtaagctgcgccaatctcttccactttctggatagccttgatcgggtcgtcaaacttctcgtcgttgacagccttcagttcgcctttctcgaaagtcagacggagctgctcgcttccttctttctgaacgtgtttcaagtaagccgattccggcagtccttgtgcggaatcaagaatctcaccgccacaaatggaagtaccccaaaggcctacgttataagagtatttcagtttggtgaagtctgcgctgaaaccatgcttgttcagatagtctatttcctcctggcggctcaatgccatatcacgggttaatgtgataatctccacgttcggtgccagcactaagaaagtcatgtcgaaacggatctggtcgttacctgctccggtagaaccgtgagcgatggcgtccgcaccgatttcattggcatagcgtgcaattgccaatgcctggaagatacgttcggaacttactgagatagggtaagtgccgttgcgcagtacattaccgaaaaccatgtatttcagactcttctcgtagtattcctgagtgacgtccaacgttacatatttcacagctcccagtttgtaggcgttctcttcgttcgtctttagttgttctgcgctgaaaccgcctgtattggcacaagctgcatatacttcgtaacctttttctttggcgaggtacatgacggtgaacgatgtgtccagtccgccgctgaatgccaccactacttttttcttcttttcttccatagtgtgtatattttaaatgttatttctttcttgttctttttttatgttccgtgggtctgtcggatcgtacagcatggctgtgcagatacagaacttacggttcttggcaaccaatatgtcgtggttgatacatccttcacatcctttccagaaagcttcgtcgtctgtcagctcgttgaaagtgacaggaacgtagcccagttccgtattcatcttcattacggccgcaccggaagtcagactgaatattttcgctttcggccatcggaggcgtgccagttggaaagaagcctgtttgatacgttttgccagtcccaaaccacggaaatccggatgaacgatcagaccggaagttgctacatattgcttgttcccccatgattcgatgtaggtaaatccggcaaatgtctctccacaaagtgcgataatcgcttttccttctttcatttttgtcgctacgtattcgtgggtacgttctgcgattcctgttccgcgtactgcggcagcctttctgatagtgtccaaaatagtgtcaacgtaaacctcgtgtgaggcgtcggctaccataacatctatttgctgagtgtccatttctttattatataatataggtatagttattcgatattcgggatgacgactgccaaaagctggcgtatcttgcttggggtaactccttcacgcaaaactaacatgattgtgtcgtcaccggcaatggttcccagaatgtcactgaactcattgttgtcaatgtcgtatgccatgctgcttgcatagccgggacgggtacggatgacggcaatgttgccggagaaatgtaaagagataaatccgttgctgcgcaacatttcaccggcgctttggtcggtggaacgtttatacatgatgttgttgggcaatacatatacatactttccgttcatactggcagccttggctactttcagttgtttcaagtcgcgggagagggtggcctgtgtcagttcgtagccttcacggttcaactcttgcagcagttcttcctgtgaaccgagctccttgcttgagataatcattttgatggcatctaaccgatttgctttcttcttcattgtatatttattctaagaatggcgcaaaagtatgcaatatttcggagaaaacttgcataaaaccaaagtttttttgcataaaagtgaaaaatatgctaaacggtgagagcctgctttttttgttttgtgtcaaaatgtataccctttcaatcaaaatacataaggaaagggaggagggaatcgcctatctttgccatgtaggtaaatggataccttaaatatatagacagaataccatgaaacaaaacttttttgcagtcgacctgggcgcaacgagcggccgtacaatcttaggaactttcatcgaaggcggattaaatctggaagagattaatcgttttcctaatcatctgattgaggtgggtggtcatttctattgggatatttatgcattatatcgccatattattgacggactgaagttggttgcccaccgcggtgaatctatagcctctatcggtattgatacttggggggtggattttgtgtgtgtcggaaaagacggaaacctgctccgtcagccatacgcgtatcgtgatccgcacacggtgggagcaccggaagcccttttttcacgtatatcccgtagtgacgtttacagtaaaacgggaattcagataatgaattttaattcactttttcagttggatactttacgccgtaaccatgacagtgcattggaggcggcagataagattctgtttatgccggatgcgttgagttatatgcttaccggagaaatggtgacggaatatacgattgcttcgacagcacagctggtgaatgcgcagacacggcgtctggaaccggagttgctgaaagcggttggactgagtgagaagaatttcggtcgttttgtattcccgggcgagaaagtcggggtattgacggaggaagtacaaaaaataacaggactgggggcaatacctgtcattgcagtagccggtcacgatacgggttctgcggttgccgccgttccggcattagaccgtgactttgcatatttgagtagcggaacttggtcactgatgggagttgagactgatagtccggtgattaatgctgaaacggaggcgttgaactttaccaatgaaggtggcgtggaaggaaccatccgtctgttgaagaatatctgtggaatgtggttgttggaacgttgccgtctgaattggggggatacaagttatcctgaattaatcagtgaggcggatacgtgtgaaccgttccgtagtttgattaatccggatgatgattgctttgcaaatcctgctgatatggaaaaagccattattgaatattgccgggttaccggacaaccggttccggagaaacgaggacaagtggtgcgttgtatctttgaaagtctggctttgcgttatcgtcaggttttggaaaatctgcgttcactctctccacgacctatagaaacattgcacgtgattggcggaggtagtcggaatgacttgctgaatcagtttacggccaatgctatcggaattcctgtggtggcaggaccgtctgaggcgacagccatcggtaatgtgatgattcaggctatggcggcaggtgaagcaacggatgttgccggtatgcgccggttgatccatagctctattccgttaaaaacttatcagccgcaggatacggaagcatgggatgcggcttatatccactttaaaaattgtgttcgataattaattagataaccgacagaataatcattttaataaaagaatatcatgaaaaaagaagaactgattcagaaagcgtatgaaattgctgcggaacgttatgcggcagtaggtgtagacaccgagaaagttttggaaactatgcaggattttcacctgtcactccactgttggcaggctgatgatgtgactggatttgaagtgcaggcaggttcattgaccggaggtatccaggcaaccggtaattatccgggcaaagctcgtaacattgatgagttgcgtgccgacatcttgaaagccgcttcttatattccaggtactcaccgcttgaacttgcatgagatttacggagatttccaaggcaaggtggttgaccgcgatcaggtagaaccggaacacttcaagagttggattgaatggggtaaggagcataacatgaagcttgacttcaactctacttctttctctcatccgaaatcgggcgatttgtcactctccaaccctgatgaaggtatccgccagttctggattgaacataccaaacgctgtcgtgctgttgcggaggaaatgggtaaggcacagggtgatccgtgtattatgaacctttgggtacatgacggaagcaaggatatcactgtaaaccgtatgaagtaccgtgcgttgctgaaagattctttggatcagatcttcgctacagaatataagaatatgaaggattgcatcgaatctaaggtgttcggtatcggtctggaaagctatacggtaggttccaacgatttctatatcggttacggtgcttctcgcaataagatgatcactttggataccggtcacttccacccgacagaaagcgtagctgataaagtgtcttcattgttgctttatgttcccgaactgatgttgcacgtaagccgtccggttcgttgggattcagaccacgttactattatggatgatccgacaatggaactgttcagcgaaatcgttcgttgcggtgctttggaccgtgtacattatggtcttgactatttcgacgcttccatcaaccgtatcggtgcatacgtgatcggcagccgtgccgcacagaaatgtatgacccgcgctttgctcgaaccgattgcgaaattgcgtgaatatgaagcaaacggacagggattccagcgtctggctttgcttgaagaagaaaaagcgttgccttggaatgctgtttgggatatgttctgcttgaagaacaatgttcctgtaggtgaagatttcattgcagaaatcgaaaagtacgaagccgaagtaacttctaaacgataagttatggatattttaatcggcttgttgattatagccatcggtagcttttgccagtccagttcatatgtacctattaaaaaggtaaaggagtggagctgggaaagcttctggttgatacaaggtgtatttgcctggttggtgttcccattcttgggttcactgctgggcgtaccgcaaggaggcagtctgctcgacttgtggggagcgggaggtgccggtatgagcatcttttatggtatattgtggggagtaggaggattgactttcggactttccatgcgttatctgggggttgcgctagggcagagtatctcgttgggtacttgtgccggtttcggaactcttcttccggctctttttgcaggcacaaatttgtttgaaggtaacgggttgattctgttgttgggtgtttgcatcacattggcgggtatcgctattatcggctatgccggtagcttgcgtgcacaaaacatgagtgaagaagaaaaacgtgctgccgtaaaagactttgcgctgacaaaagggttgttggttgccctccttgccggtgtcatgagcgcttgctttgccttggggttggatgcgggaactcctatcaagaatgcggctctagccggtggagtagaagggctttatgccggtcttccggtaatcttcctggttactcttggcggatttctgacgaatgccgcttattgtctgcaacagaatgtggctaataagtcaatgggtgactatgccaaaggaaaagtgtggggcaataatctggtgttctgcgccttggcaggtgtgttgtggtatatgcaattcttcggattggaaatgggtaaaagtttcttgacagaaagtcctgtattgttggctttttcctggtgtatactgatggcattgaatgtaactttcagtaatgtttggggaatcattttgaaggaatggaaaggagtatcaaataagactataactgtgctgatagctggtctgatcgtacttatcttctcattagtgttcccaaatttgttttaaaatttataggtacggattacagagattacgcagttttttataacttgcggcgaaatctatgtaatccgtatacaattaaaaaatatatataatgaaatcaattttagagaatcgtccggcacttgccaaagaggtaaataaggtggctgaagttgccggctacttgtggcagaaaggatgggctgaacgtaatggtggtaacatcactattaatatcacagagtttgtagacgatgaaatccgtcagatgaaaccgatcagcgaagtaaaatctatcggtgtgactcttccttatctgaaaggatgttatttctactgcaagggaactaataagcgtatgcgtgatttagctcgctggccgatggagaatggttcggttatccgtattctggatgactgtgccagctatgtgattatcgctgatgaggcggtggctccgacatcggaattgccttctcacctgagtgtgcacaatgacctgttgagcaaaaactctccttataaagcatctgtgcatacgcacccgattgagttgatcgccctgacacattgtaagaagtttctggaaaaagatgtggctaccaatatgttgtggagcatgattcccgaaacaaaggcattctgcccgcgtggcttgggtatcattccttataaattgcctagttctgtagaactggcggaagctaccattaaggagttgcaggattacgacgttgtgatgtgggaaaaacatggcgtatttgcagtagattgcgatgcgatgcaggcattcgaccagattgatgtgttgaataaatctgctttgatctatattgcagccaagaacatgggcttcgaaccggatggtatgagtcaggaacagatgaaggaaatgactgttgctttcaatcttcctaaataaaataaaccaataaacaaccatgaatcgcattattttaaatgaaacttcttacttcggtgcaggctgccggagtgtaattgctgtagaagcggccagacgtggctttaagaaagctttttttgtaacggataaggatctgatcaagtttggtgtggctgccgaaatcattaaagtgtttgacgacaatcagataccttacgaactttatagtgatgtaaaagccaatcctactattgctaatgtacagaacggagtggctgcttacaaagcttccggtgcagactttatcgttgctttgggcggcggatcttctattgacactgctaagggaatcggtatcgttgtgaataacccggattttgccgatgtgaagtctttggagggtgtggctgataccaagcataaagcggtacctactttcgcactgcctactactgccggaacggctgccgaagttactatcaattatgtgattatcgatgaagatgcacgtaagaagatggtgtgtgtagacccgaacgatattcctgctgtggctatcgtagatcctgaattgatgtactccatgccgaaggggctgactgctgcgacgggaatggatgccttgactcatgccatcgagagttatattactccgggtgcttgggctatgagtgatatgtttgaattgaaggcgattgaaatgattgcacagaatttgaaggcggctgtggataacggtaaggatgtggcgccccgcgaagcaatgtcgcaggcgcaatatatcgccggtatgggattctcgaatgtcggtctgggaattgttcactcgatggctcacccgttgggagctttctatgatacgcctcacggagtggcaaatgctttgctgttaccctacgtgatggaatacaatgctgaatctccggcggctccgaaatatattcatattgcgaaagcaatgggggtagatactgccggaatgagtgaggcagaaggagtgaaagcggcaatagaagcagtgaaggctctttcgttgagtatcggtatcccgcagaagttgcatgaaattaatgtgaaggaagaagatattcctgctttggcggtagcggctttcaatgatgtctgtacgggtggtaatcctcgtccgacttcagtagcggatattgaggctctgtatcacaaagcattttgattgataggagaaagcgtatgaaacgggaagcttttaagatgttcttgaaacccgggttcgagaaagaatatgagaaaaggcacgcagccatttggccggagctgaaaaaaatgttgtccgatggtggagtatatgattattctatctattgggataaagatacaaatattcttttcgcctgtcagaaaacaagaggagaagagtcctcgcaagatatgggagccaatccgattgtgcagaaatggtgggattatatggcggatatcatggaagtaaatgaggataattcgccggttacgattcctttgccggaggtcttccacatggattgattaaaaaaagagtgcgtcggttgtatacgatgcactctttttttgtacatttgtctgctgtggaaaacattaaagaaatcgtatgtaaggatatgggcatgaccgatggtacaagtttagggcttgaattcaagtatttaatagtaaatgacatggaccgtaagttcggtttatgggtgaatacagtcggctatcagtctatcccgcccgattctccttacccgttgaaagagcatccttccggctatttttttaatgcggaaaaaggcagggtgcttcgtgaataccagctagtttatattactaaaggacgcggcctgttctcatccgattctactccagaaaagcaggtttgtaaaggaaggttgatggtgttgtttcccggacagtggcatacgtatcgaccattgcggcagaccggttggacagaatactatatcggatttgaaggtccggcaatagatgcgattgtggctaattcttttttatcccaagaacagcaaatattggaggtgggaatcaatgaggagttggtatctttgttctcccgtgctcttgcggtggccgaagcggacaagatttccgcacaacagtatctttccggcattgtgttgcatataatcgggatgattctttctatctctaaaaacaaggtctttgagatgagcgatgttgaccagaagatagagcaggcaaagattataatgaacgagaatgtttcgggcaatgttgatccggaagaactggcgatgcggctgaatatcagttattcatggttccgcagggtgtttaaggaatataccggttatgcaccggccaaatattttcaagaattgaaactccgtaaggcaaagcaattgttggtaggtacttctcagtcagtaaaagagatttctttcttcttaggtttccaatctactgagtacttcttttcattcttcaaaaaacggacagggcttactccgttggaataccgttcattcgggagggaagaatagaaccgaataaagtcagtagggatattcctaaaataat

SEQ ID NO: 11815 - DNA, 11681 bp, Unknown
  gut microbiota DNA sequence
aattttattattttaggaatatccctaaggaagcgaccttctttactaatctcatatggagaaagaattattacttcatcatcttatcaatttcttcaaattccggtcccatattcaagttataataaacacggtaaagtccttgcaaccacaaatctttctggtctggtttcaaagcacgggctttctcataaaaaggcttagcttcttcatagaacttctttactacagcctgtgcttcagcatacttaggatcattaatatccgtcgttgctttatcagcataatcctgcgctttcatcaaatacactaaacctacattagagtatgcttctgcatattccggatcagcagcaatagcctttttatagaattcaattgcattatcatattctttcatgttatgataaagatatgcctttacatataaatacagcttattattcggatcattagacagcattctgtcagcaaactccatagccttagaggcttgattagaactattataataatcaaccaaattggcaaagaaataatcatttcctggaaatttaagaataccttcttccagagctttgatccatgctactgtgtcccccttagctttataagcatcagccattaattgcattgcaaacttgccaccatctttatctgacaaagccatcggagcatacttgataatcgcatctttattacctactctatcagctgccaatgttgcataataagcaatctgcggaagaagagtatcgtttttagcaatctctttatcagctaacataggatatgaagctgactctacgtatgttgcgaagaatttcaacgcttctttattcttatccaaattaaaatattgaataccaccattgatcaaattcggacgttcggccaacatactagaagcattcgccttccgatatttgtttttaattttgcccttttcattgggtacttgagccagatcgtcacacttagtataatactcatacatcttcaatatgctattatacactttcaatgtatcatacggttttctcaaaaaagcatttttcatctgctcttcgttgatacgtttctggataaatccagcaacatcccatgtttcagcaagatcctttgtttcaggattcttcatagcttccttaataagctgttcagcctgcttaaaattaggttttacgtcattagctatgctcttcgcttcttttacatttttcatttgagcaaaagagaagctaacagccatcaataaaaccatagaaaataatactcttttcatgattgttgtttgattaattattaatattatgtctattcctcaatgttattactttcgttctcatttacatctgacgtatcatcattgtcaatatcaggagcatcagtattaggatcactcacaatagtaccctctacttcttcttccggtatttcatcctcaagactttcagtcatgactttacatactgaaccaatctgatcattgcgtttttcaagattaatcaaacggacaccttgggtagcacgccccatgatacgaacatctgctaccttcaaacgaattgtgataccggatttattgataatcatcaaatcattttcatctgttacagatttaatcgttaccaatttacccgttttttcagtaatattcattgttttcacacccttacctccacggttggtcttacgatagtcttcaatttcagaacgtttaccatatccttgctcagaaacaaccattacagattccgtctccaagtccttaatgcaaatcattcccacaacttcatcctgaccatcgttatctaatgtaataccacgcacccccgttgctgtacgtcccataacacgcactgctgcttcatggaaacgaattgcacgtccattacggttggcaatgataatttcattatttccattcgtcatacgaacttcgataacactgtcatcttcgcgaatcgtaatagcatttacaccattctggcgaggacgagaatattgttctaacaatgttttctttattacacctttcttagtacagaataatacatagtggctattgatgaactctgaatcctctaaactcttcacacgcaaatatgccgttacattatcatctgaatcaatattcaacaaattctgaatagcacgccccttagagttcttcgttccttcaggtatctcatacactttcaaccaataacacttacctttttgtgtaaagaacatcatggtattgtgcatggtagccggataaatatgctctacaaagtcttcatcacgagtttctgttcccttagaacctaccccaccacgattctgtgcgcggaattctgttaaaggagtacgcttgatatatcccatatgagaaatggtgataatcatttggtcatcagcgtagaaatcttccggattaaactcttctgaagaatatacaatctctgaacggcgttcatccccatattttgctttcacttccagcagttcatctttcattaccttacggcatacttcatcatcagccagaatactttccaaataagcaatctgcttcatgatttcctcgtattccgcatgaagctgatcctgcatcaaaccagtcaactggcgcaaacgcatttctacaatagcacgcgactgaatttctgtcaggttgaaacgttctatcaagcctgctatagcatcattgggcgttttagcagcacggataatacgaattacttcatcaatattatccgaagcaataattaaaccttcaagaatatgtgcccgctcttttgctttacgaagttcgaactgagtacgacgaattacgacctcgcgtctatgttctatgaaatattttattaaatctctcagatttaatgtctttggacgtccgtgtatcaaagcaacattattcacaccaaaagatgtctgtaaagctgtcatcttataaagtttattcagcactacacttgcatttgcatcacgttttacgtcaataacgatacgcataccatcacggtcagactcatcattagcattcgagatgccttctattttcttatcgttaacaaggtcagcgatatacttaatcaattctgccttatttacattatagggaatctcggtgattacaattttatcatgtgcctgcccgctttcaatttcagctctcgcacgcataactacacgcccacgacctgtcagataagcctcacgcacaccacttacaccatatatatatccgcctgtaggaaaatccggagctttcacaaactccatcaactcttccactgtaatttccggattatcaatatatgcatcacaagcatctataacttcagaaagattatgtggaggcatattggtagccatacccacggcaataccagatgcaccattcactaaaagattaggaattcgagttggcataaccttaggttcaaccaaagtattatcaaagttaggctcaaaatctacggtttccttatacaagtcatccatcatcgcttcacccagcttattaagacgtgcctccgtataacgcatagcagcagggctatcaccgtctaccgaaccaaaattaccctgtccgtctaccaaaggataacgcatcgcccactcctgagccatacgaaccattgcaagataaacagaagaatctccatgaggatgatacttaccaagtacttcaccaacaattctggctgatttcttataaggtttatctgaagtattacccaattccatcattccgtataaaattctacggtgaacgggcttaaatccatctctaacatccggaagggcacgcgaaacgatgaccgacatagagtagtcaatgtacgatgacttcatttcctcctcgatgttaatctttataattctgtcttgttcaagcatttaaaatgattattaattatacattctacggtttgtaaaaaaccacgctaaagtactacttttcccggatatacgaaagtttttggaaagaaagttttattatgaacagaatgatacccaactaagctttaaaatacgaaaacaaaaagagaaaaataataaattaggctataaaggctatggaatatcggcaaaaagcatccagccatttgttataccttattatatataatgcaaatgtagcatttttatggcacgccatttgtagatataagaaataaagcaaatattgcaatacaaacttgatttaatgcgtatatttgcgagtgaataacccttagaaaagaaggaagaaagtatgaataatcaattctcacaaagagtttccgacattatcgtctatagtaaagaagaagcgaatcggttgagaagtaggtacataggtccagaacacctgcttctgggtatgctccgtgacggtgaaggaaaagctatcgagatattgtctaaactcaatcccaatctgactgccatcaaacagcagattgaagctcagctaaaggtagaagctgatgatatgttattacctgacgcagaagtgtcgttgtctaatgacgcggcaaaaatattaaaaatgtgtattttagaagcacgtggaatgaaaagtaacatcgctgacacagaacatgttctgttggcaattttaagagaaaaaaagaatgtagcagcctccatacttgaagcaaataacatcaattacgcaaaagtattggaacaggtgacattgcagccagacataaatgctggaatgtttactgaagatgacgatgaagatgaagaaatgtcttccccccgctcaagcggaagaggcaatactgaagagcgtcaacaggcacaaacagcttcgaaaaagccatctaatgacacaccggtacttgacaatttcggtacggatatgacaaaagcggcagaagaaggaaaattagatccagtagtcggcagagaaaaagaaattgaacgtttggcccaaatcttaagccgccgtaaaaaaaacaaccctattctaataggtgaaccgggtgtagggaaatcagctattgttgagggacttgctttaagaattactcagaaaaaggtttcacgaattttgtttgataaacgagttgtggctctggatatgacagctgtcgtagcgggtaccaaatatcgcggacaatttgaagagcgtattcgttccattctaaatgagttacagaagaatcccaatataattctgtttgtcgatgagattcacacaattgtaggtgcagggtcggctgcaggctctatggacgctgcgaatatgttaaaaccggcattggctagaggagaaatacaatgtattggcgctaccacccttgatgagtaccgtaagaatattgaaaaagacggtgctcttgaacgtcgtttccaaaaagtaatagtagaaccaactacggctgaggaaactcttcaaattttacataacatcaaggacaagtatgaagaccatcataatgttttttatactgatgaagcattggaagcatgtgtcaagctgacagaccgctatatcacagatcgcaatttccctgataaggctattgatgctttggatgaagccggttcacgggtacatcttactaacattaatgttcctaaagagatagaagagcaggaaaaattgatcgaagaagctaaaagtaagaaaaatgaagcagttaaatctcagaactttgaacttgcagccagttttcgggataaagaaaaagaattctctcttcgattagacgagatgaaaaaagagtgggaagccagtctgaaggaaaataggcagaccgttgatgcagaagagatcgccaacgttatatcaatgatgtcaggtattcctgtacaacgtatggcacaagccgaaggtgttaagctagtcggcatgaaagaagatctgcaatctaaagtcatagcgcaagatacggccatagaaaagttggtaaaagcaatattgcgaagccgtgtaggattaaaagatcccaataaaccaattggcacatttatgtttttaggtccaacgggggttggtaagacccatttagccaaagaattagccaaatatatgtttggttcagccgatgcactgattcgtatagacatgagtgagtatatggagaaatttacggtttcacgactggtcggagcacctccgggatacgtaggatatgaagaagggggacaattaacagaaaaagtacgccgcaaaccatattctattgtattgcttgatgaaatagaaaaagcgcatccggatgtattcaatatcttgcttcaagtaatggatgaaggacgtctgactgacagttatggcaggatggtagactttaaaaatactgttatcatcatgacctccaatatcggaacccgtcagttgaaagaatttggacgaggggtcggatttgcaacacaaagccgccttgacgacaaagaattctcgcgaagtgtaatccaaaaagctttaaataaatcattcgctcctgaatttattaatcgagtagatgaaattatcacattcgaccagctctctctggaagcaattacaaagattattgatatagagctgaaaggattatataatagaattgaatctattggatataaattaattatcgaagataaagcgaaagagttcatagcaaccaaaggatacgatgtgcagtatggtgcccgtcctttaaaacgagctattcaaacctatttggaagacgggttatcagaactcatcatttcttcgtctttaaaagaaaaagacatcattcaagtctctcttaatggagaaaagggtgaattagaaatgaaagctattactcaagaataagattatattgtccatgtttggaatcaatattaagtatgtcataatgtcagaccttcgggtctggcattttttttgtctctacctgagtaagtatcaattaaaattaatcaatagataaactaaaaaatatacgtattatgcagaaaggtaatattggagttacaacagagaacatttttcctattatcaaaaagttcttgtatagtgaccatgagatttttcttcgtgagttagtatccaatgcagtagacgctactcagaagctgaatacactagcttctatcggagagtttaaaggtgagttaggtgatttaaccattcatgttgaattaggcaaagatactattaccatttccgatcgcggtattggtctgactgcagaagaaatcgaaaagtatatcaatcagattgcattctctggagcaaatgatttcctcgagaaatacaaaaatgacgcaaatgccatcattggtcatttcggattaggtttctattctgcttttatggttgcaaagaaagtagaaataatcactaagtcatataaagacggcgcacaagctgtaaaatggacttgcgacggtagtcctgaatttacaattgaagaagtggaaaaagcagatcgaggctcggatatcatcttgtacattgatgatgactgcaaggaatttcttgaagaagcccgcatctccggacttttgaagaaatattgcagtttccttcctgttcctattgcatttgggaagaaaaaagaatggaaagatggcaaacagatagatacagccgaagataatatcatcaatgatacaactcccctatggactcgcaaacctagcgaactatcggatgaagattacaaatcattctatagtaagttgtatccgatgtctgacgaaccacttttctggattcatctgaatgtcgactacccattccatttgactggaattctttatttcccgaaagtaaaaagcaatattgaactaaataaaaacaaaattcaattatattgcaatcaggtatatgttacagattctgttgaaggtattgtgccggacttcttgacactgttgcatggagtgatagattctccagacattccgttgaatgtttcccggtcatatttacagagtgattcaaacgtgaagaaaatctcaacctatatcacaaagaaagtttccgaccgtctgcaatccatcttcaagaatgatcgcaaacaatttgaagaaaagtggaatgatttaaaaatatttatcaattatggaatgctcacacaagaggacttctatgataaagcgcaaaaatttgcccttttcaccgatacaaatgacaagcattacacattcgaagaataccagactcttattaaagataatcaaacagataaagatggaaatctgatctatctgtatgctaacaacaaagatgaacaatatagttacattgaagctgccaccaataaaggatacaatgttttgcttatggatggccagttagacgtagctatgataagcatgttggaacaaaagctggagaagtctcgctttacccgtgttgatagtgatgttatcgacaatcttatcgttaaagaagataagaaaggcgaaatattggaagcagacaagcaagatgctatcacaacagccttcaaaagtcaacttcctaaaatggataaagtcgagtttaatgtcatgacacaagcattgggagaaaattctgctccggtaatgattactcaaagcgaatatatgcgtcgtatgaaagaaatggcaaacatacaagccggaatgagtttctatggcgaaatgcctgatatgttcaatttaatactgaattccgaccacaaactgataaaacaagtattaaatgaagaagaaggagcttgccatgcagaggtaaccccgatacaatctgaaatggatagcatcaacaaaaaacgcaatgagttgaaagataagcagaaaggtaagaaagatgaagatatcccaacagctgaaaaagatgaactaaatgatttagataagaaatgggatgatctgaagagtaagaaagaagctatcttcgcaggttatgccagcaataataaagttatccgtcaactgattgacttagctttattgcaaaataatatgttaagaggggaagcattgaacaacttcgtaaaacgtagcattgagctgatttaacatcgccccttttaaacattacataactttcaaaagagcattcaacgttaaattcacgttgtaatgctctttttcactttaaaacaagtggcaaaatatcgataaattgaaaagtattgcatatatttgaacacttaatagacagaaatatcaattgcttgacttgggttatgagaaaaattctttttgtgttaattactttatggctgactattccggctatccatgcccaaaaagtaggattagtattaagcggtggcggtgcaaaaggattaacgcatattggtattatccgcgctttagaagaaaacaatatacctattgattatattgcaggtacctctatgggagccatcatcggctccttatatgctatgggatattctcccgatgatatggtggaactgttaaagtctgaagacttcaaacgatggtattccggagaagtggaagaaaagtatgtatatcatttcaagaaaaatctcccgactcctgaattctttaatattcgtttttcattcaaagactcgctaaagaatctgaaaccacagtttcttcccaccagcgtagtgaatccgattcagatgaatctcgtttttgttgatctgtacgcacgtgctacagctgcatgtaaaggagattttgataagctcttcgttcctttccgttgtattgcgtccgatgtatataacaagcagcaattgataatgagaaacggagatctaggagatgcggtcagagcttcaatgagctttccattcatgttcaagcctattgaaataaacaatgtgttagcttatgatggagggatttacaacaatttccctacagatgtcatgaaagatgattttcatcctgacattattataggaagcattgtatctaccaatcccaccaagcctaaagaagatgaccttatgagtcagatagaaaatatggtaatgcaaaaaaccgactattccattcccgattctgtaggaatatctatgactttcaaatatgacaatgtcaatttgatggatttccaacgcattgacgaactgcatgatataggatataatcgcactatcagcatgatggactcgatcaagagtcgcattcaccgacgtgtaaacgcagacaatatacgtttaagaagaatggtgtataaaagcaattttcccgaattacgctttaaaaatattattattgatggcgccaatccccaacaacaagcctacataaaaagagaatttcataaatcggacaataaagaattcacctatgaggatttaaaacaaggctattttcgactgctttcagacaaaatgatttctgaaatcattcctcatgcgatttacaatccggaagatgatacttacgacctgcatttaaaagtcaaactagagaataattttgcagtaagattgggtgggaatatatctacttccaactccaatcagatttatctaggactgagttatcaggatttgaattactatgctaaagaatttgttcttgatggacaacttggaaagatctataacaatatccaatttatggcaaagatagatttcgccacagctatacctacgtcatatcgtctcataggttcaatcagcactttcgattatttcaaaaaggacaagcttttttctagaaatgacaagccggcttttaaccaaaaagacgagcgctttttaaagttacaagtaggcttaccttttctttcaagtaaacgagctgaattcggcataggaatcgcaaaaatagaagataaatattttcagaaaaacatcatagatttcgggaatgacaaatacgacaaaagccgttataatttattagggggatccattagctttaatggaagcacccttaatgcccgccaatatcccacacgtggatacagagaagctcttgtagcccaaatttttgttggaagagaacgattctatcctggtgaagggacaactagcgataatagtaataggaaacaccactcttggctgcaattatcctatatgaaggaaaaataccataatatgagtgagcattgggttctgggctggtatttgaaagcattatatgcctccaaaaacttttctgagaattatacagcaacaatgatgcaagctggagaattctctcccacattacatagtaaaatgacatataatgaagctttccgtgccaatcagtttgtaggtgtcggcattcggccggtctaccgtttaaatcaaatgttccatcttcgaggagaattctatggatttatgccgatttatccgattgagaaaaactcactaaataaagcatactatggaaaagcgttttctaaattcgaatatctgggagaaatttctgtggtatgccaattacctttcggagacatctctgcgtatgtaaatcattatagttcaccaagaaaagagtggaatgtggggttaagcataggtttgcaactgtttaattatcggtttatagaataatttttctacaaaaaagtcgttgaaaagcttgctagttcgggaaaagtccgtatctttgcacccgttaaaacaaaataatggtcgcgtagctcaactgaatagagtagctgactacggatcagccggttacaggtttgaatcctgtcgcgatcactttttgaattaacagaatggccgcgtagctcaactgaatagagtagctgactacggatcagccggttacaggtttgaatcctgtcgcgg

SEQ ID NO: 11816 - DNA, 2744 bp, Unknown
  gut microbiota DNA sequence
atttcgatttgcggattatatttcaggtatttagccagacttccctgcaaagtatgtggaacacttggaacacgccggagatctctcacggtttccgtaattttgagattgctgccggagtatgcaaaggagagcattggggacctccattccatgacggagatatgtataagtggatggaaggagtggcttctgtctatgcagttaataaagatccggagttggacaagttaatggataactttattacttgtgttgtaaaagcccaacgtgcagacggttatatacatacgcctgttattatcgaagaactgaataaagggattgattcccatacaacagcattgggtgatcagtataaacagacggtcattggaacgaaagtaggtgatgagaatgaaaaaggagcttttgccaatcggctgaactttgagacttataatctgggacacttgatgatggcgggtatcgtgcatcgtcgtgctaccggaaagactactcttttcgatgctgctgtgaaagcaacggatttcctctgttatttttatgaaacggcttctgccgaactggctcgcaatgctatttgtccctctcattatatgggggtagtcgaaatgtaccgggctaccggaaatccccgttatctggaactttcaaagaatctgattgatatccgtggtatggtagagaatggtacggacgataatcaggaccgtattcctttccgcgatcaatatcgtgcgatgggacatgcggtacgtgccaactatctgtatgccggagtagcggatgtatatgcagaaaccggtgagcagcaattaatgaagaacctgactagtatctggaatgatatcgtgacccggaaaatgtacgtgaccggtgcttgcggcgctctttatgatggtacatcgcctgatggaacgtgttatgagccggatagtattcagaaagtgcatcagagttatggacgtccctatcagttgccgaatagtactgctcacaatgaaacgtgtgccaatatcggtaatatgttgttcaactggcggatgctagaagtgacaggggatgcgaaatatgccgatcttgtggagacttgtctttataatagtgtattgagcggtattagtctggatggaaagaagtatttctacacgaatccgcttcgtatcagtgccgatcttccttacacgcttcgctggccgaaggaacggacagaatatatcagttgtttctgctgtcctccgaacacattgcgtacgctgtgtcaggcacaaaactatgcatatacattgagcccggaagggatttattgcaatttgtatggggcaaatacattgacaacgacttggaaagagaagggagaagtagctctgacgcaggaaacggattatccttgggatggaaatatacgtgtaacgttggataaagttcctcgtaaggcaggtactttctcgctcttcttacgcatccctgaatggtgtgaaaaggctacgcttagggtgaatggacagccgttgcaagtcaatgcgaaggcaaattcgtatgcggaagtaaatcgtgcatggaagaagggggatgtagtggagttagtgatggatatgcctgtgcgtttgctcgaagctcatccgttggcagaggagattcgtaatcaggtggtcgtgaagcgcggaccgttggtttattgcctggaaagtatggatattgcaaacggggaaaagattgataatgtattgattcctgctgatataaaattgactccgaagaaaatcacgattgagggtagtccgattgtagcgctcgaaggtaaagcgcgtctggcacctgcaatttcttgggaaggagtactttatcgtccggtggttcagacagagaaaacggtggatattcgtttgattccttattatgcctggggaaatagaggaaaaggagagatgaccgtatggatgcctcttgccagataatcatgatacagaaatgaagaaatcaggaggaaaaataaagaaatgaggatgagaaagttatttttaacggctatatgtattttgtgtagtcattggttatggtccggtgagatatgggtttctcccaaaggtaatgactttaatgatggaacccgccagtctcccaaagcaacgctgactgctgctttacggcaggcacgtgaatggcggaggacgggagatgaccgtatgcagggaggaatcactgtttatatggaagggggaacgtacgctctgtatgagccggtttttattcgtccggaagatagtgggacaaaggaatccccgactgtgatccgttcggcgatcaatgaaaagactgtgatccgttcggcagccgatgaaaaggcggtgttgagtgggggagtccgtatcaagaattggaagaaacaaggaaagctctgggtagcagatgtaccggtatttaatggacgtccattggatttccgccagttgtgggtgaatggaaaaaaggcagttcgtgcccgtgatgtggaggatttcgaaaagatgaatcgcatttgcagtgtggatgagaagaatgaaattctttatgtacctgcagtttccattcgcagacttattgataataaagggaatttgaaaactaaatatgccgagatggtattacatcagatgtggtgtgttgccaatcttcggattcgttcagttgaagtgcagggagatagcgtggcaatacgttttcatcaaccggaaagccggattcagtttgagcatccctgg

SEQ ID NO: 11817 - DNA, 3255 bp, Unknown
  gut microbiota DNA sequence
ccgatacgtccgaatccattaatacctactttaatcattttgtttaaacttttaagggttttataatatttgttcaaatatctctcggtctccgcatttgttttatttttcaaatgcggtgcaaaattacaaaaatgtttttatattcgcatattaaattcacattaaatattgaaaaaagatgggaaagagtacatttttacaggactttaaggcgtttgcaatgaaaggaaacgtcattgacatggctgtcggtgtggttattggtggggcgttcggcaagatcgtatcatcgctggttgctaatgtaattatgcctccgatcggcttgctggttggcggtgtgaattttacggatttgaaatgggtaatgaaggcggctgagattggagccgacggcaaagagattgcgcctgcggtatcattggattacggtcagttcttgcaggctacctttgactttctgattattgccttttctatattcttatttatacgcttgattacgaaactgacggctaagaaaaaagaggaagcgcctgccgcacctcctgctcctcctgcacctacgaaagaagaggtgctgttgacggaaattcgtgacttactgaaagagaagagagattaattccgataaaatataggaggagattccgggcgttatcctgtgaatctccttttatttttctccttattattaataatagattgcgtacttttttctacttttgcaaatcatttatttaaaatccaaccatttatatgcaggaaaaaataataattcttgatttcggttcacaaacaacacagcttataggtcgtcgtgtgcgcgaattggatacatattgcgaaatcattccttacaacaaatttccaaaagatgattctacaattaaaggggtaatcctttcgggcagtcctttttcggtttacgataaagatgcgtttaaagtcgatttgagtgagattcgtggtaaatatccgatattgggtatctgttatggtgcacagtatctgtcgtataccaatggtggaaaagtggaaccggcgggtacacgtgaatatggacgtgctcatttggcttctttctgcaaagataatgtgctgctgaaaggagtgcgtgacggctcgcaagtatggatgagccacggtgatacgattactgctattcctgataatttcaaaaagatcgcttcgacggataaagtagagattgcggcttatcagatagagggtgagcaggtatggggcgtacagttccatccggaggtgtttcatagtgaagacggtacgcagatattgaggaattttgtggtggatgtctgtggttgcaagcaagactggtcaccggcctctttcattgaaagtactgtagctgaattaaaagcccagttgggagatgataaggttgtgctcggtttgagcggtggtgtagattcttctgttgctgccgtgttgctgaataaggctattggcaagaacctgacttgtattttcgtagatcatggtatgctgcgtaagaatgagttcaagaatgtgatgaaagattacgagtgtctcggactgaacgtgattggtgtagatgccagcgaaaaatttttctcggaactggcgggcgtgactgagccggaaggtaaacgtaagattataggtaagggttttatcgatgtattcgatgtagaggctcataagataaaggatgtaaaatggctagctcagggaacaatctatccggactgcatcgagtcgttatctattacaggtacggtgattaagagccatcataatgtaggtggacttcctgaaaagatgaatctgaaattgtgtgagccacttcgtttgttgtttaaggatgaggttcgtcgggtaggtcgtgagttgggtatgccggaacatctgattacccgccatccgttcccgggaccggggctggcagtgcgtattctgggtgatattacccgtgagaaagtacgtatcttacaagatgcggatgatatttttattcaaggattgcgtgattggggactgtacgataaagtatggcaggcgggagttattctgttgccggtgcagtctgtcggtgtcatgggtgacgagcgtacgtatgaacgtgctgttgcattgcgtgctgtgacctcaaccgatgctatgactgccgattgggcacatttgccatatgaatttatgggtaaagtatcaaatgatattattaataaggtaaaaggcgtgaatcgcgtaacctatgatattagttctaagccgccagctaccatagagtgggagtgataaattattcctagttatatatcaaaactcatcacgggttacacagatttttggttaaaacgaacttttaatgttaatctgtggaaatctgtgtaatctgtggtgaaaaatttagcagtagtcgaattgtttcgtttattgcagagccacttctaatcgttcactaacttcactgcgtccgggattaggatctctttccggcgtaattcaagcacaccgttgtcttgcagttcattaagagctttggacgtattcagccgggtgtcatccagataacgggcaaggtcgtccatctttaccttgaatattttttctccctgtgttttttcgcaatgtagcaggaagaaacgaatgattttatttttcaagtcctgagccggttcctcccataaacgggaataaagattttgtgcccggttactgacaatattcatgtagttaagccggaaaatatcatatttgaacaggtcgctgagcacaaaggctttgctgatacttacagtatgcgcttctgtatgtgctatgtaagaagaggtgtaatgggtgctcattccaaacagtgattgcggctctattaaataaggtgcttccatctgttcgatgactgtgtatatatttttgggggaatttgtgacgattgaaacttctcctttcaatagaaaacaaagttgtgtgcaagcacttccattttcaatgatggtctcccctgctttatgtttgataaagtgtagctttactttttccagaatactggtaaaatcttcattacaaagaccttgaaataaaggcaattggagcaaagtgtcgaacattgtttccatacgtcgtaatttcttgttaatcgtacaaatttactcataatacgatactgctgtcaacatctgacctctctttttgttttttttattgtttgaatgcataaaaatagagtatatttgcagaaaaaaaaggaggaaattatgttcacag

SEQ ID NO: 11818 - DNA, 4230 bp, Unknown
  gut microbiota DNA sequence
caatgcacggtcaattcgacggtactatcgaagcagatgttgaaaacagcaaattgatcgttaacggtcaagctatccgtatcacagctgaaagaaatccggctgacttgaaatggaatgaagtagaagctgaatacgttgtggaatctacaggtttgttcttgagcaaagacaaagctcaggctcatatcgaggctggtgcaaaatatgttgtaatgtcagctccttctaaagatgacactccgatgttcgtttgcggtgtaaacgaaaaaacatacgttaaaggtactcaattcgtatctaacgcttcttgtactactaactgcttggctcctatcgctaaagtattgaacgacaagttcggtatccttgacggtttgatgactacagttcactctacaactgctactcagaaaacagttgacggtccttctatgaaagactggagaggtggtcgtgctgcttctggtaacatcatcccttcttctactggtgctgctaaagctgtaggtaaagttatccctgcattgaacggcaaattgactggtatgtctatgcgtgttccgactttggacgtatctgtagttgacttgacagttaacttggctaaaccggctacttacgctgaaatctgcgctgcaatgaaagaagcttctgaaggcgaattgaagggtatcctgggttacactgaagatgcagttgtttcttctgacttcttgggtgacactcgtacttctatcttcgatgctaaagccggtatcgctttgactgacacattcgttaaagttgtatcttggtatgacaacgaaatcggttactctaacaaagttcttgatttgatcgctcacatggcatcagttaacgcttaattagaagattaacatataagaaaccgctgcggataaccgtagcggtttttttgtattcattttatatattgttaaaaagcaagcttttatccgcatagtaagctacaattttagtagttttgtgttcttatggaaagattattaataacattgatactaatttgcagcatgagtaatataataaatgcccagaatcctttcttcgggcagtacttgacaccgcacgaaaccgtgccttttgaccgtataaaaaccgagcactatgaacctgctattcttgaaggaatcaagcaacaaaatgcagagataaatgctatcatacagaacccggaaaaagcagacttccgaaatacaatagaagctttcgaacaatccggagagttactggacagagttaccgccatgttcggcaatatgctcagtgcggaaaccaacgatgacctgcaggcattggcgcaaaaaataatgccgctactcagcgagcatagtaacaatatcacgttgaacgaaaaactctttgcacgtgtaaaagaggtatacaaccaaaaagaaaacttacagctcaatccggaagaaagtaagttgttggaaaatgcctataacagcttcgttcgtcacggcgctaatctagaaggagaagcacgtgaagaataccgtcggttaaccaccgagttaagtaagttgacactgactttcagcgagaacaacttaaaagaaacaaatcgctaccaaatgctgttgacgaaaaaagaaagtcttgccggacttcccgaaattattgtggaagcagctgccgaaacagcgaaaagtgaagataaagaaggatgggcatttacccttcacgcgccaagttatgttccttttatgacctatgccgacaaccgtgatttacggcagaggttatacatggcgtacaatacaaaatgtacgcatgacaacgaattcaacaatatcgagatcgtaaaaaagatagcaaatacgcgcatgaaaatagcgcaattgctaggttacaaggattatgcggaatatacgctcgtaaaacggatggccgaaaacagcgagtctgtatacaagctgcttaaccaactgttggaagcatacacacctaccgcacaacaggaatacaaagaggtacaggagttggcacgtaaagagcaaggagaggattttgtcttaatgccgtgggactggagttattactccaacaagctgaaagataagaaattcaatatcaacgaagaaatgcttcgcccctacttcgaactcgaacaagtaaagaaaggagtattcggacttgcagaaaagttatatggaataactttccgcaaaaacacggagattcctgtttaccataaagatgtagaggcatttgaagtattcgataaagacgggaaattcctggctgtcctgtatactgacttccatccgcgtctaggaaaacgtgccggagcttggatgaccagctacaaagatcaatggatagataagcaaaccggtgaaaacagtcgtccgcacgtatccgttgtaatgaatttcaccaaaccgaccgaaaacaagccttccctgctgactttcaatgaagtagagacattccttcatgagttcgggcatagcctgcacggtatgtttgccaactctacctataagagtttgagcggaaccaatgtatattgggacttcgtggagttgccttcacaaatcatggagaattttgccatagaaaaggatttcctaaatacatttgcccgccattatcggacaggtgaagctctgccggatgatttaataaaacgattggtagacgcttcaaattttaatgtagcatacgcttgtttgcgacaggtaagtttcggtctgctcgatatggcatggtatacccgcaatacagcctttgaaggggatgtgaaagcctacgagcaggaagcctggaaaaaggcgcagatattgcctgtcatcgaagaagcttgcatgagtacacaattttctcatatcttcgccggtggctatgccgcaggatattacagttataaatgggcggaagtgttggatgcagatgcattctccctgtttaagcagaaaggaatattcaattgtgaaattgccgattcgttccgtaacaacattctatcgaaaggaggaactgagcacccgatggtactttacaaacgtttcagaggacaagaaccgtctattgacgcgttgctaatcagaaatggaataaagaaataagtattaactatgaagaagagtatatttcaaataataggactattattattacttcctttattttcaggatgtaatgattcggatgatgtagccgccatatttacaggaaagacttggaagctaaactatatcactgttgatggagggcacgagatgttcggcttttgggaaaatgaagcggaaaagaagaaaagtatggatgaacttaaaaaaaatggcacatacaatgttatatttgagggtacaactgaagatgatctgattaaaggaaacataagaggaagcgttatcacttcgtatccccttgccggaacctggagtgcaaacggcaaagacaataagttcaaagccaatatcacggaaggaaaggacggaggcgataaacttgccaaaaattttctggaaggtctcaagaatgcgacatcttacgaaggggacagcaaaaatttataccttttgtataagcctaccggaagtcagcagacctttcgaatggtcttttacgttgttaatcagtaactaatccgacacacaatatggacacagagaagaaacaatcagaacttgacaaacgttatatacgcatggctagcatatgggcggagaactcctattgccaacgccgcaaagtaggagctttaatcgtcaaggataaaatgattatctccgacggatataacggaacgccttccggttttgagaatgtatgtgaagatgaaaacaacgtgacaaagccatacgttctgcatgcggaagcaaatgcgatcaccaaaatagcacgttcaaacaacagcagtgacggtgcaacgatgtatgtcaccgcttctccctgcatcgaatgtgccaaattaatcatacaggcaggtatcaaacgggtggtttactcggaacattatcgcctggaagatggaatagagttattaaagcgggcaggaatcgaagtcatctatacagaaccggatgaaaagcctgcttcggacaaataataagacgaataaataagacgaacgttttaaaaaaggaatagacatgagtacaaaaagctcttcacgttttacacctgtcattatagcaatcagcgtggtaatcggaattcttatcggcacattttatgccaaacatttcgccggta

SEQ ID NO: 11819 - DNA, 5034 bp, Unknown
  gut microbiota DNA sequence
gtagatgaccaatatgtagacactgtaaacatgaccgacctcgtagaaaaagctatgccgcagattcttgccgaacttgatccgcactcaacttatatcccggcacagaacctcgaagaagtcaattcggagttggaaggcagtttcagtggaatcggtattcagttcaccatacagaatgacactattcatgtgaatgcagtcattcagggaggtccttctgaaaaagtgggactgatggcaggcgaccgtatcgtcactgtggacgacagtttatttgtcggcaagaaagtaaccaacgaacgggccatgcgtaccttgaaagggccgaaaggttctcaagtgaaattaggaatcaaacgcatgggagaaaaagacctgttgaacttcaatatcacacgtggagatattcctcaaaatactgtagacgccgcttatatggtgaacgatgacatcggctacataaaagtgagcaagttcggacgtaccactcatgtagagttgctcaacgcattggcacaattgaaccataaaaagtgcaaggggctgattatcgacctgcgtggtaacaccggaggatatatggaagcagctatccgcatggtaaacgaattcttgccggaaggaaaactgatagtatatacgcaaggccgtaaatatccccgtgcagaagaatttgctaacggcacaggcagttgccagaaaatgccactcgtcgtactcattgacgaaggttccgcttctgccagcgagatcttcaccggagctatccaagacaacgatcggggaacagttatcggacgacgctcgttcggcaagggacttgtacagcaacctatcgacttcagtgacggttccgctatccgtctgacgattgcccgctattacactccgtccggacgttgtatccaacgcccatacgaaagtggcaaagaccggaactacgaactggatttatacaaccgttatgagcatggagaatttttctcacgcgacagtatcaagcagaatgaaaaagaacgctataacaccagtctgggacgtaccgtatatggcggcggcggtatcatgccggatatattcgtaccgcaagatactacaggagtcacttcttacctttctacggttatcggtcgcggactgactatccaatttactttccaatataccgacaataaccggaaaaagctcagcgagtacgagacggaagaagaactgttgaattatctccgccgtcaaggactggtagaacagtttgtccgctttgctgacagtaagggagtgaaaagaagaaatatcctgatccaaaagtcgtataagctgttagaaaaaaacatttatggcaacatcatctacaatatgctagggttggaggcttatcttcagtattttaacaagagtgactccactgtcaacaaaggtattgaaatactcgaaaaaggagaagcttttcccaaagcaccgatagctgtggaagaggaagaagcaaccaataaagatggaaagaaaaaagaaactgcgtaaacatatagcaacactgaagacacattataattcagtgttgcggaagtcactatcaacccaaatacttgccgccctcgaagcccatccggcttttagggcggcaagcaccgttttactttactattcattgaaggatgaagtagaaacacatacatttgtacaaaaatggagcaaaaagaaacgtattctactcccggtagtggtagacgatgatttagaattacggatatataccggtcccgaagacatggcaactggaagctatggcatagaagaaccgacgggagaattatttaccgactatgcaaccatagactttatcgctgttcccggagtagcttttgacctgaaaggaaaccgtctgggacggggaaaaggatattacgatcgacttttaccacgcataccatcagcctacaaagcaggtatctgttttccgttccaattagtagaagaagttcctgcggaatctttcgacatccgcatggatattattataaccatcaacgaaaaataatatttgtaataacggtagcccccactttcgtattaagcgcacgtatcagcatttcacgccccatcatcaactcctgccgaagagccgcagaagtgagatgcacatacaaagtctgattacggatataaagattgctggtataagttgccgcaggtcccaagatttcaggccaggcatccaacaatctttgttcattcaacggagactccaaactctcctgacgaagaaattgctgtatcagtttccctatctgttcagcgtcattacgtttcattgttcagcctccatttcgcgaatgattcctttttcaaccaaaaacatcttatagtcactgcccactttatgcaaaatgcgatccagatgttcccgattcgtatccgtaataaagatctgcccgaaattatctccggcaaccaacttcactatctgctccacacgtgaagcgtccagcttatcaaagatatcatccagcaataataaaggaacagtccttccggtacgtttcaaaaaatcaaattgtgccagtttcaaagcaaccagatacgtcttattctgtccttgcgaaccttctttcttgatcgggaactcccctaaaagcatattcagttcatccttatgaattccccgcaaagagaagcccataatcttatcccgttcccggctttgcttcaatacttccaacaaagaagcctcccgcgcatgggaatcgtaagacagtccaacctgttccttatcttgagaaatgaatgaataaaaagactggaatataggaataaactctttgataaacacctcacgcttcttgaatacaacctcaccggcttgtgccatcatctcctcccacaccagaaagagttcttcttccaccggcagttcgcttttcagcaaagtgttgcgctgcgtcaatgctttattataacggatcaatgcatccaggtattccttatcatactgggaaatcaccacatccataaaccgtcggcgttcatcacttccaccggcaatcagttctgagtcggcaggcgacaccatgaccaaaggcaggaaaccgatgtggtccgaaaaacggctgtattctttcttattccttttgaattgtttcttcgaacggcgtttcattccacaataaatctcttcgggagttccatcctccgcctcatagaaaccttgaataacaaagaagtcctgttcatgacgaatattctgagaatcaatcggattaccggagctcttacagaaagataaaaagtacaccgcatccaacaagttggtctttcccattccattctgtccgaaaaaacagttcagtttagcggagaatcccagctccacctcttccagattcttataattcaatatggatattcgtttcagtatcattgtttacacgttaatttgttcacaaaagtagcaagattttcgtggttttcggaggtaaaataaaaaaagatggctctaaatttcatttgtagatataaaaaaactaattttgcgagtcgaaatatcaaacagtgaataataacaaaaagaatcatataaaaatggcagaacaaaaaaatcagaatgaacatctgaatgtagaagatgcactgacacaatcggaagcgtttcttatcaagtacaaaaacgcaatcatcggcggtgttgttgctgtgattattattgtagcaggttttatcatgtacaaaaacctctatgctgaacctcgtgaagaaaaagcacaagctgctcttttcaaaggacaggaatactttgagcaggacgcttttgagcaggctctgaacggtgacagtatcggttatgccggtttcctgaaagtagcggatgactacagtggaacaaaagccgctaacttggcaaaagcatatgcaggtatctgctacgcacaactcggtaaatatgaagatgcagtaaagatgctggatagcttcgatggaagcgaccagatggttgctccggcaatcttgggtgctaccggcaactgctatgcacaacttggacaattagataaagcggcttctactctgctgtcggcagcagacaaagctgacaacaatacactgagcccgatcttcctgttgcaagccggagaaatcctggtaaaacaaggaaaatatgacgatgcagtaaacgcttatactaagattaaggataaatatttccagtcttaccaagcaatggacatcgacaaatacatcgaacaagctaaattgatgaaaaaataataaggctctaaataccttactatatataactaagtatattatactttttagacgcggataacgcagataacgcgaatttcaaaatgaacaaatccgcattatctgcgttatttacgtttaaaagtcaatccccaaaattcaaattactacttactatggcaacagcttaccataatttatccgaatacgatttcaactctgttccgaacgcagagaatatgaaattcggcattgttgtatctgaatggaacttcaatattacaggtgctttactgaaaggagcggtcgatacattaaaaaaacatggagccaaaaatgaaaatattctggtaaaaaccgtacccggaagtttcgagcttacctttggcgctaatcaaatgatggaaaattgtgatattgatgcaataatcgcaatcggttgcgtaattaaaggagatactccgcattttgattatgtttgcatgggagccactcaaggaattaccgagctaaacgcaactggcgatataccagtaatttacggattaattaccaccaatacaatggagcaagcagaggatcgtgccggtggtaagctgggtaacaaaggagacgaatgtgcaattactgcaataaaaatgattgattttgtttggagtttaaataaatagttgtatctttgcaccgcaattgagaaacaaacctcctcaagagcaaaataaagggcaaataccagagtggccaaatggggcagactgtaaatctgctggcttacgccttcggtggttc

SEQ ID NO: 11820 - DNA, 17433 bp, Unknown
  gut microbiota DNA sequence
gttattcaaatatcaaacaattcacaacttcataaaaagttttaattaaacagtcaatcacaattttatattgtacttttgtaactcaaactaaacgcatgtatctgcatgagtacaaataaaaatgacatttatcacataggacttaccgataatgaggtcctgcaaagcagggaaaagaatggcgccaacctgctgacaccccccaagcgtccctctctgtggaggctatatttagagaaatttgaagaccccgttgtacgcgtactgttggtagcagccgtattttcgttaataatttctatcatcgagaatgaatatgccgaaacgatcggaattatagccgctatcttgctcgccaccggaattggttttttcttcgaatatgatgcgaacaagaaattcgacttactgaatgcggtcaatgaagagactttagttaaagtcatccgaaacggtcgtgtacaggaaattccgcgcaaagatatcgtagtcggcgatatcgttattctggaaaccggcgaagagattcctgccgatggagagctgcttgaagccatttctctgcaagtaaatgaatcgaatctgacgggagaacctgttatcaacaaaacaaccgtaaaagaggacttcgatgaagaagcgacatacgcctccaacctggtaatgcgaggcactaccgtagttgacggtcacggcacgatgcgcgttctccaagtaggtgatgcgactgagattggaaaggtggcccgtcaaagtaccgaagagagcctcgaaccgactccgttaaacatacagctgaccagactcgccaacctgatcggaaagattggttttaccgttgccggtctcgctttccttattttctttgtcaaagacgtattgttctacttcgacttcggagcattgaacggctggcatgaatggttaccggtttttgaacggactctcaaatatttcatgatggctgtcaccttaatagtagtagccgttcccgaagggctaccaatgagtgtcacactcagtctggcactgaatatgcgccgtatgcttgccaccaacaacctcgtacgaaagatgcacgcttgcgaaacaatgggagctatcaccgtgatatgtacggacaagacgggtacactgacgcaaaacctgatgcaagtgcacgagcccaacttctatggtttaaagaacggcagcgaattatccgacgacgatatcagcaaacttatcaccgaaggtatcagcgccaattctactgcttttcttgaagagaccgacaccggtgaaaagccgaaaggtgtgggaaatcccaccgaagtagcactattgctatggctcaatagtcaaggaaggaattatctgaaactccgcgaaaacgcacagatcctcgatcagctgactttctccacagaacggaagtttatggcaacgcttgtagagtcggccttgctgggaaagaaaattctctatataaaaggtgctcctgagatagtgctcggaaagtgcaaaaaagtcatgttggacggacagcaggtagacgctaccgaatatcgtccgacagttgaagcacaactgctgaactaccagaacatggccatgcgcacattgggattcgccttcaagattgtaggagagaatgaaccggacgattgcacggcattggtatcggccaacgacctaaacttcttaggtatcgtagccatctccgacccgattcgtccggatgtgccgaccgcagttgccaaatgtcagtcggcaggtataggaatcaaaattgtgaccggtgatactccgggaaccgctacggaaatcgcacgtcagatcggtctttggaatccggaaacggatacggagcggaatcgcatcaccggagttgctttctccgagttgagtgatgaggaagcattggaccgtgtgatggatcttaaaatcatgtcccgtgcccgtcctacggataaacaacgtctggtgcaattgctccaacagaaaggggcggtagtagccgtaaccggtgacggaaccaacgacgccccggctttgaatcatgcccaagtaggtttatcaatgggtacaggcacttccgttgccaaagaggccagcgacattacccttctcgatgattcattcaacagtatcggaactgccgtgatgtggggacgttcactgtataagaacatccagcgtttcatcgtattccagttgactatcaattttgtcgcgctattgattgtcctgctcggttcggtgataggcacggaactgccgttgaccgtaacacagatgttatgggtaaatctgatcatggacacttttgccgctctagctttggcttctattccaccaagtgaaaccgttatgcttgaaaagccccgccgcagcactgactttattatcagtaaagcgatgcggtctaatataataggtgtaggttctgtcttccttatcatactgctcggaatgatctactatttcgaccacagcacacaaggtatggatatacacaatctcaccgttttctttaccttctttgtcatgctgcaattctggaacctgttcaatgcccgtgtattcggtactaccgattcggcattcaaaggcctttccaaatcgtatgggatggagttaattgtattggccatcctagtcggacagttcctgatcgtacagttcggtggagctgtattccgcacagaaccgcttgattggcagacgtggcttcttattataggcgtttcgtccatggtgttatgggttggagaacttattcgccttgttcaacgtatgattcacaaaaaagaaagaaatgaaaaataaagggatcaaaaaccttcttattgatttgggcggtgtacttatcaatctcgaccgccaacgatgtatggagaactttaagaaattagggttcacggatgtagaagaacgtttgaatatccaacagttgaacggtatcttcatgcaacaggaaaaaggcttgattacttccgcagagtttaggaacgggatgcgggaaatgatcggtaaagcagtcagcgacaaacaaatcgacgaggcttggaacagtttcctgatagacatccccacatacaagcttgacttacttttgaaattgcgtgaaaaatatgtagtctacctgcttagcaatacgaatgagattcattggaaatgggcttgcgagaatgcgttcccataccgtacgttcaaagcagaggactattttgaaaaagcatacctctcatacgagatgcacctggtaaagccggagcccgaaatttttaaagcagtcatcgaagatgcaggtatcgaaccgcaggaaacgtttttcattgacgattctgagatgaattgcaaagcagcccgagaactcggaatctcgacttatacccccaaagccggagaagactggagccacctttttaagaacaagtaaattcgtagagatgcagattatacgtgacatatcgactcttcgcccggaaccctccatagctaccatcggcttcttcgatggagtgcatacgggacatcgctatctgatccgacaagtgaaagagatagcggccgccaaaggtttacgttctgcattagtgacttttccggtacatccccgcaaggtgatgaacgccgattatcgtcctgagttactgactactccggaagagaaaataagactgctggatgacatcggagtagattattgtctcatgcttaactttactcctgagatttcccggctgacagcccgcgagtttatggctcaagtgctgaaagaacgctatcaggtaaaatgcttagtcatcggttacgatcaccgtttcggtcacaaccgcagtgaaggtttcgaggattacgtacgttacggtaaggaaataggcatagaagtgattcgtgctcacgcctataccaataatataaagacaggagaacatcagaataccccgatcagctcctccctgatccgcaaacttctgcatgaaggagaggtggaacaggccgctctttgtctgggatacgaatactttctggacggaacagtagtaggcggttatcaagtaggccggaaaataggttttcctaccgccaatttaagtgtagacgatccggataaactgattcccgcagacggagtttatgccgtatgggtcacattcgacggacaaacctatatgggaatgctgaacatcggtgtccgcccgactattgacaacggtcctaaccgtacaatcgaggtgaatatccttcacttccattctaacatatatgacaagtttatccggcttacgtttgtcaaacggacacgccccgaactgaaattcgccgacattgacgagctgatagtgcaattgcataaagacgccgaagagacggaaacaatccttcttggcaaacaagcagagcggtcaaaataacgaccgaactaaataacatataactgagtaataactttaaaagcagattcgtatgcaaaagacattcatgagtatctccctggtggtaatagcaatatcaatgctggccatgtttatatgcagtttcttcacaacccgataaagcataaaatggtatgaaaacggctatcaaattaatattaatagaccttgtcatcgcgcagatcgctgcccctattctggtaatgattccctataccatctatttattggtcactaccgggaatctggataaaggtatactgacgcaagcgattatgattccggcacaattggcgggacaagtgatgatgggtatctatttatggaaagccggttatatcagtatgcaaaaaacaacgtggtctcccgtatcagcaggctatctgtcatgtagcgcattggccattctcacggccggatttgctgtatctgcattgatgggtctgctggattggatccctaatatcatggaacagtctttcgatattctccaatccggatggggaggtattctcgccatatccatcataggtcctgtactcgaagagttattgtttcgcggagcaatcaccaaagcattgttacagcaatacagtccggcaaaagcaattctcattgcagcattcctattcggtgtctttcatatcaatccagcccagatacttccggcattcttaatcggcatcctgctggcatggacattctacaaaaccggcagcttaatcccctgcatacttatgcatatactgaataattcgttgtcggtatatctcagtatcaagtttccggaagctgagaatatggacgacctgataaacggcaatttatatatttacgttcttgcaggagtctgtctcatattcatagcaaccatcctatatatgcagcgcatgacctctaataagtagaggtcatatcttccggaacacaaatatagaaatccgcccttcctttattctcttcatccaattgtccgatactctcctggcgcaccgaacaaacggtctttatcgtcgttcccggacgatattgaagcagatacggaatgattccgccttgaaagtccgaatggtagtttccattgaaatgaaggaacttgcttttcatattacgggcaataaaccatcccatcgtagcgtctttgatggcctgcgcctgtgccagatattccgcattccccttgcttttccccatcatgtgcatcaatgcgaaggctccctgttcctcttctttatatgtgaacgataccggaagaggcggcaaatagcgtttagcctcatcggacaatgagtccaaatactgcaatcccctgtctttcaccacgtttgcatagcgacggggaacattggtcgcaatgaacgggatacggttctccttagcaaagaacacaaacggagcataatccgtactataattgtcccacaaacgcgcttccgcttcaaaacggtcataagagatctgccgattcatatattcatccagaatcagttgattgtcggcctccagcatttccgcccccatcatcagtttatccttatgaatggcatacaaagaacgggcaagctcgtactccagccaatgagtaatgcagcaattatgaatctcaccgataaacacgacgtccggctgcgccaacgcagcaaccagttcgtcatatccaatctccttgccgttcgcatcaaacaaggtatacgctttcttatagcctttttgggcaaaggctgtcactcctaccaaacataggagtaacaacacacatacttttttagaaaatagtttattcattgtatttctgatgttttccaatatataataatacaaacttgtcagggttcaccaattccttgaatgctttccgaatatccgtagtggaaatagaagacaggcatttttcgtactgttcaaagtcgtctatcgtctctccgttcttcagcaaattcaccagattggtacgccattccgcagacgcctcgtttgaaaggactttttgttttgtcagcaagaacgattttttcattgcatccagttcctcttccgacactttatgagtacggagttcatgaatgatttcttttatcaatccttccacttttttcgtattgccccaatcaacggaagcggacaaatcaaaataaaacacctgctgcggcagtccattataaaacaaagaagcatacggagaataaacgatattttcccgttcgcgcaatatactcaacacacggttctgcaaaatatcacgcatcagcttcagtgtaagactattcctcaaagagggttggtaattgccacagaatacataatcgaatatagtctgcgtatcattttcattcgggaatgcttcgacatacgtttttccgggcaacttgaatggtttgtcagaaaaggacaatcccgtctctactttttccatacgggcaaaagtaccggtcagcaacttcttaatgctgtccgtatcaaacttaccggtcacaacgaacaccgtttgcgagggattggcatataaagaacggtaataggcagcaatcttatccagattaagcgactctaaatctttctttgtcaacgccgggcgagaaactatattccccatcagcgaatccagacgattcgtcaacgcacggtctgaagcacgtttcatcatctgctcaagtaccgtttcctttcccaaacgttctatctcgtcctgccggatttcatcgaagtctttgtaacaaagttccggacgataaatcttctcatacatcaggttaaacaattcttgcgctttgtcggcaggtgccattcccattatatcatgccagaagttactgatggcaaggttcatggatatttcttcttgttgcatataagaagacagggtatcataaggcacacatgctattcctcccatttccatatagccacctgttccttcgtaaagcggataatcctcatccgacaaatctccaacgcctcccctaccgaaagcggtcacaaagagagactgattctcatcatccgtaggacggagcagaaagcgcagcccgttcttcaaaaagacttccgtcaaattcatctccggatatttcttctcactgacaatatcagaagcatcaaacatgtggcttttggtcagacatacaggtgccgttatcgtctcttccttcacctctttgggtacgtagacaaactctttcaacggactccggattcctttttcccatgcacgtagtatgtcttctttctgaatagagttctgtttacccgtattattgcgataggcaaccagcaaagcctgctctttgtaggaaagccattcctgcaatagtttctgcaaagtagcactgtcagtcgaccggatcttttcaagcaattggcgcatctccttctccgattgtatatagcggtcaccggatataacgtaatctacaaaatcatcacaccacttgccggacagctgtgcggaacagtccaccttcaatgttctggaaagttctttgatagcatcatccagctcttccggcgtaaagccgttcttcaagatacattccagctcgttagacaaatcggatacttgctgcaaaagaccggatttatccgttccggagaaagtaaacacaaaatgattcttatcggaaagaaaccaggcatcggatacattactacgaatctgccgagcttgcaaacggttagtaatagcccgtaccaacaaagagccaagctctttatggtagatagttccaactgtatttcccactacgcaaggatgagggataatcaactccagttcagaactgcgtttgagatcatctcctatctcatgaagagctattcctttttcataagtgagaggataaacacgataccctttcaccttcttacggggaatggaagcgaacatttctttgatcttcttctctatggaaaccggatctacatcccctaccaccacaacagtggccatttgtggagagtaccattgctgataaaactcaatcagtgttttacggtcaatgctacggatatcctccgaactgcccaacggcatacggtcggtaaaacggttttgaccgatcttcaagctataaaagtcatctcctatgtcatagccgcgcaactcttccaaaatcactccgcgttctttcttcgtccgttcttcctcaaaggagagtccgtccaaccaatctttcagtatcaacagaactttatcacttacggcagaatcagtcttatccatcggcactgtcagcatgaaaatagtacggtcatagccggttacagcattgatatcccgcccaaacttcattcctagactttccaaatagtccaccatgccgcgtccgggaaagtgtttgctaccggcaaaagacatgtgttccaaaaaatgggcagctcccttttgcttatccgtctcctgtgctgagccgagccgcatcaccagacgaaactccgtcgtatgagccggtgtcccgttcgggagaatcagataatgcaaaccattcggtaatacaccttcaacggtgttgggaggtaaaccgatcttcttctctgaaacggattgttgcgcaagcatatctacagatattactcctaaaagaaatgctaagactagaatagcttttgttttaatttgttgtagcataaattaattataagtctgttatttatttaaggtataagttacatagatttgggtgtaaccacctgaattataatgatcccatgaaaattggaaagtaaatgtatcctcgttaaaagagcctttcggttcaataaaatcggaaggttcattttcccatccatcttcatcaatagttgatataaccaagtaaatacgaggttctaatgtagtacccatttcaattaaatcagatacattgtactctgtatatattggatttccactatccccttctccatccgggacagctactttctcaccattatcagctttttgtttccaacggttccatgccgtaaaagaatacttaaaaggaactgaagttatcgattcatcatagttatttaacactgttcccaaaaatgaaatagagcgttcttccaataataattccaaattatcaagtgtcacctcaaactcttctttatcacgatcaaactcaatagcagtcaacatacattgattccattcattaatagcccaactttcctcctctattgtttctttttgtaatatttcccataagaatgaggtcagtcccatcggattatcaatcatcttcaatatcggtcgttcagcagtagcattatcacttaacgtaatcacactcttaccttcaaaagaacgggtttcttcatcatagaatgttccaatatcgccttccggataacgtatttccacattacatttcagcactccaataaactgattcaagtctaaaccatatttttctttataccctttaataagttcaagttgctcttcagtcaaagtaggtgattccacacttggcttcacaatcagttttaaatctctccaagcttgcatacgaggatcagtataatcctttaccttcaaagtcattgaccgttgagcttttattaatcctttatgattggaagctatcttaaagctcgcttttttttcgccagccttaatcagcacactcccatcgttctccatattcaaaactccatcctcattgcccgacaattcaaaatgaattgtagcgtccgtttctacagcagtagccaaaagcacatctacagtaacaggacgatcatcattttccgctatggcagggtcatccgccgtactgatctgtatataattacttcctttgtaagtataatcaatatcgttactacaacttgtcactaatcccaacaagaaaaggacgtataaacacagataataatagttatatctcataatcttccttttttattgaatcaattttacctattcaaaggccatccttcattctgagttatattctcattatatttatattccgaacgaggaatgggaaaacaccagcgataatcatccacctttattttggtatcttctctatctccccactgcgacaatcgggacaaacctcccgagtgcaaacgcttcaaatcgaagtagagcacgccctcaccggcaaattccttttgtttttctttatgaatagcctctatcagatccgttcctgtcaaatcatcctccataggagtagcttggcaagcctccagatattcattcatcttttcaatcgccttgccttcttgcccggtctgccgactataagcctcagcagcaataaagtaagcaccggcatagcgcatcacgttgatatactgtatacttttggattccttattccatttattatatttccccatcagatttcgggactctccatccatctcgaaaggatatacattataagcttgacgtatatcatcgtctccataagtgatagcgggattcaatgcaaagtaatcaccgttcgtcgcatcaaactgaatacctgcataaaaactcttcgatgtataaaaagcgaatatacgctctttgcaggaagccgtttcccaaagtctttcgtaaccattctccgtgaacatatcatccgtcgctttttccagcaccttctccgcataagttacggcttgcccatactgtccggcatacagttccaactcagccaacagataataaaccgcagtctgagacagccagccgttcttatccggattattctcgaccgcagcagcttctgtcagtaatgtacggatagtagtcgtacaggtttcgatggaagaacgtttcggaaaagcaagtcccagttcatccttcaatacaatcccatccgcttgcggattcttgtcataggcaggagcaaacagtctcaacagattgaaatagcaaagcgcctttaatgctttcgcctcactaatgatagccgctttatccttctcctccgaagcattctccagcgttatgttatccacgcgttccaataaagcgttgcaggaggcgatcgtgttataatactctccccacaaactttcggcaagagtcgttatggaattatcctgccaagcataaaggttcttcaggctcatatcttttcccacaatggaagtcgggcaaaaatcatcgcccaaaatagaaagttcatattcgtaatgtggatacaaactataaacagaagacaaaagagagcgtgccgttgaaatatccacaatagcatccggatccgaatactgatcggaagggggaatgtccaatgaacaagaagacaatcctgacagactccccaccatgacggcacatatataaatgagtttctttatcataatcgttatcctttaaaaagtcagattcatattgaatgtataaataggctgcatacttcctgcaagtgtgccgctttccgggtcggactctttgtatgaagtccaggtaaacagattggaaccttgaaaagcaaaagtagcatacttcacgaacggtatcgttttccgcaagaaacgttggtctacacgatatcgcagagaaatcatagagagtttcaggtaatcactctttcccacagtcaaggagttgggatacaaagtaaggttctcttccgcagtagctgaagtataaaaaggagtaggatatactttcccttcatcaccggctttgaaccacattctttccgtctgtcctgccacagcgttccggttcacattatccttatcacgcacatacgaataattgaattgatgaatgccgccgtgtacataatagaaatccacatccaagtcgaaggctttgtaagaaagagagaggccgaagcttccggtatacggtggtgtagaatgccccaaagctaccacatcatccactgtcaatgtttcactcgcctgcttctccttattatctttcaccagaaataccggataaccggtcaaaggattaatgcctaaagactgaggaccatagatcatatcgtatgacttgcccacttcataatccggaaccaatacatcctcagatgcatatatcttgtctgcataatacaagtcaattaccttgttacgattatacgccatattccatctcaaattcaaaatccaatctcttgtatccaagactttcgctttcagtccgaattcgattccccggttttccaatataccgatattgcgcttcaatgtggtataaccggtggaagaaggaataggcacatcaagcaacgcttgttccgtgcggcgattgtaccagcttgtctccaaagtcacccgattgaacaactcaatactgactcccgcatcaatggatttcgtctgttccggtttcaagtccttattataaagtcccatcaactccagaacacgctgatcctcatatgcattattggaataggcgaaagtagctaccgtagaggaaacggaaacaccgttcagattggctgtatatccgtaagacgctttcagattcaagcgggtcaggacagtattgtctgccaggaaagagtaatagctgggagtccaaccgataccgactgcccaagcgctattccaacgcttgtccgaaggcaggatagaagacgcgtccgctttataagtcgcatagaaatcgtaaatattatcaaaggtataacctaatacagctcccaatcccaactgcgcatttttatctttcagagcgccgacttccgcctgacgggttccctgaatggagtgattgatggcagcagccgaattaatcgttcccacgccataaccggttatggacacattatccaactgagtgaggtagtagtccatattagctcccaacgtaaggtcatgcctaccggcaaatacatgattataagtcgcacgaatgttagtagaaatgttcgtggtcgtattctttgattttgcgaaaataccccgtttaagttccggaataccacttgtcatttccgaataagaagtagagggggtaaactgttccgtttcatccaacagaaagtccaatcccgccactgcggcaatatccagtccgggcaagggattcaaggtcaggctaccactgatcccggcagttttcgccgcactctcctggctgaactgattcatcaagtccttataagtacgtcccggataagaaatcagttcgccaccgtctttcgtttcataaggattcaactcataaaccaactgggtcggatcggaagtagatccgttcggggtattcgtcttcgcatatccaccgttcacactcagcaaagcgtaaccgatatgtcccagtttctgatccagattcatacgcaaactcatacgctgcttgtcattacccggcaaacgtcctccttgcttggtataattggcagatatataataggtagtctgttcgcttccgccccgaatgcttacattatgtttctgatacagattgttacgaatcaactctttgaaccaatctgtattgatattcctcaattcgttcaacttctgttcccccgacgcaatcagttgcgacaagttaggatcgcccgcatagtatttattgtagtaatcagcactgtaacgatatcccggagtctccggattctgcagcaaccgttccagttccagtttctccgctgagtccatcatagacacgccgcgacgaccgcgcgtcgtgactcccatgtccaacgtataagtaaccattgtctgcccgctgacacctcgctgggaagtgatttccaataccccgttggcagccttgattccatacaaggcacaggcagccgcatccttcagcacctttatttccttgatatccatcgggtttagattgtagaaagtttccggactgatgaccttaccgtccataatatacaacggttcattcgttgtattccctttacgtaaagaagagtttccacgaatacggatttcaggggtcgaacccagttccccggtattttggataatcaatccgggaacagaaccttgcaatgccagccccatatcgatcatcggcttactattgatgcgtcgcatatccacctcttgcaccactccggagcgggcacgaatatcaatctcattaatattagctttggctgtgacaacaacctcatccatattattcacatcatcaagcaaagtcacatccagccgtgtttgtcctttataggtaactactttccgcttcataccgataaaggaaaactcaatactcacaccgggctcccactgtcccttcaacacatactctcccttttcattggaaatagctccataaggcgtattttttaccttaatattaactcccgctaacggaagatcctgcgaatcgcgcacatgaccagaaattcgtttttcttctctttgcgcttgcaaaatgacacaaaatgaaaggaaagctaaaaacagtatccgtctctttaaatagtagttcatacattttgtcttttaactatatggcgtaaaagaacaaagaaaagctaataaagacaaataatgcctacggcaattaaactattttaagaattatacctattaataggtagagcggaactgcccatctgttttacttttaactacttcccctcttttgctttgaatgccaacgcatacatccgtatttgttttaccatcgacagcaaaccgttgctacgggtaggtgacaaatgttccttcaacccgattttatctataaaataaagatcggcattcaatatttcatcaggagtatgatccgacaataccttaatcagcaaagctataattccttttacaatcaaagcgtcactttccgccttaaatacaatcttgccgtctacatcgtccgcctgaagccataccctgctctgacaaccttcaatcagattctgttctgttttatatttttcatccagcggttcctgctcatttcccaaatcaataagtagctggtagcggtccatccaatcatcgaagtcactgaactctgcaattacttcgtcttgtaattcattaattgacatactatttattttatttctcgttatagattacctccaatacagtctgaccgactgctttcaatgtattcttatcaatgtgatccatattatccgtgagggtatgccaggtaggagtaaatccaccttccggatcagaagcaatgatatcaattgtcttgatacgcgccaaccggttaatgaacaaatgatcgtccgtcacccctcctccatcttcattgataaacagattgccgtatcccagcttccgggcagccttccaaaccttcttattaacgtccggcgcaaacttctcggaataggattctttcagaaagaccgtattcttacctcctaccatatcaagcagaattccgaaacgggcattgtatccttgaacatgaggattgcgcgcccaatactgtgctcccagacaccacgactcttcgttatcctgatcgtgcgctccataatcttccgcatcaagaaaaatgatgtcgattccaagctccggttgctgttgatgaaccagacgggcaatctccagcaaagctcccaccccgcttgctccgtcattagcaccgagaataggtgttttatgattctttttgtcaggatcattgtcggcccatgggcgtgtgtcccaatgtgcgaacaaagcgattcttttcttactttccggcttataggagccaatgatgtttctagccttcagcaaagtaccgtcataagctatcaaatctgcatactgatcggtcacctgtgcgccaaactccttcaattgctgcgccagatagtttccacaagctacatgcccctttgtgttggggacacgaggtccgaagtccacttgattctttacgtacaaataagcgctgtccgcatcaaactgaggtacattcaccactatcttttcgctttgttcattagttgtattcgctttgttgcctcctccgcacgaaaatgcagacagtagcagaaaagcagtcgtcagtaacatcatagatttctttttcattatcctcttatctattaaggtctcaaaattaattattttcatcagagtatcacccggatggaatagattattaacatataaactttaattccacatttttctttccaacggtgaactccactctggctccattgataagcggcagattgtgcgcgacatgtcccaccggaaaattaaaacaaacgggataatcatactctttcaccaaatccgccaaagccgcatacagttccttgcccagcgaacggtcttcttcatattccgtaaactgtccgatgatgagcccggacaatttttcgagcacaccacccaatttcaagttatacatcatacgctcaatggcatgaggacgttcgcccacatcttctataaagagcactgttcccactgccggaatatcgtatggagtaccgcgcaagccataagccaccgccatatttccgccccgcaaaataccttccgcactgcccttcctgttcaacttatgcttctcacaagtataaacaggaagattgcccgacaatatatccttcaaataaagcgaacacagatcatcctccggctccaccgtaagatggcgcgccatcaatgaatgcaacgaagcataaccgtttttctggaacaggttatgcagagcggtaatatcactgaaaccaagcagccatttcggatgttcgcggaaagcggtaaaatcaagtttgtcaatcagatgaaccgctccatacccgccccggctgcaaaggatggcttttactttcggatcgtccattgcatcctgcaaatcatccaagcgttgtttgactgttccggcaaaccggccggaagagccaccggcatgttttcccatagcgaccttcaagccccatgactccaaccgtttcttcgcacctttcaagaacagcttatctatcttactggaaggtgatacgatgaccactttatcgtctttctgcaaaaagggaggaaattgaatatccatacttaataatctatttatgattcggtagatttattcagcaaagttactacaaaaaagtgaaatgcggaaagatatagtgatagaattgagttacaagggttttgg

SEQ ID NO: 11821 - DNA, 230 bp, Unknown
  gut microbiota DNA sequence
cctgccagcttgcggatggtgtccgcatcctgcctattcagccggggtatgacctctgccgaaacaaccgcctgccggacatactcactgacacgcaacccggcttccccggctcgcttcctgatggcataatactgcaactcggtcagcttcgtgctgactacccgttgctgcttctctatccgtttctttgccggacgtccccccggcttatcctttatattcgtcat

SEQ ID NO: 11822 - DNA, 11511 bp, Unknown
  gut microbiota DNA sequence
ggctcgaacccaggaccccaacattaaaagtgttgtgctctacctgctgagctagcgaatcaatccttattgcaaatcacttatttcctgattgcgggtgcaaaggtagctacttttatttaatttgcaagtattctgcagaaaaaagttttaattattttatctctttatggtttatttcttgattatcagttatttctgcttcttcatattttatcttttctttattgataataaaacgttggtagtaggaaagcattaaagtcgttagcggcagagcgataatcatgccgagcattcccatcaatgaaccccagatagagagagacaagagaatgatggcagggtttaggccggtgatctttcccatgattttggggacgaggaaagtatcttgtatgatttgaacaacggcgaagacagccaatgcacatgcgatgatgatccagaaattctctccggtatccgcagctttgagaatagctagtaggacggtaggaaagaaaccgatgatctgcaagtagggaaccatattcagagcgccgatgaagagtcccaaagcgatagccatcgggaagtcgataatcaagaaacctatgctaaaaagaatacctacgcaaaaagcaactagtgcttgaccacggaaatacttattcatgccatcctgtacgtcacgtaccagattggatgcaaatgtacggtacttattcggcaacagatgcaaccatccttcggctattgcttcataatccaacaatataaagactacatataataatatgataaaggaggtaaagatactgaataagatattgagggattctgcaagcaatgtccacaatctgggtacggtatccttgattgccgccaggatattctcctcacttaatatacggttcaatgcttgaagatcaacatattcgtgaatgaactcggagagattcttaggtacattgtttccggctccattggtgagataagtcactaataaatcgttcattctgctcatttcggaaatcatgggcggtactagcaaataaaatacggtgactccgatagcgctaatcagaaacaaagcacagaaaatggaaaggatacggcttttcaaccgtagcttatattggaagagtttgactagcggataaatcatataagcaatcaaccaggcaatgaagaaaggcagtaacactccgctgagacgttctataagcatcaatattcctattactaatacacatccgatagaaccgcgtatgaaactgtcgaatgttatcttctttctttccataatctgtttttatttatagagtttatatttgcttttcgtcttctttgcgcgcacggagataacattccctacacaaaggctcgtattcggacgtttcacccaaaagaacctgtttttcatttttcactgtacgatgagagaaagaggccaactgtccgcattttacacagattgcatgaactttggaaacttcgtcggctatggcgcataattgaggcattggtccgaatggattacctttgaagtccatatccagtccggctacaatgacgcgtataccgttattagcaagctgattgcatacatcgaccagcccactgtcgaaaaattgtgcttcatcgatacctactacatctatctcggaagtaaacagcaggatactggctgatgaatcaataggagtggaggcgatggaatgactgtcgtgagagactacgtcttcttccgagtaacgtgtatcgatagccggtttgaatatctctacacgttgtttggcaaactttgctcttttcattctacggattaactcctctgtctttccggagaacatggagccgcagataacttcgattctacctcttcttctcgtctcctgtatgtggtcttctgaaaataataccatgtgattttgtgttttcttgattaaataatatgcggacaaaggtaagcaattcaatgtgcaagaactgttaaattatccattattttaagttattgcataatttattcctacattcgcatcatattaacaatagactagcatgaaacagaagttgttaacggatattgagttggatgttcatgggttgaagtatctgatggatttatattctaaagaaccggctaaggctgtgttggaactgttgaaacagaacattcttcatatgcagggatgtttggatgaggtattgcaggaattggaacctgttcgggaaaatgcttctgttccttgcgggaatgcttctgaacctgtggtggaagaggtgatagtagagacaaaagtgtcggccgatactgagacggaggaagttaagccttcttctgtattgggcgaaagtataaagacctctgtcggcttgcgtcattctatcagtctgaatgactcttttcgtttctcacgtgaattattcggaggggatgttgagttgatgaatcgtgttgtggagcaactgtcagctatgagctcttataaaacagccgttgcattcctttcttcaaaagttaatttcaacgaggaaaacgaaacattaagtgacttccttgagttattaaagaagtattttaaccaatcagcataagagaagaatgggaaagctatatgtagtgccgacgccggtagggaatctggaagacatgacctttcgggctgtcaaagtcttgaaagaggtcgatctgattttggcggaagacacacgcacttccggaatcttgctgaaacattttgaaataaagaacgcaatgcaatcccaccataaatttaatgaacataaaacggtggaaagtgttgttaatagaataaaggcaggtgaaacggtggcattaatttcggacgccggaacacccggaatctcagatcccggatttttggttgttcgtgaatgcgtgcgcaacggcattgaagtgcagtgcctgccgggagcgaccgcttttgttccggcgcttgttgcatcgggattgccgaatgagaagttctgttttgagggattccttcctcagaagaaaggacgacagacacgattgaaggcattggcggaagaacgccgtactatggtgttttatgaatcgccccaccgtctgttgaagacgttgacgcagtttgccgaatatttcggtatggagcgtcaggcaaccgtgtcgcgagaaatatccaaactccatgaagaaacagttcggggtagtttggctgaattgatagaacactttaccgctaccgaaccgcgtggcgagattgtgatagtattagcaggaatagacgattaaaataacttcattaaaaaaaacgtaaaacgtagacgtatgaaaaagttaacagttttatttgtgtgcgcagccatgttggcttcgtgtgatagctttaaaggtggaaataaagacttgaaggctgaaaatgattctcttttgatggaacttacccaacgcaatgctgaactggatgatatgatggggactttcaatgaagtacaggaagggttccgtaagatcaacgctgccgaaagccgtgtggatttacaacgcggaacgatcactgagaattcagccagtgcgaaacagcagattgcttccgacatcgagtttatatctaaacagatggaagagaacaaagcacagattgccaagttgcaggctcaactgaagaatagtaagtataattctactcaattgaagaaagcggttgaggctttgacagctgagttaaatgcaaaacaacagcgtattgaagaactccagactgaattggcttctaagaatatacgtattcaggagttggatgctgccgttagcgatctttctgcagaaaaagaaacattgactgccgaaaacgaggcaaaagctaaaaccgttgccgaacaggaaaagagcctgaacgccgcatggtttgtattcggtacaaaatcagagttgaaagctcagaagattcttcaaagcggagatgtgctgaaaagtgctgatttcaacaaggattatttcactcaaatcgatatccgtacaactaaagaaattaagttgtactctaagcgtgccgaactgttgactactcatccggcaggttcatacgaattggtgaaagacgataaaggtcagttgacattgaaaattactaatcctactgaattctggagtgtatccaaatacttggtcatccaggtaaaatagagtagatatcacttttgaatggccggtgtgctgattcctgaatttaagaaatcggcacattggcttttttgtttcttattatatactcactaactactgatgaaatataaaaatcttttttttgatcttgacgatactatttgggccttttctcaaaatgcccgtgacacttttgaagaagtgtaccagaaatattcatacgaacgctattttgattcgttcgatcatttttatgcaatttatcaaaagagaaatactgaactctgggttgaatatggtgaaggaaagatcacgaaagatgaattgaaccgccaacgttttttttatcctttgatgtcggtaggggtggaggatgaagcattggcggaacaattttcgaaagatttcttttctattattcctactaaaagaggcttaatgccatacgcaaaagaggtgttggaatatcttgctccgaagtataatctttatatactttccaacggttttcgtgaattgcaatcacgcaagatgcgttcggcaggtgtggatggttattttaagaaggtgattctttcggaagatctcggggtgttgaagccttaccctgaaatatttaattttgctctgtcggccactcagtctgagttgcgggaatcattaatgattggtgacagctgggaagctgatattaccggagcttatggagttggaatgcatcaggttttctacaatgtgacggagcggactactttcccttttcttcctacttaccacatccactctttgaaggaattaatgactttgctataggcttgttagtgtgaactatacttcatgatttgtgccagaactcgtttttcaccacagattatacggattaacacagattaaaatccgtgcattgataatctgcatttatcatctgtgttaatccgtgtaatctgtggtgatgtggtgaattatgctatgtttgtgtgtgggtagtgtcactcattcttttgtgaagcagctttttcgaggtcacgtacgattgtgatgtccattatattggcatatacctgagtggtttttacacttttgtgtcccaacaatttttgtacggtagttatatttgcaccgttatatattaataaggtagcattcgtgtggcgggctgtgtggaaagaaatgtgtttgctgattcctgccaatttggctagtacattcagttccttgttaagattggaattatcttttaacttgaaaaaactattgaggtcattcttgtagcggtggagtatatgaatacctttgccctcgaataacaggtataatggaaggcgtacctcagtgcctgttttgacagatttatagataagccaaaattccttatgaaactcaatgatattctcggaggtcaggtgagtgaaatcagaatatcgtaaccctgcgtaacaacaaaataaaaaggcatctttgggcttttgtaattttgcaaacttctctgtgagttgaacttcttccagtttatgcaattcttcgggagacaaatgggtatgtctgccttctacacttttgattctatattttctgaaggcatatttctgtatatccatatattctttattaatagcaatattgacataacgttttagatgtttcatgtgcttggcaattgtattaagatgatatccacgagattgcaggtaagaatcgaatgaagaaacaaattcaaatgtgaggtctgtaaagaagatctctttcttgaacgcttgaagtaactcgagggtggaaagatgattgtgcttggtactttctttcaaagaagaggttgctagttcttctttatagaaatctaaaaaagacttttcgttgcttacaggtttcttaagtaagttctttaataaactcaatgaaatctcttttccctgttgccacaatccgagttctgtttgctctattgtagatatatattcgtataacatacagtttaggatgtctgcattaggatggttctttaccattttccgtttgtcgtcccattggtttggtttaatatagattttagtggagagatacatttttttcttattaaggtaagcttccacttgtattaatgccattcctctcttattcaaattcttttttctgttaaacacaaggttgtaactaatcttttccatacttctgttttttattgatgttagaacaatttagatgtagttctgtgctacatcggtgatgaatatgcattaatatctctaaaaagattatctttttttgctatatttgcacccatattattattaaaaataaagaatgaaagaatttgtaatatccgaagccaaagtagagacagcaatactggtcggactcatcactcagacgcaggatgagcgcaaaacgaacgagtatctggatgaattggcattccttgccgagacggctggggcggaagtagtgaaacgatttacacaaaagttaccgacggctaactcggtgacttatgtagggaaaggaaaactggaagagataagaacatatatccgtaacgaagaggaggaagaacgtgaagtgggaatggttatctttgatgatgagctttccgcgaaacaaatccgtaatatcgaagccgaattaaaggtgaagatacttgaccgtacttcgctgattcttgatatatttgccatgcgtgcccagactgccaatgctaaaacacaggtggaattggcgcaatataaatatatgctgccacgcttgcaacgcctttggactcacttggaacgccagggaggtggctccggtgcaggtggcggtaagggctcagtgggacttcgtggtccgggtgaaacacagcttgaaatggaccgtcgtattatcctgaaccgtatgtcgttgctgaaagaacgtctggcagacattgataagcagaaggctacccagcgtaaaaatcgcggacgcatgattcgtgttgctttagtaggttataccaatgttggtaaatcgaccattatgaacctcctgtccaagagcgaggtatttgcggagaataagttgtttgcaacgctggataccactgtccgtaaggtaattatcgagaatctaccgttccttttgtcagatacggtcggatttatccgtaagttacctaccgatttggtggactctttcaaatcaacattggatgaggtgcgcgaagccgacctgttggtgcatgtagtggatatttcccatcccggatttgaagaacagattgaagtggtaaataagacactggccgagattggcggcggtggcaaacccatgatacttgtatttaataaaatagatgcttacacttacatagagaaagcatcggacgaccttaccccccgaacaaaagaaaacttgacactcgaagagctgatgaagacgtggatggcaaagatggaggataattgcctctttatttccgcccgcgagcgaatcaatatggacgaactgaaaaatgtagtttatcaacgagtgaaagaattgcacgttcagaaatacccttataacgattttctttatcagacctacgaagaggaagaataaataacactttatttatatgaaagactatcgtagattgactgaagatgaggtacttcagttgaagagccaatcgtgtttggctgatgattggggaaatgttttggttgccgaaggctttaattgtgagttcgttcaccatacccgcttttcgggagaagtgaagttgggcgtattcgagtctgagtttacattgccgggaggtatcaaaaaacattcgggattgcgccatgtgacactgcacaatgtaacagtgggggataactgctgcattgaaaatatccagaattatatagctaattacgaaattggcagtgataccttcatcgaaaatgtagatattattttggtggacaagttgacgactttcggcaacggggtagaagtagcggttcttaatgaaacagggggacgtgaggtgctgattaatgataaattgtctgcgcatcaggcttatatactggcattgtaccgccatcgtcctgagttgataaaccgcatgaagtcgattgcggattattattccaacaagcatgcttccgctaccgggagtatcggagagcatgttatgattctcaatacggggtctattaagaatgtccggattggcgactattgtcatatttgtggaacgtgccgtttgtctaatggtagtataaacagcaatgtgacagctcccgtacatatcggacacggagtgatttgtgatgatttcatcatctcctccggttctaaagtggatgacggcactatgttgagccgttgctttgtagggcagtcctgtaaattgggacataactattctgcttccgattctttattctttagtaattgccaaggagagaacggtgaggcctgtgccatctttgcaggtcctttcacggtgacacatcacaaatctaccttgctgattgctggaatgttctcatttatgaatgcaggatcgggttccaatcagagcaatcatatgtataaactcggtccgattcatcaaggaacaatggagagaggagccaaaacgacttctgattcctatatcttgtggccggctcgtgtcggggctttttctttggtgatgggacgccatgtcaatcatgccgatacttccaatcttcccttctcttatctgatagagcagagaaatacgacctatttggttccgggtgtcaatttgagaagtgtcggtactatccgtgatgcgcagaaatggccgagacgtgataaacgacaagacccgaatcgtctggattatatcaattataaccttttgagcccttataccatccaaaagatgttcaagggacgttccattttgaaagaattgcgacgggtgtccggtgaaacttcagagatttactcttatcagagtgccaagatcaaaaacacttctttaaataacggtatccgtttttatgagatagccattcataagttcttgggtaattcgattattaaacgattggagggtatcaatttccaaaacaatgaggaaattcgtcaacgtttgaagcccgatacggaaatcggagtgggagaatgggtggacgtttccggactcattgctccgaagagtgagatagaccgtctgttggatggaattgagaatggtactatcaaccgtttgaaatccatcaatgcctgctttgcggagatgcacgagaattattacacctacgaatggacatgggcttacaataagattcaggaattttatggtataaatccggaaatcatcactgctcaggatgtgattcgtattgtaaaatcctggcaggaatccgtagtgggactggataaaatggtgtatgaagatgcaaagaaggaattctcgctctcttctatgaccggatttggtgcggatggctcgcacgacgagatgcgacaagatttcgaacaggtgcgcggggattttgaaagcaatacatttgtgacggctgtgttgaaacatattgaggagaagacagccttggggaatgagcttatcaagcgaattgagactatcgtagaataatcgaaatattctccgttattcattcttaattctttattcatcattcgccattcttcattcttaattgctacctttgcaacactaactaacattacgtaataaaataagaaacttatggcaacacctccgtttaagtatcagcccatgtttgaaaagggaaaagatacaactgagtattatctgcttaccaaagattatgtgtcggtaggcgagtttgaaggacatcctatcctgaaaattgagaaagaaggtttgactgcgatggctaatgcggcttttcgtgatgtatcattcatgcttcgtcgttcgcacaacgaacaagttgctaagattctgagtgatccggaagcaagtgagaatgataagtatgtggcattgactttcctgcgcaatgcggaagttgcttcaaagggagttcttccattctgccaggataccggtactgccatcattcatggtgaaaaaggacaacaggtgtggacgggctattctgacgaagaagctctgtcattgggagtctataaaacatataccgaagagaatctgcgttattctcagaatgcgcctctgaatatgtatgatgaggtgaatacgaaatgtaacctgcctgcacagattgatatcgaagctaccgaaggtatggaatatgaattcctttgtgtgaccaaaggtggtggctcagccaataaaacttatctctatcaagagactaaagctatcttgaatcccggcacactggttccgttcttggttgaaaagatgaaaacattggggacagctgcttgtcctccttatcatatcgctttcgtaattggcggtacttctgcagagaagaatctgctgactgtgaaattggcttctactcatttttatgataacttgccgacaacaggaaacgaatatggtcgtgcgttccgtgatattgaactggaaaaagaagtattggcagaagcgcataagattggtctgggtgcgcagtttggcggtaagtatttggcccacgatgtgcgtatcatccgtctgccccgtcacggtgcttcttgtccggtaggtttgggcgtttcttgttcagccgaccgtaatatcaagtgtaaaatcaataaagatggtatttggattgagaaactggattcaaatccgggtgaactgattcctgcagaattgcgtaaggcaggagaaggtgatgtggttaaaatcgacctgaaccgtccgatgcctgaaatcttgaaggaactgactaagtatccggtggctacccgtctgtcattgaatgggactattattgtgggccgtgatatcgctcacgccaaactgaaagagcgtttggatcgtggagaagatttgcctcagtatatcaaagatcatcctatttactatgccggtccggcaaaaacaccggaaggtatggcatgtggttctatgggaccgactactgccggacgtatggattcttatgtagaactgttccaaagtcatggcggcagcatggtgatgttggcaaaaggtaaccgtagccagcaggtgacagatgcttgtcagaaatatggtggtttttatcttggttctatcggaggtccggcagctatccttgcacagaacaacatcaagagcatcgaatgtgtggaatatccggaattgggtatggaagctatctggaagattgaagtagaaaacttccctgcatttatcttggtagatgataagggtaacgacttcttcaaacagttgaaaccgtggaattgcaaaaaataaccggttgatacctgttgggataaaactgtaagaagaggctgtaaatgccttg

SEQ ID NO: 11823 - DNA, 938 bp, Unknown
  gut microbiota DNA sequence
cttgattcgtgggcgacactcaatgaagataccattgcgcgcagatatatggatgtgtcttcaaagatgtaaaagctgctttccaccatttcctcataaattataaccaaggtcgtccatttattctggcaggattcagtcagggtggaaagtcggttgtggaattgatgaagcacttgtctgaagaggaacgtaagcggatgattgccgcatacgtgttgggatacaaggttactcctgctgatgtggagaaagcaccgtggattaaaccggcaacagactctattgacacaggagtcaccatttgttacaattccgtttcggatgtcaaatacataaagtccgtagtcagtgctcccaatgtgatgtgcatcaatccggtcaattggtgtacagatgctactccggcagtgctcaacgataccattacggtgactgttgaccctcattgcaaggtacttgtgctacaagggtttgatgggtcttacttgcctaacatcctcaatgtattgaatacgggcgattatcacggtatagagccatgggtatacagtgactgcctaaaaaagaatatgcgtcagcgaattcgcagttttcaacagaaaaaataggcaggtaacagttaagtggcaaaaatccatcactcgcttgcgtttttctgcacaacctcaaataactattcagctacaaaagtagttaatttacttgatcttagcaagtttttatgaaagattttcaagggagatctggtccggtttcgggcttggtctccttttttatttctatccgtaagataccctctttttactgtatttacctttcctccgaatagtttatttctggtaatagggttttaccctctcaaaaaacttcaaaaaaaatacatcattgatacataatggtttgctgacaaaatatggggctggcggtatccgtca

SEQ ID NO: 11824 - DNA, 21031 bp, Unknown
  gut microbiota DNA sequence
aggaaagaacctttgttgcggggaatgaatgaattgtgatcttgacctttcatattgccccacgagaaacctggaaataccaatggagcataatccacttgatttttctttgcccattggatatccgcctctaccattttttgaaattttggataagtgttctcattataacgtcctacgaaccaaggcatcacgatatcgcattttctgataagctgatgaaggtggggatctgattctgtatctcctttcagttcgcgccattgggtaggcactccaagcattacactgaatccttgcaattttaaaccgtcaataatacgctccgcctctttcagcccataacgtcggttatcattaaatccaactccccatacggtaaccaacggtttcccattatgatatagataagaaggattcttgacatgatcttttatagaatattgacgtgcgatttctgcaatatcttttaataacaacccttcttctcccggcttcataccactcaagtcatacatcacacagatagcccgttcgtatttatttgctgccttcattgccgaattgaggactttattgaaatgtttcaatccgctttcattccgaatttcggaaacaaagcgttgcataaatactccatccaacccatattggttcatccacttaaaatgaagttcgactgtagattcgtcataagaagaaaagactgatgctggtttgccatcctcaaaagtaaactctgtcttatagagttttttatattccgacacttccggccagaaatcaattgaacaggaaccgggacgaaaacccttcggaccattataatgatgccagccgcggccggagccgtcatcaggggtattgaaccacccctgataaccggccatcactaaccccttataagagttatattgcctgcctccacctttggctgttatacctactgaaaacaataaacaaaaaaacaaccaactaaatctttttaccatattcctttgtttttcatgttatattaaaagttctccaatactatttttcagcaaagtaaaggagcgccccttaataaatcccactaaaaggaattaataaagacttaaaatcgaattaatcggggaaaaaagtagaaaaataatgagacaaagcctgtgcgcatgcgtatccctcttcataaaattccgtcagtttgcgcacattcttttcaatacggtctaccaccacaggcttcaatgggcggataacgataatctttccttcgtcttccatacgctccaccatttccaattgttcattataaacagcacaacgacggctcaacgcttcacgtaacttcggatatttccgataaacaaatgccggaatacgaatatccttcgaatctttccgataccccctgttacgggtaagtacaacgacattatgtgtgtaaccatccgcaatagcccgttgcaggggaatggaatctacaattcctccatcgagcatcggtataccgtctacataagcaatagggcaaacaaaaggcagactgctggaagcacgaacgatatcgatcactcgccttttatctttcttctcttcaaagtagttggcctctcccgtcacgcaattcgtagtcaccatcacaaaacgctcggatgaagcaaaataagtttcataatcgtaaggaaggatatgctcgggaaactcattgaaaagtaaatcgaaatcgagaatgttacgcttcttgagtaaatacttcaaaccgatatagttgtatttttccaacaggtcaatattgctgtatttggcacgtccccgttgacgggaagcatacgacaacccattacacgctcctgccgatactcctatcgtataaggaaaacgaatattgtgatccatcagatagtcgagtacaccacaagtaaacacaccgcgcatacctccgccttccaataccaatcctatagattcatctactttcaaatctttcatatccttactcccattctcgttttcacactctatgttgcataaacaagcctttgtattttattgcatatttatgacaaattcaaacaaaaaggctgattgttgggcaaaaatagcaaatatttaaacagatacttgttttttcggttcaatatatgtaactttaggctagcttaattgtttaaggaggaaaaacttaaaaagtcctgcccgcaggcaagcaccatgagaatacagtttgaaattaaagaaaagttcccggaaatcatcgaagaaatcatgaattccgaaaaatggcaaacttccgtgaaggaagaacttagcggtcggacgaccgttgtgatccgtgaccaggcgtatggttcagaagccactattgagatttatgctacgtccattgaaatcaaaaccgcatggtcaaagtactcctatcgcatattcgtaaccaatgacatcgtatggtgcgaatataacggagcctatcgtggactattggaacaagtacttctgccgactattacccccaaagagagtttgctcaattccgatgtgaccgaaagttcgctttatggaaacgagcctaagaaacttagagagtacgcagaagacaatctgaaattaaaacaattccgccgggacaacttcaacgaacagaaaaacggaactgcaccgttcgaccatccgaaacgtgtctacgatgaattcattaaagaagattacatagtaacatccaaagataaggaaaagaaagaatagcacacatctaatgatgtatctacctataccgctttgttgtaacagcaaagcggtattttcgtaccccaatatactaatattcattctttttttatacatattaattcaaacggatggttatcaaaagaggaatccttatatttgtagccaaaacaaatttaatattaatgtcataagaatgaaaaagagtatccttatcgctgctttgggcttattcagcctaagcatgacggcacaagacacaaaacccgaagagggcttcgttttcacgacagtgaaagaaaatccgattacttccattaagaaccagaaccgttcgagcacctgctggagtttctctactcttggattcgtagagtccgaattactccggctaggaaaaggtgaatatgacctttctgaaatgttcgtagtacacaaaacgatggaagatcgtggagtgaattatgtacgctatcatggcgacagttctttttcaccgggtggaagtttctatgatgtgatgtattgtattaagaattacggtatcgttccgcaagaagtaatgccgggtatcatgtatggcgatactctaccggtgcacaatgaactggacgcagttgccgaaggatacattaatgcaatagccaaaggcaagttaagcaaattgactccggtttggaaaaacggtctgacagctatttatgatacatatttgggagaatgtcctgagaagttcacttacaaaggaaaagaatatacgccgaaaagtttcgccgaatcacttggtctgaactgcgatgattatgtatcactgacttcttatactcatcatccgttctatactcaatttgccgtagaagttcaggataattggcgtaacggtctgtcatacaacctgccaatcgatgaactgatggctgtaatggacaatgccgtaaagaaaggatatacttttgcatggggtagtgatgtcagtgaacaagggttcagccgcaacggtaccgccgttatgccggatatcatcaaaggagctgaactttccggttcggacatggcccgttggacaggtatgactcctgccgacaaacgcagagaattgagtagcaaaccatcaccggaaatggaaattactcaagaaatgcgtcagactgcttttgataactgggaaacaacagatgaccacggaatgcaaatctatggaatcgccaaagatcagacagggaaagaatatttcatggtaaagaattcttggggaaaagccggcaaatataacggtatctggtatgcctccaaagcctttgttgcttataagactatgaatattctagtacacaaggatgcgcttcctaaggaaattgccaagaaactgggtatcaaataagtctgccagaaaatagtattaaaaaacataactaactaatatatagaacggtatccctacatcaaatgtgcaggaataccgttcttttatttcataattacttctctctatattcctgtggagtcatccctacatgcttccgaaaatatttattgaaaaaagacaaattgttaaagcctaacgagaatgctatttctttcaccggtaaacgggtagactttaattgtgccttagcattcattattatcatacctgtaataatcaccaacggactatgcccacttgcctttcgaattgtactagagaaatgtgccggtgtcactccgcatttatcggcatagaaagcaacttcatgctcttttgtgtaattcgccattaatatttgaacaaattgccgatataattcatgttcacgtttgagaggttcattcactactgtttgttgtcgactatacaactctttcactccttgaaaaaagatagtaagaatagaacgaaggatttctttattttccaatgtattaggcaaagaataagccctgattaataagctataagcattacgatacaaagttgcaatttcttccggtaaagaaacaaccggagtattcagtatgtttggcaataagcccaacaacgaatcgacataattcactgaagcgacaaactcagaagaaaatccggcaaagcaaacacgggtatccgaagatacttcatgtatttggataaatgaattaggaagaagagtgataaagtcatttcgacgaatgactacctccaacaaatttatggtggcacgaacagttccctccgtacaaagtataaaaagcccggcttttatctgacagggaaatcgactatacatatttaatatatcaccagtaatactatcgtccgctataaaatcaataggaagatcaaatttaggaagattaccatctattatcataaccaaaagaaattaagttgcccaaagatagtttttcttttgagacctttgttatagcacattaagaatagaacaacatatctaataaatagaacatctatttaatatttcattagattatacaaattaaaatagcaaatatagaacattgaatcccaaatatggagcttgatagcgaataaacattaaacgacctttgcagagttttaattaatattctaataaaactaaaagagaatgaaaacttctaagaaactattttatgtcgcctgtatggctttactcttggtttcctgcgaaaaaacctacaacgacaaactcttttggccgggagaaatcagccaggaatatggttcgtatatcaagccatacactttagacctaacctacagtggagagaaattggctggaaaaacagtcaactttaaaacggaagacagtgagacaggaacactgacattaaacgatataattccgggagaaaacacaactccaatcaatgatgtgcaattgaatgaaagtggagaaaaagatgcatatacatttaatgggacgagcgttacggaaacaggggctgaagttaaatatagcggtaaaatcacaccgaaagctatgcaattgtcgcttgaggtgacgatggctcattacggttctgttgcgaatacatacgtattccccgcctactcacacacaacaaccgaagaagtaacagtacgcaatagtggagctagttatgtaaacataacagtaaaagaagaaagcgagtcgataaaaccgatcatcctacaaataaaacagatggcaaccaatgttttagacgtacttttcccttatatattgaaagatttaacgttagagagaaatgggcttgttactgccaattatactaccagttccataaactttgatgaaattatagagattgctaatgcaaataaaacagacgcagagtttaaaagcctgcttcgacaacgtacctatgttccttcccctataggattagcttattggaatcaaacagatgataattcatttgtattacaattaaacatacccgccatcatctcccttatcactcaaaataatggacaagaaatagataatcaactcatcatcggtattggcgaagcacttatcaaatctgatccagtacgattgaagctagcattaagcgctctcaatactgttctgaacaatcaaatactgacgtatattttaaaggtagacgatgccactttcactatgctaatgtcatggctaaagaatggtattccaatggaaatcagccaaacaacaaaggatcatacctatatctatttcaataaagaaagtcttacaccgttcgtcaatatcatttcgtcattattgaaaatggatttaaaagaagttaccacattattagacaaaatggaaataggagtcgatctcactattcaacaataattaatcttaaccatcaaaaagaaagaacaatgaaaaagatatctattttaatgacaagcttccttgtcataacgctcagtttactgacatcttgtgataatgatcattacggaccggctccggtagatgtgacagctaattattcaaacaagctgtcaaatcccaatccaaacttaattcttacctataatggagaaacaatgattggaaaatctgtagactttagtactgtaaccggagaaacagctattgttactctttatgatattttaccgggagagaaagaattaaaaatggtatccatccccctttctggagatgaggaaggatattctttttccggaaatggaatgggagagaacactttaacctcctttagatacgaagggcgtgtcacaaaagggcagttaacattaaatatatccaatcttcaaatgggtaatgctgagttatgggcaaacacctacaaactacctacagttattaacggtatcaaaaggattgtagtgggggatatatggggagatgaatatacatggcaagaagttgatggacaagttttaaatgcatcatgctatttttatgcagacatagaagcttcagaaagcggagccacaactcagacatggggtaatgcaattcaaaacattttaagctatatcttaccacaagttttacaagatataactttaagagcagatggaaatataacagcctcctattctaatgaaccactatcaggactagatatggaaactatttttggctttctctcagttccactgacacaagatatgatcactcctcatattgctaatcgcaaatacattccatctcctaaagggtttgccaactggcatcagaaaaatgacaagtttatattaaaattaaacttagccaatataatttctcaaatagctagcgacaagcatatagatgcaaatataattaatgcaatcattgatgctatctctcaaatggatccgatgaaattgaaagagctactaactacccttaatcaaagtctaaacaacgacacacttggatttctgatcaatatcaatgatacctctttcaaagcactttttaattggttaactacaggaattccaatgcttgttacctcaaaagaggggcacactcatatttatttagataaagaagaatttactcctatagctaaattacttccagacttgagtccattagtaattagtatgcttccagaggatatgcaagcattaggaagcataatctctgcgtttttagatggaatttcgaaagctttcctttcgccccaaaaaatcgaatttggtttagagcttgtacaaagcaataaaaaataagaaaaatgaaaaaactacatatcctaactttattaattagtcttattggattggggaatagttttgcccaaacccttaaaggacatatatacgatgcaaagaccaatgaaccattggtaggagcagccgtcacttataagcttcacggcaatcagggagtagtatccaacatcaacggagaatatgaaatcaaacttccagaaggaggagttgaccttgttttcagttatgtaggttatgaagatgtgctaatgcctattgtgatcaataaacgtgaaattgtcaccaaagacgtctatatgaaagaaagcaccaagctactggaagaagtagtggtcagtgcaggacgttttgagcagaagttgagcgatgttaccgtctctatggatgtagtcaaatcaggagatattgcccgccaagcaccgacagatatctcctctacccttcgtacacttcccggagtagatattgtagataaacagccttccatgcgtggtggtagcggatggacctacggagtaggtgcacgtagccaaattctggtagacggaatgagtacactcaaccctaaaaccggagaaataaattggaacaccgtacctctagaaaatgtagaacaagtggaagtgataaaaggagcttcttcggtactatatggttcgtcagcactgaatggtattatcaatatccgtaccgcccgtccgggactaacgccgaaaaccaggttcagtgcttacgttggtgtatatggtgatgcagaaaatgatgaatatcaatggagcgacaagagcttttggaaagaagataaatacgcagtgaaacctatcttgcgtggaagccttcttagtggtgtacgcaatcctatttacgaaggattcgacctttcccactcccgccgtatcggtaatttcgacgttagcggaggtattaacctcttcaccgacgaaggatatcgcgaacaaggatacaacaaacgtttccggatgggtgggagcctgacctatcatcagccggatatgggtatgaaactattgaactatggattcaatgttgacttcctgtccaaccaatatggagatttctttatctggcgttcaccgacagaagtatacaagccatctcctttcaccaacatgggacgtgaagaaaacaacttccatatcgacccgttcatcaactatgtgaatccggagaacggtacatcacataagattaaaggccgcttctattatagtgccgacaacattatacgacccaccaacggagcctccattaccgatattctagggaatatgggaaccgatgcccaaacaatacaaaatatagcaggaggtgattacagttcactttatccggcattaattggcattggttcaggacttatcaatggaaacctggaagatgcaatgaatggaatattcacttcattaggaaatatattcccgaatgcaacaactgccgactattgcgacttaatctcatggactatggatcacgggctgcccgctgatttagacaaactgatacaagatggcaaattgcccagtgatctcgttccttggctatctaatgttattaatccgtcacgcattaatccgaaaacacagacggacaagaatttcgactattacctcgactaccaatttaataaaaaatggaacagtggtgcgcaaatcactacgggggttacattcgaacatatccgctatgactctgctgtaatggatgagatatataaaagtgacaacatcgccgctttcctgcaatatgaccaacgtttttgggatcgtctgagcgtatcggccggtgtacgtgccgaatactaccgcgtaaacaaccatcaccgagaggcggaaacaaaaatattcggaacaaaggtccccttccgccctgttttccgtgccggattaaattaccaattggctgattacagttttatccgtgccagcttcggacagggataccgtaacccgtctatcaatgaaaaatacctgcgtaaagatatcggtggagtcggtatctatcctaacctggacatcaaaccggaaaagggatttaatgcggaattaggattcaaacagggatataaagtcggcaatctgcaaggatttgtagaccttgcaggattctatacgcaatataaagacatggttgaattccagttcggtttgttcaacaatgccaactatacgatgatcaacagtattggcgatgccattcagatgttgtcagacggtaaaggctttggaatcggtgcccaatttcataatgtatcgaaagcacaaatctacggtattgaaatctctacaaacggtgtatacaacttcaataaaaatacaaaactattctataacttaggatatgtatataccgaacctcgtgatgctgattatcaggaacgcaatgccgtagaaggactttataccgacccgttacagatgaaggagaaatcaaatacgggaaaatatctgaaataccgtcctaaacatagctttaaagctacggtagatttccagtggaagcgtatcaacgtaggtgccaacattgcatggaagagtaaaattctcgcagtagactatttgatgatggacgaacgtgataaacagcagaaagatctgatggactatgtacgcggtattctcttcggctattcaaaaggcgagacactggctacttactggaaaaagcacaatacggattatgctaccgtcgacctgcgttttggagtaaaagcaaccaaagaagtagcgttccaatttatggtaaataacctattgaacaaagaatacagctatcgtcctatggcggttgccgctccacgcactttcgtactgaaaatggatgtcactttctaaatgactattaagatttataattgattacgaagcggctgcacaatgcagtcgtttcctttttttgccctatccggtcacatttaatttatatattaagtatctttgcacccgaaaacagagaaatacaaccgataaaatgaaaagacatattgtacttattgcaatcctattttacgcagcctttgcacaggcacaagaagtttttgtaaatgctgatttcgtcagcagctatatctggcgtggtattgacagcggcaatgcaagtgtgcaaccctcactcggcctcaactggaaaggattgaccgtctatgcttggggctccaccgagttccgggaaaagaataatgaaatagacctttcactagaatatgagtacaaaaacctgactctttacttcaataactactttacccaaacagaggatgagcctttcaaatatttcaattacagttcacactccaccggacatacttttgaaataggagtcggatatatgtttagcgagaaatttccactatctataagctggtacaccacatttgcaggaaatgactaccgggaaaacgggaaacgcgcttggtccagttactgtgaattgagttatcctttcaatgtgaaggacgtaaatctaagtattgaagcaggctttacaccttgggaaagtttttattccaataaattcaatgtagtcaacgttgggttatccgcaacaaaagaactcaaaattacatccaatttttctttacccatattcggaaaattaatagctaacccttacgaggaacaggtctattttgtattcggaattactctttagtttattcattcctctaatacaactagaagctaacttaacgaccgtaagtgggaatatgagatcccaatcttagaaacataaaaagtcgccacttattaacgtgacgacttttctattcattttactaggagttatttattcggatgagaaaaattaatttgttcactccattgaggtgttccaccaagagttacatggttctggttaggactactatccttcaactcattacccgttccttcatcacatttccaataacctatcaacccatcagaatctccggcaacttgacgtgacatattgtcttttatcacattctctgaaagacatttcttccacatacgaatctgtgcgaattctacttgttgttcatatccaaagcttcctatagcaaaagaaaggcttttaaaagtccagtcaatagaatttgctaacgaattattctttacaccatctttatatactgtaactgttgtaccatcataggtataagcaatatgataccaggtatcaggccaccagaatccagtagtatcaaaatgaccagctgaattttggaattgtaaaataggaatctgtacattagctccatcagcataatagcgaagagttaaatcagagaatgtgagcggttgggaatcaggaacaaaaattcgtgccctgaaatttttatttcccaaaccttcccaatctcctgtaggttcccctgttatattatctaccttcacccaatattcaaaagtccattgttccataggaatggcagtactaaacgtcttaacagttctatttcctttttttattattacagctttttgcctatgaggtgaggttagcaaataaagaagatgattcgcgttccccttcatttcgaccggtccgtccacagaagtaattcgtataggaatagcatatgcctcaccatttgaagaactatacggctttataataagattaacaaccggagctgaaacattaccagcagagatagtgactgtcttttcaaaatttcgatattcttccggaagcactaaatagtttgcttcatttttgttattatactcctcaagcaactgaggatcaatatccagtgtgacagtgacatcatgatccatagcacgaactaaacgaactgtcagcgttttcacaacttcttcatcatctaccaactgcgttattatctgttgatcgaatttattagaaggtgcggcctcctgaatatataatccattatcaatggccttcatttccgcatcatcacaaccaaagactgatgctagaataattaccaatgccacatatttagaaaatctaatcatcttcatagttttcatttttagttatattcatagtattaatgttgggcaggattcatcacctgaatcacttcacgcataaagaaatagtcattcaccggacggcacaaattaaaacgatacgctcctacaccaccgatacgtgcatctactcccggacgataatacatagacatccccttcaaagaatatgtcgtcacaccgtctcgagttgtaaactgcggtcctccgtccgatttatgtctttcgaagtcttcacaccaaacagttttacgaagaattgcagcttcatcttctattgatccaaatttagccaacagtttattgaaacgagtatccaaatcagtatcacccgggctataatatgcttgaatcacatagtaatccaatagtccaccagattctgtgttcaaagtctgaggttctccatccaccataagaatacggcctgttcccgatttcggtccaaaatttttcgataactcatcaagaagaatgtgcatgcgttccggatgactggaaatattgcctggatagccccaactcggttcatagtcaatatcaaaaccatcataatcatacttattgacagaatccgctataacctgtgcatatttacggatagcagcctcaataccctctggggagccatcaccatagtgattattgtacgttgaatgatttccggttgcataccatccccagtaagctgccatagcctcttcataagagttatattgcacaccgtctactatatggtcattctccacagaagcaggcgtcatacttctaccaatatccatgatatgctggcaatacaatatccgagttcctttcttttccctaacctccttaagatcacttttctgcgcttctgtcaaattgaaagcaccgccccacaaagatactaaatccatggaatcgggaatacctctcaattggttattcatatcgtcacctgtacccgaccaatcactataccacccaaaacaaataggatgatctgtctttttatattcccgtaaggctcgatagtaatcctcactattaatattcaccggttcagtaaatttattctccatttcagtccagtcactacattgtacaaatactagtacagcgacagacgcaaatatgaaatatattagtcttctcatactataatcttaaaattaaccattaataatctctaatttttcaaggcccaccacaaatcggtaccattagagtctctcccatcactaagcatagtcacagcagcctccacattttctttattcgtattatactctgtgtcagcaaaacgaagacggcgttgcccgcgagccggtttacaatccggatttgcagaatgtgttgccggaaatattttcgggaatcccgtacgacggaaatccgaccagccatttaaaggatccggatagagagctatccacttttgagtaagcactctctccaacatttcctccggagtggcacttttgtcccatttaatagtgatagtagacagattactataattgtcggcagagtgattgggatcaacgtaatttcccggtttcgatttatcatcatccaaatacgcatctactccggttactttaaattcctcaaaagacaaccgaattccctgttcatagaaagtctctgcatcaccctgcatatcccagcctttcagctcgccttctgcacgtaagaaagctgcttctgcagcatacatcaccggttgcggcaatgttttatcagtcgttatcatcaggttactataattctgataatcagaaggatttggagctaccgaagatcccgaacggactcctacataatcttcagaaaagccagccgcttgcttagtaaaataagcggaacgccgtgggtctttatacccattcatatatgaggtaatacaagcattagctctcacttcgccccatccgctcacaatagcatagccattttcattgataccactgctagttgtgtcatatgaactatcggaaacagactccaacacaccaccacgtacagcttcttcagctttagcctgagcataatctgccactccggacacccggatagccattctaagttttaatgtattggcaaatttcatccatttttcgcaatttccgccataaaattgatctactgctgccaaatcctgattaatccccaattccgctgcagatttcaatatagcaattacattatccaaatcatcgaacatggcacgccaggcagtcggttcatcgtcataagcagcccttatatcacccgatttcactttagagtaagggataggaccttgcagggaggccatcatctgcattgcataaatacgtgtcaactgagccatagcgtagataacaccctttttctccgtagcttcctcaatcctgaagaagttaggataaatgcgtgcatatattttagcccaggtagcagcgttatgatcctccatcgcattataataagcaaaaagattttccccttttgaccaagtactaggtgcggtgatttgtccgctaaaacaagcccacatacaatttatatgctgacagtcattttgcataggtgctgcatatacattaaacattcccgacagcaatgtattagccggcactttagaaggctggtacggattggtgttgaaatcctcaaaattagtagtacatcctgccatcaagcatataaccgcacttgctccaatatattttattatcttgttcatacctatttactatttaaaactgaaatttgacattaaatccaaagtttctcgtacttgggagcatatatgcatcaaatccctgatagaaattagacgcagccgaggtagtcagttccgggtcgaaaggtgctttgcaataaatcatccacagattctttcctacaagtccgacagtcatacctaatttattggcaaaccatttcttcggcaatgtataactcaggcttaattcacccaaacgcacgtttgtagcactatatgtgtagtaaacggaagctgtttgaattgtctggaagtaattgcgtgcatctattttggcttgattaatcggtacgccacccgcatcacgaacatccgcactaattttagacacaccggcagcattcaatactgattgcgtttcacttagtacaatacctccaaaacgtccggtaaatgtcatacctagatttatgcctttatatccgaatcccaaattccatcccatattcatctttggcaagatagaccccaaatgcgtttccttattttcaagggcaagacctactccttcctcattaaggatatatccattgagatcgcgtttcagcactttctgaccatatacatctcccattgaaccacctacacgcaaaagcagacgggcatctaattgtccataatgtaaaacatccaactccggcattacgatcggctctccggtagcataattataagcgccatcagctaattgttttatttcattacgattccaagtcaacgtataattagtgttgaaagagaaatccccccacttcttatcatatcctaaagacatttcaataccttcattcataatatttccactttggataggaatagatgaatatccggaagaagcagacaaagttgcatggaaagtctgattgtaagtattggaacgatagtaagttaagttgaaactgatatcattcagaaatctagcgtctacccccacttcccatgattttgtgcgttctggtttcaatttagtattcgggtaaacagaagtcgtgttccaattatgcgatgcttcatcgtatggataagtgacagtagtcataaaacgatcgtaagaattacctacctcagtatatgaaccacgaactttcaaaaaacttaaccattccggtgtatcaaacatacttgtaagaatagccgaaagccctaccgacggatagaagaatgatttataatcagagaaagccaatcttgaatcccagtcattacgtccggttaccgtcaaataaagcattgacttccaacctagttctgcattcgcaaagatagctctagtctgatcatgccaaccctcttgctttggtttccatgctttatcaaaatccaaattatgaacagcaaagaagttataaatcttcaagccgccttcatatccgatcgattcataacgactgtcattcaaagatacacccaagtttacattcacagaccaatcgctaaaattcttatttactgtagcaatggcatctgcataggtagtctttgactgagcccaagtatcatgatatgttcctctgtctcctgcagacagactaccggtagaagcatacgccttgtatgtcttacgattttcataattgtcaattttcacacgacctgtgacatccaaccaatcaaatatttgatatttcagagaagcattcaccatataacgtgttttcttattctcacgtatctgacggttttgtacccaatatggatttgccagtccactggaaatttctccgtaaggccaatactgttccattatacctaaaccctcattgtaacgctcaaacatacgcacatcctcaaaattttccgaacgggggaatcgataaagtccaggcagtggattataataatatccttgagataccatatttttatcgttctgaagaatatagcttgcaccggcatccagtgtcattttatctttcaagaaactggtcgtgttgcgtacagtgaaattataacggttatatccactgttcggcaggatattcgttgtattagtagtggaagccgacaaataactctggttcttttgattaccggtagacaaagctacagagtttatcacgttactacctgtacggaagaaatcgcgcggatcataatcgctattcacaatcggtccccagctatccacatttcctgccacatttccgtacttactctgcatttctggcatcatcgccactttcgagaaagttgtattgttagatactgtcacagacgtcttgtcaacagatccttttttagtagtaatcagcactacacccgcagcggcagcattaccatacaatgcagcagcggaaggtcctgtcagcatagagatagactctatatcttccggattaatatcagccgccccatccgtacccggttggtcagcaaaaacgctttgtgaattgccaccattcatcatattatacatgggtacaccatcaatcacataaagcgccaagttggaagaagtgatagactttacaccacgcataacaacacgggatgcgccaccggttgaattggaagaattaatggtaacaccggcaacctttccattcaatgaagaaatgaagttagcgtctttcacagtagtcaattcatcccctttcacctgttgtacattatatgacaaagccttttccgcacgttttatacccaatgcggttacaacgacttcatccaagacttcagcgtcctgttttaacacaacctgataaaaatctttatttgaaacggcaatcatttgagttgcataccctatataagatattttcaacttagatttatcggaagcttttatcataaagcttccattcatatcagttatagttcccgtagaactaccttccaccgagatattcacgccaatcagtggttctccattttcatcaactaccttgcctcttatattcttcactacagaaggcgctaccgacttttgttcggtaactataacataattatcacggatttgataagtgaaacctgttccttttaagattgtatcaagcgcagtagttataagcgcatttttcaagttcagattggtaagctttttgcttttcaattgagaatcactataattgatagacattttagtctgtctttccacagattttaaagcctcaattacagtcatatttttctgttggatagttattttactatctttttgcccaaaagcagaggtctgcatcattaataatactaaaaaagtaagaaaaacctgtttttggagcactcgtcctgctatttctttatacatttgtagcattttcctggtattagtaaattggttgttaattctattttgattggattgcgttagtaacacgctaatattaaggaatttttcgatttcatatccggaaggaatggcagttccctccggatattttttttcatggtgtgttaagttaataattagacataggggttatttttcaattagttatatagcatttattgtctttaatcacatagtggatatctccaactacttgtgaaataattagcataatttcttccaacgtcacattcttcgggaaacggaaactataagtattattattcaaactatggaaactatatacaaaagtatatggatacttatgttctagtctcgtgaatatatcttccaaatgtgcatcactaaatacaagttctccacgttgccaagctatcacatcatcaacttgtgattgttgcaaacgactttttttggtcagcttgttataagataactgctggttaggtttcaatataacacttgagattaaattatcatactccacttttacactgcccgaaactaaagtagtgtacacttcgtcattctccgaataagtatttacattaaactcagttcccaaagccgtaacctgaaaatcagatcctttcacaataaagggatgttccttatccggcattaccttaaaatagccctcacctatcagatatacacttctggttttaccattaaaactttccggataaaacaaagtactttttgaattcaacataacggaagtaccatccggtaatgtcagttcatgtatttctgcagttggtatatggcattctatcaaatcactggaaaaatcgtctttctccaataataaatagatagaaaccgacgatacagccagcaacaacaccgacgctacctgccaaatacgtaatatatatttcttttgcgaagagacaggacgcatacctatattttgttgcatacggcgtatagactgctgcattccctgaggaactcgctgctgtccagcttcttcccaaagagaagcgagcgcttccattttttcttccttatgttcttcatcagccaaccaatgccggaattgcttttggacggaaaccggatagtcattctgactaaaaagttctatcacttgtcgaatataattcttcatcattatttcattattatttctgccttatactttaaagacaactaaaatcattatactacttaagaaagaagagaaaaaaactaaaaaaagaagtattttctttaggtctattaatgctagataaatttggtgctctaccgtacggatagaaacacccaatttttccgcaatatctttattgcttagtccttgaaatctactagcctcaaatatcatcctccgacgctcaggcatttttgttaaagcaagccggagaatcataagcaactctttataatagatatcctttagtgcctgatcatcttctattatttcacaaagtatcgcattttctataaaacttacctggtactcttgctctatacgctgatgcttaaacatattaagaataatattccgtgttgttacaaagatatacccatccaatttatcattaggatgttgccacagttccggttgttgccacagtttacaaaaaacatcttgagcaacgtcttctgcatcttcgtccgatttcagtaactttcgagcaaagttcttcactttaggaaagttaacagtgaagaaagattgaaagtccttctccatttgtcttttatcattttccataatattaccaaataatagcgggcaaaataaacatattagttgcacataaacaatacaaaaacccttttttatcgaaaagaacagtgatatacatataactaacagaacaaagaaatgcttaacaatgtacatttttcgcttggatttcttgtcagaaccaagtgtttgagtaaatttgcacgctgatagttaaccggatagtttggatagcaagagattactacttgactactggctgctaacttgtagaaatactaatactaaaatttatagcatgagtttgaaaattgttgtattggcaaaacaagttcccgacacacgtaacgttgggaaagatgccatgaaagccgacggaacgattaaccgcgcggcactccccgccatcttcaaccccgaagacctgaatgctctcgagcaagct

SEQ ID NO: 11825 - DNA, 2190 bp, Unknown
  gut microbiota DNA sequence
acctttcagtacccatgccaatgcagcgtcgaaattcaaatctactgtagcaggattggtgttagggttgtaagtaccaatcttctcaataaatttaccatcacgtggtgctctgctgtctgcaattacaattgaatagaacgcgtaacttttacgtccgtgtctctgcaatctgattctagttgccatttttaataattgtttttaatgattgatttgaattatgccattatctcgtaatagcgggcacaaagatacggcttttcttttgattgacaaacatttcgctatttttttacgaatatcgtttagggtagcggaataggatggctagcaatgcgcaggctcccattgtaaaaggataatagagattaccgatgatactgataggggaaatattggcaagtcctgcagctatcaacatttgagcaccgtatggaataatgccctgtatcaggcaggagaaggtgtcgagaatactggcggtcttcctccggtcgagatggaatttccgggcgatatctcttgctatcggtcctgttgttatgatggcaatagtattgttggcggtacacagattggcgatacttaccaaagcggcaatgcttagttcagcaccccgcttgccgttgacgtggcgggtaagtttccggataataaaatcaatgcctccattgtagcggattgtttccaacattcctcctgccagtagggtgatgatgattaattctcccattcccgttattcctgttcccatagctccgaaccagtcgaatattccgaaacttccggtggcaatgccgataatgccacttgtcaggatacctataattaatacaagcatcacattcattccggcaacggctgttcctaatactattatataaggtatcacttttatccattcgatcgtttggatctgagtgggggcggtgatggataatccttgaaagatataaatgcccaatacgatgatggctgccgggacaacgatcatggagtttatccggaacttgtcacgcatgacgcattcctgtgttttcgtagatgcgatagtagtgtcggatataaatgataggttatctccgaagaaagaaccgccgactaccactgccaccatgaaaggaagcgctatttccgttttttctgctagccccacagctacaggggtgagggctacgatagtacccacgctggttccgatagacagggagataaaacaagctgcaataaatataccggctagcagcaggttatccggaagaatatgtaatgtcagattgacggtggcgtcaatcgctcccatctgtttggcactgtgtgcaaaggctccggcaagaataaatatccatatcatcagtaggatattcttgttagcggctcctacggaaaactggtaaatacgttgatcgagcttcaatcctttggtgatagcgattgcatagcaggaggagaccagaaaggccactgtaataggcactttataaaagtcgttgaccaggatagatgttaccaaatagaggcataagaatacgagcaaaggacttaatgcccaccaatttcccgtccgttctttatgtgttttttcttcagtcataaattaatattgcagtatttatttgagctgcaaagatagtaatgaaacacataagtacgataaaaggctcaatatttcatcttttctttttctgtttcatccctgtcttttccgtcttggaaactttaaaacggctgctttttcttttttcgtctattttcgtgtcgttgataacataatttattttagaacagaatgacaacgactagattctcattatgtattttttgcctttgtctgtttgcttcctgtggaagaggagaacaaaaggcagatgaaccaatacgggtgaaagtggcagaggcggaaactttggttccttcttcggaacgcgagttttcgtttatttcaaaaccttttaaagagacggagctttctttcagagttggcggaccgattgaccgttttgaagtatatgccgggaatttttatcatcgtggagatatcattgcagaaatagattcccgtgatttccgtatccgaaaagaacgcgcggaagctgtttacaatcaggcgaaagcagagtttgaacggataaaggtgctgtatgaaaaagataacctatcggccagtgcttatgaaaaagcgcgtgc

SEQ ID NO: 11826 - DNA, 311 bp, Unknown
  gut microbiota DNA sequence
cagacgctcatggacgcaccgatgaagaacgccacccacgagcttgtacgggacttgttcgtcttttccgtgttcacgggtctggcgtattcggacgtgaagaacctcaccgccgaccgcctgcaaacattcttcgacggcaatctttggatcatcacccgaagaaagaagaccaacaccgaatcgaacatccgtcttttggacgttcccaaacgtatcatagagaaatacaagggactggctcgggacggtcatgttttccccgttccgagtaacggaagctgcaacaagatactcaaagagataggcag

SEQ ID NO: 11827 - DNA, 35402 bp, Unknown
  gut microbiota DNA sequence
cattactgtatataaagcgttgtttacattgcttgaataataaaatgctaatgtttcttatttttaccttgtgaaacaaaatactttcttgactttttaataataagaattacctttgacggataaaatgatggtagacgctatgaggtatatacgacttggtgtatgtatatgtattcttttatttgtgcataaccaaattttaatggctgatgaggccacaaatgcagattccataactactgaatatataagaagtatttatattgagaagccgaaatgtgctttgaaacttttagatgtagcggagaataaaaagtctatgcctttacgagttatagacgagttacgtagcctgtcatatcgcaatttgtttatgaataagcttgcttatgtatatgcaagaaaatcttatgtgcttgattccgtatatcaaaaggaccctgaacacttattgaaaatgactgtttatttggcggaattatctttcttgatgagtaaatataacgagagtatgaattatgcgcttgacgggattgcccaatcaaaaaggttggaggaccgcgtgtccgaagcccggttgctatactgcattggagagaataaccgtatgttatcatttaaagataaagcgtatgattattttgattctgctatcgatttgttgaaagggagaaaaggcgtaaaagagataggaatgctctcttctttctatggagggaaaatgagttatttaatgactgactctttgtatgaggatgcatctgttatggctttggaacgtgaaaagcagataaaaaaattggaaactttacctgatgttccgaaaggattggttgatatgcaatatggttatctgtactctaaatgggcatataattgctatatggaaaagaaatatgggcaggctgaaaagtactttgcgatgtatcaatcgactgaatactctcgtacacctgatggaaaaatgtattcaattccttatttgctggcttccaagcattacaagcaggtgattgacaacagtcaggagtttaaagaactgatgaggaagcagcaagatactatcaatgcgcaatatatgaatgtgcttgaaagggaagtgcaagcctatatggggatgggaaactataaggaagcggcaattttgcaaggagctattatagctataacggatagtattaataacagggataaagagaatgcggcattagagttgaatacgatgtatgatacttctgaaaaagaggactatatagccaaacaagcattccaattaaaagtcagaaacataacattgacctttttgacgtgtattacactgttgactttgtttgtattatggcgtatgtggcgtttcaaccatattatcagatataagaataaaatccttgctaagtttataaacgagagattggccaggaagaaagacagtcagtcattggatattgatgaacagcttatgatctcacaagatatagaagatgaaagtattttgtttggcgaccaagaggagatatctgatgaaaccggcaaagcgagcggggaagaagaagagaataaaaaaatatttattgaactgaaccgtattgttgttcaagaccagttatatctttcttcagaattgtcgagagaagatttggcacaactcgtgcatttgaataacgcacgttttgcccgaatgataaaagaatgtaccggtactaattttaatggatacatcaatgatttgcgtatagattatgcaattaaattattaaaactgcatcctaattatacgatacgtgccatagctgatgaagtcggattcaacagtaccccgatattatataatcttttcaagaaaaagacgggcatgactccgtacgagtttaagaaagcgcaagaatctctttaagaattaggtcgtacaatgttcttgtatggttaaacaatttccagccttatcggtttattctaataagtaatcaatataaataatcatgatacaggttaggataaagcgagtatacgaagacttttcggaggcagacggatatagggtattggttgacaaattatggccgcgcggaataaaaaaggaatggttgagatatgattattgggcaaaagatatcactccatccgctgctttgcgtaaatggtttcacgatgatataccgggacactggaatgacttcgtcgtactgtatcagaaagagctggatgcttctctggcagcgaccgattttctggcccttatcaagccgcgtccggtagtaacactcatttacgcttctaaagaacctgtatataatcatgcccgaatactccgcgattatctggaaatgcgtttgaaagagtgaaattaaagtaatttttatctgcttacgctttctgtcgttcactcaatttcctacctttgtaatctaaatcaaaatcgtgtagccatgaagtataaattattggtcttggatgtagacggaacactactgaatgatgcgaaagaaattagtaaacgtacgctggccgctttgttgaagattcaacagatgggagtacgtattgttttggcttccggcaggccgacctatggtttgctgccgttggcaaaatctcttgaacttggaaattacggaggttttatcctttcctataatggttgtcagattatcaatgcacagaacggagagattctgtttgaacgtcgcataaatccggaaatgctgccttatctggaaaagaaagcccgtaagaatggatttgcgctgttcacgtaccacgatgacaccattataaccgattcttccgagaataaacatatccgggatgaagccgaattgaataatttgcgggtgataaaggaagaagaattctcctcagccattgactttgctccttgcaaatgtatgcttgtcagtgatgatgaagaagcacttgtcggtttggaagatcattggaaaagacggctgaacggagcattggatgttttccgttccgaaccctatttccttgaggtcgttccgtgtgctatcgacaaggcgaatactttgggagctttgttggaagcgttgaacctgacacgtgatgaggtcattgctattggtgacggtgtatgcgatgtgactatgattcagttagcggggttgggaatagctatggggcattctcaagactcggtgaaagcgtgtgccgattatgtgacagcgtcgaatgaagaagacggggtagcccttgccgttgaaaaagcaatcatagccgaagtccgtgcggcggaaattccgttagaccaactgaatgcgcaggcgcgtcacgcattgatgggaaatctgggtatccaatatacgtatgcgtctgaggacagagtagaggcgacaatgcctgtcgatcaccgtactcgccagcctttcggcattctacatggcggtgctacgcttgcattggctgaaacggttgcaggactgggttctatgattctttgccagcctgatgaaatagtagtgggaatgcaggtcagcggaaatcatatatcttccgcccacgaaggagataccgtgcgggcagtgggaaccattgtacacaaaggacgctcatctcatgtatggaatgtggatgtctttacttcaacaaacaaactggtgtcttccgtacgggtagtcaacagtgttatgaaaaaaagatgattgacgaagaaataagtaatctgacagttattgatgcgcttatccggcaaaagcgaccttttgtggtataccgtattcccggagagaaacttccccgtctgttgacacaggcggaggaggagatccgtttgatatacgatttgcaagagttgaacggacagaaaggatttgttatcgctccctttcgggtgagtgagatgtgtccggttgtactgatacaatctgatggctgggggcaatccctttctcttgacgatgatacggaggaagaatatgaggcttctttgcaaatacaagagcaagaaaattttcagacctcttacacgaaggagtatgccgactgttttcaagcatttatcaatgccttacgtgacgggacttttgacaagttggtactttcccggcgtattacgatggataagggggcggacttttctctttcatccgtatttcgtgcggcctgcaagcgttatattcattcatatatatacctatgttacactccccagaccggcatttggttgggaagtactcccgaaattattttatcgggtgagaaagatgaatggaatacggttgcactggccggaacacagcctttgcaggatggcaaattgccgcaagtatgggatgaaaaaaacaggaaagagcaggattacgtaactgcttatatccgtagccgacttctttctttgggcatccattctactgaaagcggaccttatcctgcatacgccggagctttgtcacatttgaaaacagattttcatttctctttgagagataataatggtttgggagatctcctgaaagtgttgcatccgacgcctgcggtgtgtggtttgccaaaggaagaggcctatcgctttatattggaaaacgaagggtatgaccgtcgttattattccggttttatcggatggctggatccgaatggaaggactgatttatatgtgaatttacgttgtatgcatatcgaggatgaacgactgactctttatgccggtggcggactattggcctcttcggagctgaatgatgaatggctggaaacggaaaaaaagttgcagacaatgaaacgtctgattacttccacctccattatcgctaattactaatcattaacaagctaatcactaatcatcatgtatacagacaagaaaaacatactccaactggttgcgttgcttgaggcgcacggcattactaaggttgtgttgtgtcccggtagccgtaacgcgcctattgtgcatactttgtccaatcatccgggctttacctgttatgcgatgactgatgaacggagtgcgggttattttgctatcgggcttacgttgaatggtggcaaacctgctgcaatctgctgtacttccggtacggcgttgctgaatcttcacccggctgttgcggaagctttttatcagaatgttcctttggttgtcatttctgcggatcgtcccgctgcctggatcgggcagatggacggacagactttgccgcagcctgatgtattccggacgttggtcaagaagtccgtgaatcttcccgagattcatacagaggaagacgaatggtattgtaatcgtctggttaatgaggctttattggagacacatcatcatgggaaaggaccggtacatatcaatgtgcctgtttccgaaccgctgtttcagtttacagtggacaaattgccggaagtgcgtgttatcacccgttatcagggattgaatgtttatgaccgtgattataacggtctggttgaacggatgaataaataccagaagcggatggtcattgtcgggcagatgaatcttatttatttgtttgagaaacggcataccaaactattatacagacattttgcctggttgacggagcatataggcaatcagaccatacctggcattccggtcaagaatttcgatgcggcactttatgctgttccggaagataagatggaacagatggttcccgaattgctgattacttatggggggcatattgtttccaaacgactgaagaaatttctccgccaacacccgcctaaagaacattggcatgtgtcgccggatggtgaggtggtcgatttatacggttcgttgactaccgtgattgaaatggacccgtttgagtttctggagaagatagcaagtttgctggataatcgtgtgcccggatatccccgtgtgtgggagaattattgcaacactattcctgaaccggactttgcttattccgaaatgtcggttgtcggtgcattggtgaaagctttgccagagtcgtgcgcattgcacttggcaaatagttcggtagttcgttatgcccagctttattcgataccttcaactattgaagtttgctgtaataggggtacgagtggtattgaagggtctttgtctacagcggtcggttatgcggcagcttccgataaactgaattttatcgctatcggggatttgagtttcttctatgatatgaatgctttgtggaatgtcaatgttcgtcccaacctgcgtatccttttgttgaataatggcggaggagaaatttttcatacattgccgggattggatatgtcgggcacatcccataagtttatcgcagccgttcataagacttccgccaaaggctgggcggaagagcgcggatttctctatatgaaagttgaagatggggatgaactggcggaggcaatgaaaatttttactcagcccgaagagatggaacaacctgtgttgttggaggtgtttaccaacaaaaacaaggatgcgcgtatgttgaagaattattattatcaaataaaagaaaaataggttatgtcaacacaaagagagtggactacgatcagagaatacgatgatattctttttgattattataatggaattgcccgtatcacgattaaccgtgaacgctatcggaatgcgtttactccgactactactgctgaaatgagtgatgcgctacgcatttgtcgcgaggaagcggatattgatgtgattgttattaccggtgcaggtgataaggctttctgttcgggaggtgaccagaatgtgaaaggacgtggcggatatatcggaaaagacggggttccccgcttgagtgtactggaggtgcaaaagcagatacgcagtatcccgaagccggtgattgctgccgtgaacggatttgcgattggtggcgggcacgtgcttcatgtggtatgtgatttgtctatagcttccgagaatgctattttcggtcagacgggacctcgtgtgggaagttttgatgccggattcggtgcttcttatctggcacgtgtggtaggtcagaagaaagccagggaaatctggttcctctgccggaaatacaatgcgcaggaagcgttggatatgggactggtcaataaagtagttcctttggaacaattggaagacgaatatgtgcaatgggcagaagagatgatgttgcttagtccgttggctttgcgtatgattaaggcaggactgaatgccgaattggacggtcaggccggaattcaggaactggcgggagatgcgacattgctttattatctgacggatgaggctcaggaaggaaagaatgcctttttggaaaagcgtaaaccgaacttcaagcaatatccgaagttcccctaaaaatgatactttgatatattatttatattcaatggattgcaagattaagatcattccccgattgctccatttcaagcagtcggcaggaacttcgcgaggtacatactccacccggaaagtgtggtatctccattttacctcttccgaatttcccggtcgggtgggaataggggagtgtgctcctctgcctgcactgagctgtgacgatcttcccgattatgaagatatattaggagcagcctgtcgggaagtggaaaagcaaaatgggagattggatgtgggcgctttgcgtaagtatccttctatccttttcggacttgaaactgccatccgtcactatcatacgggagattgggctttgtgggataccgctttctctcgcggagaaacagggattcctattaacggccttatctggatgggcgacttcaataaaatgctggcgcagatagaaacgaaaatgaatgtaggtttccgttgtatcaaactcaaaatcggtgcgatcaactttgaagaagaattggctctgctccgtcatatccgtgcgcacttttcttccaatgagattgagctccgtgtagatgcgaatggggcttttgctccggctgacgctatggagaaactgaaacggttgtctgaattggatttgcattccattgagcagcctatccgtgccggacaatgggaggagatggcgcgtcttacctccgagtctcctttgccgatagctttggatgaagagttgatagggtgtaatactctggtagagaaacggaaactgctttctgccattcgaccgcagtatatcatcctcaaaccttcgttgcatggtggaataagtggtggaaacgaatggattgcggaggccgaacgtcagcgtatcagttggtggattacatctgctttggagtctaatatcggtctgaacgccattgcacaatggtgcgctactttcgacaatccgttgcctcagggattagggacaggattgctttttactgataacgtagaaatgccgcttgaaataagaaaagattgtttgtggtttgacagatgatggtattcaatcgacaaaagcaacgcttgctgctagaaggaaaggaatatacacctgatgatatacgcagatgtatggtgcggggagtagaaaactatccttccgccatatgggatttattcctttttctacaggagtggttcaacgattcccctttacttgcggttcatacatccgggtctaccggtatgccgaaaaaattaatggtacgtaaagaacaaatgatgcagagtgcgcgtctgacttgtgaatacctgaatttgcaggcgggagatacggccttgttatgtatgaacctccgttatatcggagcaatgatggtagtggtgcgctctttagttgcaggtttgaatttgattgtgcgtcctgcttccggtcatccattgtccgatatacacgaaccgttgaagtttgcggcaatggttccgctacaagtttataatactcttcaggttcttgaagaaaaggaacggttgaagcaaacggatattttgataataggcgggggagcggttgatgccagactggaagcggacattcaatttcttccgggagctgtctattctacttacgggatgactgaaactttatcccatatcgctcttcgccgtctgaacggtcctgcggcttccgaacactatcatcctttctcttcggtgcatttgtctttgtctccagaaaatactttagtgattgaagcacctttggtttgcgctgatattctgcaaaccaatgacattgcacgtatccatcccgatggaagtttttctattctgggacggaaagataatgtgataaatagcgggggaattaaaattcaagcggaagaaatagaaaaaaaacttcgcctgttgattccgataccgtttgttattacctctgttccggacaagcgcttggggcaggctgtggttttattgctggcggaacagccggatatacaagagatggaaaaaggaatacaaacgatattggaaccatattatcgtcccaagcacattctggtagcggattgtattccgcaaacgggaaatggaaaagtcaatcgtgcggattgtcgtattttggcacagcgcctgctacaacttctgaatgattcatcctgttaaaagtaataccctagattcacaaaacaacttgctttatccgtctggttggagtagcccaatgagatttccaatggcccgaagacgctgtccattccataaccggcactgataccgaacaattgcttgccttttaatattttgaaaaaatgactgtccgtcagtccgtagtttccggtcaggatgaggtaatggatggctcccatccgttgtcttaattttaaagacgcaatcataattgcattatccatcagttctatattgttgactccggcaaatggtaattgctgaggtatatagaagccgggaacttcacctccgattgcattttgcagaggatagggaaagtttctcccgatcaggatacgtccatagatggaaggaatgacggagaagcggcgggtgatgggaagaacacttgcccatgaagcactcaatgcagagaaaggagcgtgttcgttatattgcgccatattatccgtgtagagggaataggcagccttaaagtcgctgcctttggcggggaaatatcctttatcgtatgtgttgtaatgtatttgggcaaaataactcagaaaatgttccgattctactttcaaatcaatcagttccggttgtttaaacaggaaatctttgtatttgtagtattcaaaacggagtccgagcccgaaacggaagtttttgtaccatacatccgagaagccgaattcggctaagtgatatttataggttgtattgtaggcacggtttcccttctcgtagatgttgatgtcgttgtattggaacatatatgagaagttgaaattacgctgctgcatgggttcgagtgtatagtcgatgcgtgcggcatatcgcttacccaaccgtccggtgagggataggcgggaaggaatatgagtcttgaggtctgcagtggcattaagcaacagagaggcaatctcttccgaatcgaagcggatacccagattgattcttctttcatatttctcttgcaacaggaagttgagatggtagccttcgggagtatctgtcagtgtataactggcactagagtaagactggctaccgcgtaacaggtctaaggcctgttctatttgctgcgtcgtaatgttactgttttcttttaagttacatttcttcattaaccattttttgtcgtcagtctctactccggagaaagaaatatctgtgacgtaaatggtgcgcacattggagagggaagagtaggggccatgctgcttgggcttataatcttccggtatccctattctcttttttaaggcaagcagggattcccattgcgatcttgccgcctcttcaccccttcgcatcaaactgtcaatggcggtcggagtaaagctggcggaggaatatccttccacattcacacggatataggtatctgtgatatctacatttttctcatgattggactggcaggtaaggtcgacaatctgtcccagaatatcgggtgcactgttcagcttgtctgccttttttaaagcattctgcacatctactccgataataatatccgcccccatagctttcactacatctgccggataattgtttacgattccgccgtccactaataccatactgtctttccgtaccggagtaaataccccgggaatggccatactggcacgcatggcggtggagagtattccgtcatggaatacaataggttctccgttcactacattggctgccacacaggcaaagggaatgggcagtttattaaagttgatggagtcatgataccccattgtcaaatccgagaatagattggctagattctgcccttttacgattcctcctgaagctgcgtctttgggtgtttttgtaaaagggatggaaacaataaacctttcggaacgttcacgctccgttagtgacatggaactccgttttacccggtcgctcaacaagaatgtccaattttgctttcgcaccatgctgtccaactgctcaggtgtgtagcctatggcgtaaagccctcctacgatggctcccatactggtcccggctatataatcaataggaattccggcctcctcaatcactttcaaggctttgatatgagccatacctttggcacctccgccgctcaggactactcctacttttttgcgttgttgctcttgagaatgcaaagaaaaaggaaatattaagcaggttaataaaaccaatgttgaaagtatttgttttttcatcagacaggtgtttatatatactacaaatgtagggtatattttgtttagttgttgaattgggaaatggaaaaaaatgttccaaaagtcggaattgtggattatttctacatatttccgataaattctacatttccgcatttagcatgacaaagtataatgagttgatagacagtgaataataaatgtaatgattttggcatactatttgcttgagaggaagatagaacaagcataagttaaatttaataataagattcgatatgagattattcttttcgaaacatgagttgaaactgagaagaaagagaaacattgctgctataatttgtgtggtaattgtgttgggggcgtattggatactaacccggcctcagaaggttgagccggaaatgccgacagtcattgtggaaccggtagttaaagatgatgtggaaatatacggggaatatgtcgggcgtatccgtgcccaacagtttgtcgaagtacgtgcgcgtgtggaaggttatttggagaatatgctttttgccgaaggtacgtatgtaaataagaatcaggttttatttgtaatcaatcaggatcagtatcgtgccaaagcggacaaggcgagagcgcagttgaagaaagatgaggcgcaggctttgaaagcggaacgtgatttaaagcgtatccgtccgttgtttgaacaaaacgctgcaagtcagttggatttggataatgcggaagctgcttttgaaagtgccgaagcaacggtggctatgagcgaagcagacttggcacaggcggaattggaattgggttatactattgtccgttctcctctgtcgggacatatcagtgaaagaaacgtggatttaggtacgttggtcggtcccggtggaaagtcattgcttgctaccattgtgaaaagtgacacagtattggtggattttagtatgacggcactcgattatctgaaaagtaaagaaagaaatattaatttgggacaacaggactctacccgttcctggcaacccaatatcactattacgctggcggataataccgtttatccatataaaggatatgtagattttgccgaaccgcaggtcgatcctcagacgggaactttttccgtccgtgccgaaatgccgaatccgaaacaagtcttgttgccgggacagtttactaaggtcaaactattgttggatgttcgtgaaggtgcactcgttgttccgatgaaagcggttaccattgaaaaaggaggagcatatatttataccatgcgtaaggataatacggtagagaaacgttttattgaattaggaccggaagtagggaataatgtagtggtggaaagaggactggcagcaggagaaattgttgtagtggaaggtttccataagttgacgccgggaatgaaagtgcgggtaagtcagcaggagatggaaacgaaggataacacaaaaggagaataggcgatgaaagttacgttttttatagataggccggttttttcggctgtaatctctatcgtgattgtgattgtcggtattatcggtctgacaatgcttccggttgatcaatatccgcagatcactcctccggtggtgaagatcagtgcttcttatccgggtgcgagtgcgcttaccgtatctcaggcagtagctactccgattgagcaggagatcaatggtacgccgggaatgctttatatggagtcgaacagttctaattccggaggtttttcggcaacggttacatttgatgtttctgctgatccggatttggcggcagtcgaaattcagaatcgtgtgaaactggcggaatcccgtttgccgacagaggtgatccagaatggtatttcggtagaaaagcaggctcccagccagttgatgacactctgtctgacttccactgatccgaagtttgacgaaatttatctgagtaactttgctaccatcaatgtgcttgatgtgattcgccgtattccgggagtgggacgtgtctcaaatattggtagccgttattatgcaatgcagatatgggcacagcctgataaattggcgaatttcggtctgaccgtgcaagacttgcaaaatgccttgaaagatcagaaccgtgaatctgcggcaggtgtgctagggcaacaaccggtacagggattggatataacgattcctattacaactcaaggacgtctttctacggttgggcagtttgaggatattgtggtgcgtgccaatgcaaacggttccatcattcggttgagggatgtggcacgtgtttctttggaggcttcttcctacaatacagagagtggtatcaacggtgagaatgccgctgtgcttggcatctatatgttgccgggtgccaatgcgatggaggtggctgaaagagtgaaggaagcgatggcggaaattagcaagaacttcccggaagggttgagctacgagattccgtttgatatgacaacctatatttcagaatctatccatgaagtatataaaaccttatttgaggctttagtactggtggtgttggtagtatatctttctttacagagctggcgtgcgacgttgattcctgtagtggcggtacctatttcattgatcggaactttcggctttatgttgatctttggtttctctttgaatatcttgactttgctcggattgattcttgccatcggtattgtggtggacgatgcaattgtagtggtggaaggagtagagcatattatggaaacggaaaagctgagtccttatgaagctactaaaaaagcgatgaacggactggcaagcgccttgattgccacttcattggtattggctgccgtgttcgtgcctgtcagtttcttgagcggaattacaggacagttatatcgtcagtttacagtgacgattgtagtatccgtgctcatttccacggttgtagctttgacattgagtccggtcatgtgttctctgatcttaaaaccggatagtgggaagaagaaaaatattgttttcaggaaaatcaatgaatggctaggtattggcggtaataaatatgtagctgccgttacccggactatcaagcatcctcgccgggtgttgagcgctttcggtatggtgttgatagccataatgttggttcatcgtattattccgactagttttttgcccgtagaggaccagggttacttcaagattgaattggaattgccggagggagcaactttggaacgtacgcgcatagtgaccgatcgtgctattgcttatctggaaaagaatccatacatagaatatattcagaatgtgacgggaagcagtccgcgtgtaggcagtaatcaaggacgtaccgagttgacggttatactgaaaccttgggaagagcgcaagaacacaagtatcgaaaagattatggatacagtggagagacatcttgaggaatatccggaatgcaaagtctatctttccactccgccggtgataccgggtttaggtacttcgggaggctttgaaatgcagttggaagctcgtggggaagccacttttgacaatctggtggatgcggcggatacattaatgtattacgcttctaaaaataaggcattgacgggtttgtcttcttctttgcaatcggagataccgcagctctattttgatgtagaccgggacaaagtgaaaatgctcggtgtacctttggctgatgtattttctaccatgaaagcctataccggttcagtatacgtaaatgatttcaatatgttcaaccgtatatataaggtatacattcaggcggaagctccttaccgtgagcataaggataatatcaatctattcttcgtcaaggcctctaatggagctatgataccgttaacatctttagggaacgcttcttataccacagggccaggtagtatcaaacgcttcaatatgtttactacggcagtcattcgtggggcagctgcgcaaggatacagttccggacaagcgatggagatcatggaacagattgctcgtgaacatcttccagacaatataggtttggaatggagcggactttcttaccaagaaaaacaggccggaggtcagacaggcatggtgatggcattggtattccttttcgtatttctctttcttgctgcgcaatatgaaagctggacagtacctattgccgtattgctttctttgcccgttgccgctttgggtgcttatcttggggtatgggtatgcggattggagaacgatgtgtattttcagatcggtctggtcatgttggtggggcttgccgccaagaatgcaattttgattgttgaatttgctaaagtgcaggttgacaagggagaagacttggtgcagtcggctatttatgcggcccgtttacgtttccgtccgatcttgatgacttcgctcgcgtttgtgctcggtatgcttccaatggttttggctagcggacccggttcggcaagtcggcaggcaatcggtacaggtgtctttttcggaatgatatttgctattgtattcggtatcattcttgtaccgtttttctttgtgatggtatataagacgaagtctaaactcttaaaacagaagaaatgatgaaacgaaagaaactatatattgtcatattgttatttgtaggaatattgacttcctgcaaggtaggaaaaagttatgtccgtcccgatcttcatctacccgacagtttggctcaacatcaggactcagttagctttggtgatcaggactggaaagatatttatacggattctacattgagaagcttgatagaacgggcattggatcataataaggatatgctgatagctgctgcccgtgtgaaagagatggctgcacagaagaggatttctacggcagcattgcttcctgatataaaagggaaagtgacggcagagcgtgaactcgaaaatcatggaggagaggcttttaagaggtcggatacctttgaagcgcagtttctagtctcttgggaacttgacctttggggaaatttgcgttgggcgcgttcggctagcattgcagagtatttacagtcggtagaggcacaacgggcactacgaatgactattgtagcggaggtggcacaggcatattatgagttggtggctttggatacggaattggatatcgtaaaacaaaccttgaaagcccgtgaagaaggagtccgtttggctcgtatccgttttgccggaggattgacttcggagacgtcgtaccgtcagtcgcaggtggaattggcacgtacggcaactttggttccggacttggaacggaagatttccttgaaagaaaatgatatagcttttctggcaggtgaatatccaaacaagattgcccgttcacgtttgcttcaggagtttaagtcaccggaaacgcttcctatcggattaccgtccactttattggaacgtcgtcccgacatccgtcaggctgaacaaaagctgattgcagccaatgctaaagtaggggtggcttatacgaatatgtttccgcgtcttgccctgacaggaggatttggctcggaaagcacgtctctatcggaactgttgaaatctccttatgcggttatggaaggggctttattgactccaatttttggctggggaaagaaccgtgctgcactgaaagcgaaaaaggcggcctatgaagttgaagtacacaattatgagaagtctgtattgcaggctttcaaagagacacgtaatgcgatagtgaatttcaacaagataaaagaggtatatgagcttcgtgcgaatctggaacgttcggcgaagagctatatggaacttgcacagcttcaatacattaacggtgtcattaattatctggacgtgttggatgcgcaacgtggatatttcgatgcgcagattggcttgagtaatgcgattcgcgacgaattgataactgtagtacaactttataaggctttaggtggaggttggaaacaaaatccctaaacaaaagaaagaagaattttcataattcggaaaaaagtgcgaaatttgcaacgcttttcaagtttgataagaaacttactaacacctttaaataaaaatagagaaaatgactaaaagtgcattgcaaatcgcaagggctgcttatcagcccaaacttccaaaagcattggcatcaggagctgttaaagcagtggcaggtactgctactgaatctgtagccgatcaggaagctatcaaagctttgtttcccaacacgtacggaatgccgttgattacatttgaagccggtgaagcggtagctcttcctgctatgaatgtaggtgtgattctttcgggtggtcaagctcccggtggacacaatgtgatttccggtttgtttgacggtatcaagaaactgaatccggaaaacaaattgtatggtttcatcttaggtcccggtgggttggtagaccataactatatggagctgactgctgacatcatcgatgaatatcgtaacactggtggtttcgatattatcggttccggtcgtacgaaattggaaaaggaagatcagtttgaaaaaggatttgagattatcaagaaactcggtatcaaagcattggttatcattggtggtgacgactctaacacaaacgcttgtgttttggctgaatactatgccgccaagaagtatggtgtacaggtaatcggttgcccgaaaacaatcgacggtgacttgaagaacgatatgattgaaacttctttcggtttcgatacagcttgtaaaacttatgctgaagtaatcggtaacatccaacgtgactgtaactctgcacgtaaatactggcacttcatcaaattgatgggtcgttcggcttctcacattgcacttgaatgcgctttgcaggtacaaccgaacgtatgtatcatttcagaagaagttgaagctaaggatatgtctttggatgatgtggtaacatacatcgctaaagtggtggcagaacgtgctgcccagggacataacttcggtacagtattgattcctgaaggtttggttgagttcattccggctatgaaacgtctgattgctgagctgaatgacttcctggctgctaacgcagaagaattcgctcagattaaaaagtctcaccagcgtgattatatcattcgcaaactttctccggagaactctgctatctatgcaagtctgccggaaggtgttgcccgtcagttgactttggaccgtgaccctcacggaaacgttcaggtatcattgatcgaaacagaaaaactgttgtctgaaatggtagctacgaagttggcggcttggaaagaagaaggtaagtatgtaggtaagtttgctgctcagcaccacttcttcggttacgaaggacgttgcgctgctccgtcaaacttcgatgcggattactgctattctttgggttacacagcttctatgctaattgctaacggtaagacaggttatatgtcttctgtacgcaataccactgctcctgctgccgaatggattgcaggtggtgtgcctatcacaatgatgatgaatatggaacgccgtcacggtgaaatgaaaccggttatccagaaagcattggtaaaactggatggtgctcctttcaaagcatttgccgcacaacgtgaccgttgggctattgaaacggattatgtatatccgggtccgattcagtactttggtcctacggaagtttgcgaccaggcaacaaagactttgcagttggaacaacagaaataattttaactgttagcggttaacggtaaataattaattaacgatggacggtaggtgtcgtatgacagattatcgttcatcgtttttcactaacccttaatcatccagtcatttgtcgtcacgtaataatccgatagctgcagttcaaaagaaaaagacagtttccgccactcgaaaaaagggaactacttcttctaaatcttcccgtgctccgaaaagggtgcagatgaagacgagccatggtatgcctgtctggttgcgtaatattctggcagtactgattgtgggttgtttctctgttgctttctattatttctttatccgcccttatgcttatcgttggaagccttgccacggattaaaagaatatggagtttgtattcctgacggctacgatgttcatggaattgatgtttctcattatcagggaaaaatagactggcagaaacttcggcaaaacaaggagacagtgactcctttgcattttgtctttatgaaggcgacagaaggaggcgatcatggtgacactactttctcggcaaactttgccaatgcgcgtaatcatggatttatacgtggagcttatcatttttatattccgagtacagatgctttgaagcaagccgacttttttattcgtacggtaaaattggataccggagatttgccccctgtgcttgatgtagaaatgaccggaagaaagaataagacagaattgcagcaaggtatcaagcgttggctcgaccgtgtggaggcttattatggggtaaaacctattctttatacttcttataaatttaaaacccgttatctggacgattctatctttaacgcatatccttattggattgcccactattatgtggactctgtgaaatatcaaggtaaatgggatttctggcaacatacggatgtgggaaatgtacccggcattgaagaagaggtggatctgaatgtcttcaacggtacattggaagatctcaagaagctgacaataaaatagcagctgtttctttttcaaacaacttatctattctcttatttgttataatcgtattattattaaaaatatacgattatgaactttgatatagctattattgatggaatgagccgctttgatccaaagattcatgttgtgatagaaggagcggagtttgccgattatttttggcctgctgtcgaacaatatgtggaatgtacgcatgaatattggcgtaggactttatcattctcaaaacatagaaggcgctttgaccactttgcccggagcacgtattgtatgtccgtcttttgcggatgatgcagccgggctactccgtacctgtatgcgttccaaaggctttactttattccttgagccgaaagcattgtataattccgttgaggctgctgcagtcgtaccggaagattttgaagttcctttcggaaaggcacgtattcgtcgtgaagggacagatctaagtatcattacgtatggaaatacaacgcatttctgtctgaatgctgcggaacggttggagaaagaaaaggggcggaaagtagaggttatagatatccgttctttggttcctttggacaaggaaacgatattcgaatcggtgaaaaagacgagtaaggcgttggttgtacatgaagataaagttttctccggctttggggcggagcttgccgcaatgataggtggagagatgtttcgctatttggacggacctgtgcaacgtgtcggctctacctttacacccgtcggtttcaatcctgttttggaaaaggagattttgccggatgaagctaagatctataaagctgccaggaagttattagaatattaaacagtatggattatgaagaagataggtttgttttatgctgccaaagctgagaaaacgagttgggtggcggaaagaatacagaaagaattcggtgaaagtcatataaaagtggtaccgatagaacaggcttggcagaacgattttgctgcttatgattgttttattgtcggagcctccacttggtttgacggagagttgcctacttattgggacgagctgttgccggagcttagaacgatggatttgaaaggaaagaaggtcgctatctttggattgggagatcaggtacgctatccggaaaactttgctgatggtatcgggctattggcagaagtattcgaagaagacggggcggcattggtgggctttacttcttcggaaggatatacttttgagcgttccagagcattgcgtggcaatctgtgttgtgggttggttatcgacttggataatcagtcggaccaggcaaaaaagaaaatcaaggattggtgtgaacaagtaaaaaaggagtttgcgtaactccttttataagctattatatattatgagggtgtcataatgaataatctgcgttttgacactctctatttttatccctgtattctttgtttctgttggcagagtaatagtattaaactttataaatgaatttcactgccgcccaacgattcttttctttgtgatggatataagtcagtccgtttttttccgcttcttcgcggataacagggatgtcatccacataaaatccgctcatgtatagttccgctccgggatgcatacaagtgacatattgttttatatcattcagtaggatattgcggttaatattagctatgactacatcaaacggcccttttccggaaagtgaagaggcatctccttgagaaacggcaatattatctacgtggttcaattcgatgttttcgatagagtttcgtacacaccattcgtctatgtcgatagcggtacatggatgtgcgcctttcattcgtgcaaggatggcgagaatagaagttccacaacccatatccagcaatgatttatctttcagctcgctatccaacagttcttcgataataaggctggtagtctcgtgatgtcctgtgccgaaagccatttgcggattgattacgatatcgtattctgctttaggaatatcctgatgaaatgtgctgtggattacacaacggtcaccgatgataatcggttgaaagaaattcttttcccattcctcgttccagtccttgtcttctgcttctgcatatgtataggtgatttccgtatcggataggggaaatccggcgattgcattctttatggaggtttcgtcacataaagtttgttggatatatgcggttaatccgttctcattttcaacaaaactctcgaaaccggtttcgcctaatacggcagctaatacatcatttacaatctctgtggacggattcgtatgaaaagtgaactcaaaatacttcatagttgtttctaatgctggtgaataatgtgcaaagataatcacaattttagggaaatccctactatcctttggggaaaatctccccaaggcgataaatctcttccttatctttgtaacgtgaataagtttaagtaattacataaacccagatgatatgaaaaagattgtttacttcttgctagttgccttgtgtctcccgataggcttgatggcacaaagcgttgatgacgacctttacttcgtaccttccaaagacaaaaaggagaaaaaagaaactccggtgaggaaggaaccgaagaaacaggtgacaaacatctatacttcgccgggaactacagttgtggttcaggaccgtagggggagaacacgggatgtggatgaatataaccgccgttacgatgcacgtaataatgaattcgtaatggataatgataccttatatataaaggaaaaatctactccggacttggacggggaatgggtgaccggtgaattcaatggtacgcaggacgactatgaatatgccgaacgcatcatccgtttccgtaatccgcgtttcgctatcagtatcagcagtccgttatattgggatgtagtctacggaccgaattcttgggactggaatatatataccgatggtatgtatgcttacgcattcccgacattcagtaatccactttggtgggattggcgttatggctcatacggctggggctggaactatggttggggctggagtcgtccttattatgcttggggatattatccgggctattggggcggctggcatggcggctactggggtggctggtatggtggtggatattggggacatcatcatcattggcacggcggtcctagctggggctggggcggtggaggccgttggactggtccgacttatacaaaccgtcgttcgtatggacaaagcagttacagaaattcttctactgtacgtcgatatggttcaagcgccactcgttctggtggttctgctgttcggtcaactggtagctcgtctcgtacctccggatcagcttatggcaggggaacaagcacaacaagacgcgtggtaggtacgcgttcttcggatgagcgttatggctcaagtactcgtacgggaaattcatcacgtcgtggcagtatttattctcggccaagtagtactcggactagtggaacaggaaccggttcttcttattcccgttcttctggagtgagaagtggcagtagtggaacgagaacatctacttacaatcgcggtagttcttccactccacgcagcaactattctaacggtaatagtagccgtcgttcatcatcttatggaacttctcgttcatcatcttcccgcagttattcacctgcctcttcaggtggtagttcgcgcggcagctattcttccggtgggggaatcggcagatcttctggcggaggaggttcttctcgtagcggtggtagaagataaaacgaagggtattaattaaatggaatgaaaggtatgaaaaaaatagttatggtagctgtattgggactatttgtttctgcagcttcgggattagcacagactgtttatgatggtgctaaactgacaggaaaagatttaaatggaactgcccggtttgtcggaatgggaggtgctatgggggcacttggtggagatatttctaccatagggaccaatccggccggtattgggctctatcgtagcagtgatataatgacttctttcggtttctcatcttatggaagtgaaagcaagtatttaggcagtaagtggaattcggataaaaacagggcttcatttgataatatcggatttgtattttcatcaaagatcggaaacactactcccttacgctatgtgaattttggatttaactatcataaagcaaagtctttctataagaatatggaaatgaacggtgatcttggtaattattcacaggccttcttgatggcttctctgtctgacggaatatcaaattggggaaatccgtttgatactaatgatataggttggctttctgctgtgggatatgaggggtatgtaatcagtccgagccttacaactacgcagaatgaatttccgtataaagataaggaaggtaatcaagtagtaaataatgagggaaagcctctgttttatgattatgattattataatacaatcgttccggatggagtaagtccatacgcacgctttcattcggaagaacgtggtggcatagatcaatatgattttaatatcgcttttaatttcagtgaccgtttttatctggggctaacaattggggcttattccattgattataataagtacacctcgtatgatgaagattatggtaatgaaacaggatataaactgcaaggttggaataaaattaccggatcaggttttgattttaaattcggagcgattcttcgtcctttcgagtattcacctttccgtataggtttggctattcatacacctgttttttatagtctggattataagacaagtgtttttatgcaatcagatatttgggatccggtagccaatgagattacctatcgtgatatagattctcgtgattatttgcctggtaaagatgatatggttcagcgctttcgttttcagactccgtggacttataatgtaagtttgggatatacggtaggtaatagtttagctttaggagcggaatatgagtatcaagactactcttcaataaaatttagagatcctgatggatatgcttccgctttcgaatgggagaatagtacgacacctatgttgaaaggcgtgcatacagctcgactaggtttggaatataaagtggtacctcagtttgcttttcgtgcaggttataactacagttcggcggcatttaagaaagacgcttataaggacctggcaataaattctattcaaacggatacggatttcgctaatagtaaatcgctgagtaactatacgttaggtattgggtatcggggttctacattttatgctgacctggcatataaattctctacttataaggaagatttttatccattcattaatgtaactgtggatgatgaaggtgttttaatagcttcaccggacgctacgaaagtaaccaacacccgtagccaagtcctttttacagtcggtatgcgtttctaaaccagatcagttttcaatttcaataataacttttgtgtgtaaagaatccctggaatgctgagtgtctacagcacttccggggatttctattagtcgtccggtatgaacggttgtccgtctaatactctattttatcctccttgttcatccatgctttgaaagcggaaatagcttcctcgtgcaataaaatctcagaaggaagttttctctcttccggtttcagttccagttcatcatagatgaaggaatcatcgaagccaatattttttgcgtcggttttattgttgccatagtacattttgtccaaccgtgcccagtaaatggcacctaaacacatggggcaaggttcgcaagaagtatatatctcatagccgctaagattgaatgtaccaagctttgcagcggcagcgcgtatggcgcttacttcggcatgagcggtaggatcgcaggaagcggtgacacgatttactccggtggcaactatctctccctctttagtggcaatcacagcaccgaaaggacctccaccgttctcgatattctcctttgaaagctcgatggctttccgcatcaattcttctttagtcatggtataaaatagattgttagtttaatatgaggattatattatatctttccaagaatcttatccattacccagttggtcagtgtcgcactttcaccgtcgcaagaacagatagattttcccaataaatggtctactaccgcttggataagaggttgctgtacatgttccgggttgccgatacagatttcttcccttcctttttctgtgtgcaagccgataggttcgtaagtgaagacagaaaaacaaatcattcctttgtccccaataatctctatacggtcttcgcgagctgaatcatgagctacaaagcaccaggaaccactgcctaccaatccgttatcgaactggaaacaagcgctcaacgtatcttcggcaggataaagcccgccgcgattgctcttgtagccgtttgcttcgaggatacatccgaacatatcctgtaataaatcaatctgatgcggagcaaggtcgtagaaataaccaccgcctgcaatgtcagcctgtacacgccagggaagattttcacggttataatccaagtcacgtggcggttgggcaaaacggatctgtacattgattacgttaccgatagttccgttttctaccaattcttttactttctggaagtagggaagataacggcggtagtatgcaacgaaacagggaactcccgtttctttggatatgcggttaatgcgcgtacattcttcgtatgtgacggccatcggtttctcaatataggcaggcttacctgctttcatcgacatgatggcgtatgtagcatgggatgagggaggagtagcgatatagatagcattcacttccggatcatctataagttcttgtgcatcgtcataccatctcttgatacctctctctttggcgtatgcttttgctttcgcaccgtcacggctcatcacggctactacttccgaatgttctactttttggaaagcagggccgcttttagttttcgtcacttctccgcaaccgatgaatccccacttgattatcttttcactcataatacaattacctatttgcttattctaataaactccaaagataaagcaattttttgtcaagagcaactttattgattattaacttggtggaggaatttggaaaataaagcctctattttgctaaaatggagatgttgtttgtatggaatagattttccgtttcgggtggataggacctttgctcttgtgaaagcatatcctatttgcagtataaaggcaggtgagtagagataagcccggggatgaaggacaatatgccaatggggaaaaaagtataggattgttttcgtttagtaagtagattgataaggttattttttatcatagtatttcttgtaaatcttttgatattcttcttccttctggaatctatccagccatgcattcaaactgtcgagtaagacaggtgattgtttgctgactgcccatgagtagaattgtgtgaaactgattgccgtattgatatctatttgcggcaaagaatcagcggcagcctgtgcgatactttcatcacatacggcatagtcgatgtctccatgtgccacaagcgaaatcaattgttccgggccgtatttttctatttcctttatataaatggtatctccaatctcatttcccaagttctgaatacgcaagattgacggggaaccctttataacatggagtgttttttgcgctaaatccaactggctgcgtatgtagagggaatcgttttctccggttgctttccgttgtaccagcacttgtttgttgagcacgatgggagaggtgagcagtaaggaatccttcaatttgctggttgctaatataccgtatgctattacgtcataacggtcctcgctcaatcctctcagacgatcctcaaaactcatataagggctgatgtcaactcttagtcctttatctcggccgaatgcctgtatcagttcataattaaaccctgcaaccgtatccccgtctacataaaaactgatggaattgtactctgtcgctacacgtaatacaccttctctgataatatctgcatagtcgcgtgggggaagcggttgtttttgctgattgtcgcatcgacggaaacagaagagtagtgccagtacgataattacaggtatcagatatctgagcaatcttattttggggcgtgtcaccataagctgcagaagttttatcaatcatagaagttccatgaaaggccgaatttcagcacacgtgggttgatagggtaatgaggagacaggaaataattcggtctgctcattccttgattcacgtgatacatcattacatagaaacgtgtacgctttaaatgtaagttcgcgtaaacatttacaataggatagccgcctatctctacctggtcgtctgtcggttgcagatggaagttctgaatggcgggcatatatgcaggggcattgtatttggtaaagtatctcaaatcggcacctaattgtacgctgagcactttttttgccagtttgaactgcatataaaagttatgatatagcgagaggtccggcaagggaagcacggtctggtcgctggacttctgccaggtcacctcattgtccaagtggaagatacccaatttgaagtcctgattaagacttgctgacaacacttgcagacttccgcttttttgttcgggcaatgcttgttgattgaaataagtatagttctttatattctcgactcctgctttcaattttgtcctccaacgggcaatgctcaactctccttcaatgcgggtgcgaaactccttgtccatatcattgtcccaccagaaatgcttggagtgatagtggcgcatatagaacggagccagtttattgctgacctctccacgggctataagactgaccgtatctttccacagaggaaagttcaggtctatatcgcctttcacattgaactgtccgattgcttttcctcccagtcccacttcaccgatggcatgataatggagtacattaccttcacgtttggacaattcgcctcctacgaatatctcattctcattgtatttgtcattacctatgccttccaggttcatcagtgtatatttgctgattttataagaggcaaatgccgtcagtccggctttggcatatttattgaacccttccaacagagcaatacctacggtgtttttgattcctatataggtcgtactgtcttttactaatggattatcaggttctaaataagtgttctgatagtaatctttcacgtcatcttcagaatggaaactatgccgtgcacgttccacttgaacggtatgtataaaactggtgaccggaacgaattcctgtttggcgggcatggtgtcgttttcagcctgtggtatatcccgtttgaatcccaagttatagcgttgagtcagaaaaacgtaaaagtcgtggttacggttggtcgtagcgcttagtatggtaggaatattcgttgattcatactccctttgaccttgtgccatttcctccggtgcagtgatatatcggtcatcttcgatacctccgttctcgtttgttttcagatagttattgctgtatatggcttgcatttggtagcggtcgccaatataactaccgaaaaaagctgcattgaaatgtgatgtgctttgattattgtaatatccccgtccgtacagatagtctatgttgaagccgaaagccagacgtttgtttacattgacagagaagtatgatttgaaacgttcttccccgttcaccttgttaccggctttgtgatatgtcagattggtataaggtacgttactgttcgtaaagttgaattccgtaggacggataaagaaactggagaaaggctccatgaaaatagttggctcagggtcacgacggtcgaagaaaatacgtgacatacggggagaacccatattggccagataattgtaatgtccggtcagcccgtcagtcaggttcgtgttctggaaatgatgatatgccgtatccgccggaatcatagtccggtcgcccaactggtttttgatacgccacatatataatttaggaggcaatccctgtatctcaacatttgcactgtccagtttgtccggaatcatggcagggtctacctggttgccgtattggtcatagccgttttcgtcaattacctggcgaccattgtcgaactgtgcatgaacacttgtcagacctataacggtaagtaatatatataatagtaagattcgtctcataattggaggcaaagatacttactttaattgatttaatgataatggataattgaaaattatgttgcatacgtacaacacgtagctaataattatcaattatccattgttcactatccattaattaaacttctcggataagctccatgcctttcttgatagcttcctcgttcataggaatcaagtggtggtggcgttccggcaaagtctttttcaagcctttgatgacattttctaaagtaacaatcggacgaagtttcagcagaccgcctaatacgatcatgttgaacgctttggcgttgttcatttcgttggctgcatccattgcgtcaatacggtatactttgatgtctttgcgggtaggagggttgattattccgtaaccgtcataaatcaagataccaccgggtttcaccttactttcaaacttttcgagtgaaggctggttcaagatgatggcggcatcgtatttactaagaatcggtgaagatatcttgtcatcgctaacgattactgtaacgttggcagtaccaccccgttgttctggaccgtatgccggcatccagctcacttccttgccttccatcaaaccggaataagccagaatcttacccatagacaatacgccttgtccaccgaatcctgctataattatttcttctttcattgttctgttgacttttagcgttattctttatcttttaaatcacccagcggatagaacgggaacatatgttcttccatccatttgtttgctttttccggggtcattttccaaccggaactacaagtggaaacgatttctaccaagttggaacctttaccgttcattgagttctcgaaagccttgcgaatagctttcttcgctttacggatggccggtaccgattgtacggactggcggcttacgtaagctgttccttccagttgggcggcgatttctgtgattttcaatggatagccgtgaagttcaacgtcacgtccgtaaggacaagtcgagctcttcatacctactagtgtagtcggggccatctggccgcctgtcataccgtaaatggcattgttgataaagataatcgtgatgttttcgccacggttcaaagcgtgtatagtttcggctgtaccgatacaagccaaatcaccgtcaccctggtaagtaaatacgaggcgatccggccacagacgcttcacagcagttgccacagcaggagcacgtccgtgtgcagcttcctgccagtcaatatccaaatagttataggcgaaaactgcacatcctaccggagagattcccaccgttttatcttccatacccatctcctctattacttcggcaatgagcttgtgtaccacaccgtgactgcagcccggacagtagtgcatggcgttgtcgttcatcagagtcggttttttgtaaaccagattctcgggtttgattatttcttctttagtcataacttcttctccttatctgttggtgaaccgtataaaaaactccatcagcttgacaaagattgccgcgccgcatacgtagataaacattttgaaatcttcctttcctacaacgaaataggtgataatggctgcaacagccagaatcatgaaaaggatgttcagtacgtttcttattttatcgggattcatcgtttcgttatttgattattttttcttccaaagcagttacaatttcatccggatcggggacgataccgccgagacgtccgaaatgctctacctttattttaccgttaacagccaggcggacatcttcaatcatctgtccggcattcagctctgtaacaagcataccttttactttgtcagcataagcggcaatggcttttgtagggaacggccacaaagtaatcggacgaaggatacctaccttgatacctttctcacgagccagctccatggctttctgaccgatacgtgccattgagccaaaagcaataatcagatattctgcatcttcacagtttatttcttcaaaacgtacttcgttttcttcgatttggcgatacttagcctggaagcggaggttgttgatttccattgcttccggtttcagttccaaagaagtgatgatgttcggtttgcgatctttagcctttccggtagcagcccacggacattgctcaatcacttccgcttctgtgcggcgtggcttttgtgcaggaagaacaaccttttccatcatctgtccgatcacaccgtcagcaagaataatggctggattacgatatttgaaagccagttcgaatcccaatgccacgaaatctgccatttcctgtacagatgccggagcaagagcgattagcttgtagtcgccatgaccaccgcccttcacagtctggaaatagtcggcctgactcggttggatggttcctaatccgggaccgccacgcatcacgtttacaatcagacaaggaagttcggcacctgcaatgtaagatataccttcctgtttcagactgacgcccggacttgaagacgatgtcattaccatctttccgctgcctgcgcctccatataccatattgatagctgccacttcactttctgcctggagtactaccatgccggttgtttcccacggtttcagttcagcaagtgtttccaacacttccgattggggagtaataggataaccgaagtatccgtccgcaccgcaacggatagctgcgtgggcgatggcttcgtttcctttcattaatacaacttcttctgccatattcttttcttttattctacttttactttatacactgagatacatccgtccggacaaactgttgcgcacgagctgcatccgttacaggtatcttctttcacttgccaggcatagttatagcctttcatgtttacctctttgttgagggcgattacatcaagcggacacgccactacgcataggttacatcctttgcaacgctctgtgtcgactacgattgctcctttgatttttgccataatctttattttattacgttatctttgagtacggttattgattatacatatctttgtgatagaagtttagaatatctatcgccattttccgggcctgaacggcggggctgtcaggattaaggtcgatagcgtattggtaattgtccagcgcttgcttccagtctccttttttccggtaggcatttccccgtaaatagtaaagaatatctttctcgttttcgacagaagtgtctaggagaagttggttcaattgctcaatcgctgtgtccacatccccctgattgataagctcttttaggttttctatttgctccatttcttttgtctttcgggattctgaaacgcaaagatagtttttatttgtgtaaatgagacaaatgaagccggaaatttgtatttgggaaaagactttcctgtggatattgttatgctcacaaggatgaatgaaataaaaaaagaccttcaccttttctctgtatcgacctgtttatcggaattagcgggtgaagggcaatcttttcacctgctgtttcaccttccttgaatccgaatcaaatatgcggtcgctttagtctattgtattggcaatagactgctgggagactaatggataacttcgtgtgccttattagagaaactccttgttagtatagacaaagttgtatttcattagacgtgttctataaacaaaggcttcgtttgtgaaaacaaaggtttggtttatataaacgaagccttcatttataaaaacggaaccttcgtttatagattgtttgtagtagaaagcaagttaggttgtaacaaaagtaagtttagttggattgaaaagtaagttctactataatagaaacatagagagttagtatattatcggattgtatgggtgaggagaaggtgaaagagctgctcttcacccgcaaatattgataaacaaagcgtttcagcgaaaaggtgaagggcatttgagacaggaaaaagtgtgtaagttgtagggtggacaacaatgaagaattagatttttgcaaataatagcagaaataagggcagataatctttcaattcatttcgcataagctccattgttttttgtttgtaccgattgatggacttcacgctaagattcatttcttccgcaatttccgtatgggtctttccttcaaagaaactttttataaataccgtgcgataactttccgggagtttattcagtgtttcgtacagcattctgtataattcgtcaagggtatatacgctgtccggttccacttcgtaaatgggagctttcttttgaacaacttctgcatagttccattcatactcttgatgtttcagataattcaggcagctgttttttacacacattttgatatatcccaatgccgtgtccgattgaaaatcaaaagaatctattttatcccatagtgaagtaaatacatccgaaacaatatcttcccgtgtctctttatcatcaataaatctttttgcatataggacgaatggagcataaaactcttcataaagttgcttgaaggtctgttctttaggctgtttttgaaaagatattttcattattttgagattctgttgtttttcatttcgctgcaaatatataataagataatcgctaaaccttaatttttctatttctttttttattcttttgatggaaaatttggaaataaaataaaaaaaatccgtttttcctgtcccttttgggaagctttgattgtattataggtgagttctatcaattcaatttatcctcttg

SEQ ID NO: 11828 - DNA, 654 bp, Unknown
  gut microbiota DNA sequence
agagacaaatatatttaacgctaaccgaattaagaaagactataacggcatttgcttgattggaaacagctataatataatacgtatatgattgcattgaatctgaactgcaatcagcgatctataacatacttcagttaaggcattcggcatacatgttaaaaccttaaaaactaattgggcgtcatctcgttttagttgtttggaagtaactgtaaaaacagtcctgtattctccaactccatttttcacccactgaatcttttgtttgttgatatcataaaaaggatcggaaagttgtttatggttgataagaccctgatgaattgcactcttgaaacctaatgctagtaaccacaactccgttcctgtctgaaaatttccaacctatatttttgtgcatgttatttgagcattttttcgattaaattaattatcatagtggagaacatcaggtattaacggtttcaaagatcttactttttaacaatatcttaccatctcttctgcttgttgcaatgtttagttttcttgttttcaatcatatatttttcctgttgcaatataaataccttgtattatacaataaatttttgtaactttagtttctgaaaatatagtggaaatcgcttgtaacatgaaatccgccaatat

SEQ ID NO: 11829 - DNA, 3123 bp, Unknown
  gut microbiota DNA sequence
aaagaggaacatttactgaatatccctttataaatgcagaattggtagtacagccagtaaagataaaataacctgcaaagactattttatctttactttaaatattctcctatattttattctgctttaatttcaataacacggctattcaactgtcgtgtagtgaaaacgttcaaaccgacattcatcagatattcaccggagaaaagctgaccattatctttcaaagaagaactactaccggacatcatgttaatttccttcacacgatacatctgatctgaattcaatccttgtaaacggacaggtaatgttttttctccataacgaggatgaatatcaaaagcaaaaaccacggctgttttcctatctttccccacatacatggaagaagtatggttgctgccataaggagaaacaagacgatacaaatcaccatcaagaataacaggcttcaagcgattatagttcttgactgcctgaacacaatacaagtgatcgctctgactcatatcatccaacttaatatcaaatcccaatttacacatcatagcaacatccgtacggaacttaatgctggttccacgattccaagtggtaacatgagcacacagtgttttactgggaaatacctgcgaaaatccccattggataaaaagacgttcgataggatcagtattgtcgcttggccaaaattctgtaaaatatttcaaggcttcataatcagaacgtccgccaccaccggaacacaacatcataggaagatcagggtacttcgccttgattctgtccaacactttatagagtccacgcacataatcaatatacaaatgagactggttttctttcagatacattgaataaatgtttgtaatagggctattgcagtcccatttgaagaaagcaatacccggatacttggtcatcaacttatctaccacgccgaatacatgatcctgcactttcggattactaagatcaagcaccatttggttgcggaaataatattcatcgcggttaggcagatgaatcacccaatctttatggttttcataaagctcgctcttgggattcaccatctccggctctatccacaaaccgaatttaatgcctttcttttgtgattcttcgacaagacgtccgattccgttcggaagtttgtctgccgtttcttcccagtcacccaatccctgacggtcactgctacgaggatacttattagcaaaccagccgtcatccaacagaaacatatccactcccaatttggtagcctcatctatcagaccgatcagtttattttcatcgaaagtaaaataagttgcttcccaattatttaataaagtcatgcgtgtttcaccacccttctttacctgatgattgcgtgcccaatcatgaaaactacggctagcctcacccttaccctgacaactataagtgaaatagaaatccggagtacggaaaacttcgttggcgggaagtttatattcagaagcatacgggttaataccactgatgatgcgcaactcattcttattgtccacctcgaaaataaaacggaaattgcctgtccatcccaaagtacctacaagcacttcacctgcattctcctgtgaaggattacctaaagacagttggaaaaaaggagaaacaaacaaattggcacgtgtacccaattttgtatccaccactttcttaccaaaatccagttccctttcggttatattggcttcatgtgcccagtcgccggaaaattcagtcagaaaatatctgctactattcaggtgcagcatggaagaagcgtatttactaagggtaacaggtttcttctcctgatggctgatttcactgaaagtacggatgatattctctttgccgtaagctatataatgaagcttcactgtaacggggtatttatcatctttgagtgtaatcaccgtctcgttgactccgtcacctttcggttcgttcgaatgctccacatacttaagcagcaatgaagagttgttatcattatgccgcatgtggatagccggttcaaagtaatcttccataccatgagtcagataagcttcggttccctgcggaagaaattgtatatcagagtcatggttcagtcttttaccaagatacttctgatacaaacgcccgttatcccccacctgataaatcaggctggtccgttctgtttctatcttaattagaggcctatcggaagcctgtaaaatagaaatagaacccaataacaaaaaaaataagaatgattttagtttcatagtatattagattctataattttataatcccaacttagccgaaatctccaacatccgctgaatcggcttcactgctttcttcgctacttccggatctaccgttatttccggtgcttcattcttcaaacactcatagagcttctctaacgtattcaaccgcatgaagctacactcgttacatccgcacgtactatcgttcggaggagcaggaataaacgttgtctgcggacacttcttttgcatctcatgcaagatacccgattcggtagccacaatatacgtgttttccgggtggttcacggcatacttcaacaaagcagctgtagatcctaccacatcagccagtttcaaaactgtgctcttacattcgggatgtgccagcactaatgcttcgggatgctgcgtcttcaattccacaatcttttcaacagagaactgttcatgcacatgacaggcaccgtcccaaagcaacatattccggttcgtaactgagttgatataattccccagattcctatctgggccaaagattattttctcatcttttgggaaactttccacgatctgcttcgcattggtggaagtcaccaccacatcagtcaccgctttcaccgcagctgttgtattgacataagaaataacggtgtatcccggatgctctttgacaaactgcgcaaactgatccgccggacaactgtccgccaacgaacaacctgccgccatgtcgggcaccagcactttcttgtccggacaaagcacttttgccgtttcccccataaagtggacgccacacatcacaataatgtccgcttccgttttggctgcccattgagccaatgccaaactgtcg

SEQ ID NO: 11830 - DNA, 8220 bp, Unknown
  gut microbiota DNA sequence
tgccgacgggcgataacgtccggggtccttaccacaacgcttatatgcctcacgagtggctgcaatcacaggctgccgtttgatgtcttccatctgcgttgtggaagtcaactgttcggtgaaggcattaatttcacgccagagcccttcactataagttgtgtttctgacttttgcatatacagctgctccggcaaataccggacaagcttctttaatctcttgagaaatggaaatagtatacatattcaatcgataatagtttttggcagtacaaaaatagatatttcgcctcaatatataacaccgatcctgtggttattatctatattccacccaaaaactcctctctagaatcgtattgtttctttttttttagtaactttgcaaagctgtaaagaatagagattctatatcgcagctttttacatgttaaaaagagaaagcgtttatgcttttatcctaaatatcaaaagatcgccaattttttaacagaaaggataaaacaatacgacgttctcgctttgttttgtaggctcgtggcgtcttgtcacattcctataattcaggcgtggaggggagtgtgtttactttctgtagggcgtttggcgatgccttgatattggtggcacaatgaagttctccacgctttttatgtccttttccataaggcctcttttttaagtaatccatctgaggagaaccggatatacgattaatcttaaatgaatataagatgaaaaaggatgtgcatatagggaagcttattaaactaaagttatcggaaagtaacttatccatagctgattttgcagaagcaattcacaaaacccgcaccacagtttatgacatattcaaccggaagagtatcgacatcgacctactagtcaccatatctgaagtgctgcaattcgatttcatctcttatgcttatagcaaccggtctgaaacatcctctcccggcacatccaatagctatctcatcgttaaagtggtgaaggaatgcgaattagaaaaagaagaacctattttattccgatgcaaattaaaaacgtagcaatttattgacgctacctgtcagttctttcgacagattttcaaatctccatatcatttactcgtctatatttgcattcattattaatcttatataaaataaacatattatgattggagttattattgtactgcttatcgttgcctatgttgcttataagtttttggggaacaacgacaatgattacgtgaaacaacgtattaaaggaagaaatgagaatcagaaaaaagtaatccgttatttctgtaatgatgacggctgtttctctaaaagaatgaaagatgaagaatatgatgcgatggtacgcaatgtattgaacagcatggacttcaaacaaaaagcgctaaacaagatcggtttggatgaaagcgaagtaaacgagatcgagccagtccatttcgaaggatgggtgtttggaaagaaagcatatgcacgcttaggcaaagacaatatttaccgcagctcagcctatcaggtttcctggttattcttcagtgccaatcaggtatatttataccagtacacattcaatatggatgaagacggcaaaaaagaagcgacagaagaatatttctacaaagacatcactaacttctctacttcatcagacacagaagaaacgccacaatacgacccgaaacaaaagaaaaatatacttatcaacgtggacagcaaccgctttgcactgactgttccgggtgacaagttctactgctctatggaacagaacgattatacagaaagggctattcaaggcatgaaggctaaacttagagagaagaaagcctgagatgttttaatagataagtgagtgacagaaaagtgcctgctctctaaagagcaaaaagaagcgagagaatactgcctctttcgtccgttggaacgcccgaaacttaaatggagcaaagtattgggcattctgatcggagttgaaattctggtaagttctctatcatatgcgctatctttatggaggggtacttttcttatttattatattccgggcaacttattatgtttcatttccaccggaaaacaaatactcataggcatagttaagttatatcaacgctatgcacccgaagaaacaagaagaaaatgcctttataaaccgacctgctctgaatacgccatcctcgcattgaaaaagtatggtcttgtaaaaggactatacaaaatctacatccgtttattcaagacatgtcggggaatagaatacggcattgattatccataaactaatacctaaattcatatatgggattctttaataaacaacgaacagacggccggacatacgacggtcagggggaagaacgaaaaggatttatcgatcgtatttcattcaatggagaagcagaagacattgtatggaagttcccgtacgataatctttccattggcacacaattgattgtcaatcacagtcaggaagcaatattcttgcgtggtggtgcggtatgtgatatttttggcgaaggtacacatacgctatcaaccaataatattccggttctccaaaaattaattaatctaccctttggaggcagaactccttttacagcagaagtctatttcgtcagcaaaaccgtacgtcgtaatctcaaattcggaacaatcaacgctgttcctgtacgcgacccgctttacagtatccccattcccgtacgagctttcggtgaatacggtatccgagtcgtggacgcttcaatgttattaggcgaattggtcggtacacttcatacattcgacacggaaagtatcatagagcaatttaagtctgtcgttttgcagcaattaaacgccagtttcggacagttcgtcaaacaggaaagaatctccgtagtagacttgccggcttactctccgcaaatggcacaatacttacaaaactgtctgaagagtgaatttgcgaggtatggcatcagtctggaaaactttaatctggccagtatcaattatgatgaaggccatccgaatgtccaaaaagtactcgaagcacaagccaatgccgctgcagaaatatttgaagcgcaaggacgtgcgcaacgacgcaacatcgaacaatatactttccaggaagaacgtcagtttgatgtcatggagaccgctgccggtaatgaaggaggaagcgggcaaatgatgggcgccggtatggggctaggtatgggagtaggtatcggaggggcattcggaactcagatgggtaacattgccggagtgatgaccagccaacagccgtcttctgccgcaactccgcctccaccacctatgcctgtaacgtatcatgttctggtcaataacgtacaacaaggaccttacgatctccccacattacaacaaatggcacagaacggaacgcttacacgtgatacttacgtatggaaaaacggaatgccgcaatggactaaagcaggcgaaagtaccgaactgcaatcattattcagcgcagttccccctcctccacccattttataatcacccttaataaaatcaggatatggcaaattccagaatatcttttgtatccaatattcttattcccatcttgacgggtatcataacgttagtattattccttttattccgcccggaaaatgccggagctttgttctacaccaatatgatatatacgttactactggaaggctttttattcggctttttgagtctgctacaaaaagagagcaagaatatttcaggagcattttacagcattatcagcgtcggtgcaatctactatatcatattcggtagtggttggatgatagcttactcattgcttctgaccgctatactctcatacaaagtatatatcgcggttcatagtatcatattcttgttatttataatcgtaggctcaatagtcactcggaccgataatagctatcacgaaaagacggaagagcagacgcaacagatgagaagtatccggttctacaccgaaaagatgaaccaattagcttccaagtatttgcaacaagggattgataaagatacagacctttcacaatgggacggatacaaggttctcggaacactcattacaaagataaatcacctcactccttccatcttccgtaatgatatggcagtcaaacagctaagcaatatgctggaaaattgcgaaaagattgttgctgagatggaagaagtacctgattcggatttgaatatgattgaccgtaaaatgaaacgattcgcttcaaatgcaatagatgaaataacgctgttgcgcaatctgtcgcgaggataaatcacagaataacattatagataaaacaataatcatggaaataatatcactttcatgccccaattgcggagctcccgtatctacccgacagaataactgcgagtactgtcaaagcccggttatcatcacctcttttacgaacattgcagatatgcctctgccgcaaatcagcaagtacgcagactcatacaagaaaacattggcagagaatccggacagccaggacctgaatctgtctatcggcatctgctacctgaggctgaagatgtacgaaaaggcatctgcctcattcgaaaaagcgatggaagataactttgataatcccgaaccattctttctggcagcagtttcattgttacgaggaaaaaaaccgtttgtcactctccgcccggtaatcgacaaaatagaagaatatctgaatgccgcagttatgattgaaccgcgagcagttttctattatttcatgtcgtatatcaaacaggattattataaccggaaatttttcaagacatcacccaccagcgaggaattgtatgccacagctatccaatatggattgacagagaccgatatccagtctttccattctatgatcggtatgccacgcccctaaccgccggaagaggtcaacatgattccggacaaaatacgtccggaacgaatccctaaacgacgggcggagaagaactcgtcacaatgggtataagtgcagataccggacagttctatctgactgtcgggaacgccaaacgataataactgtatccggttagcctcccacaaatccaaatgatgttttccggtttgcccgttccacgtcgaaatacggagcatatcaaaatcttgttctttgaatgcttcgtatacttcttcacccacttcaaaagactccaatgagatgctcggacctatgcaggctataacatccttaccttccgttccgaaaatacagtgcattttctctaaagtaccgcgaaggatatgtgccactgttccccgccatccggcatgcaccgccgcaatggcttgatgagtgcggtcatacatcaagacaggcacacagtccgccgtagaaatacagatgcaatatccgggttcggaagttatcagcgcatcgattccatacaacgatttttctttctgttccggagataatccggtaaaagtgtcctcaatatgcaaaatctccgtaccatgtgtttgcacagggactaccagctcaacaagagactgtggcaatgcttccaaaagtagctttctgttaaggcacacctgttccggttcgtccccactgtaatgcgaacagttgaaagacgcataagccccttcactgtaccctccccgccgggtagttacaaaatgagaaatgttggaatatgagcttagcgactcatatcccaacattcttttatcttctgtgagtgaaatcatttttcttcccaatcttcttcttcgtactcatagtcgatgtcctcgtcatcatccgcatcttcctcatattcataaacgatgtcttcatcctcgcccatgtctttgagttcctgttgcaagcgggtcacgtctttcggacggtggacaatcgcctctatcttgttactctccttattcagttcttcccaaaggatgtctttcaacaccgagattcccaaaccggaaacagaagagatgaatacgtgcggtatgccttcgggcaatgtaggctcgatttcgtccatcagttcctgatcgagcatatcgctcttggtaattgccaacacccgttgtttgtccagcatttcaggattgaatgtacgcagttcgttcagcaagatatcatattctttacggatatcatcactgtccgccggaaccataaacaacaacaaggagttgcgttcgatatgacgcaggaaacggagtcccaaacctttaccttgactggctccctcgataattccaggaatgtccgccattacaaaagatttcccatcatgataggaaacgatacccagattcggttcgagtgtcgtaaacggataatcggcaatcttcggtttggcagccgaaatggaagaaagcaaggtagactttcccgcattcgggaatcctaccagaccgacgtcggcaagtagtttcagctccatgataacagtcatttcctgcatcggttctcccggctgcgcaaaacgcggagcctggcgggttgccgtcttgaaatgccagttaccttgaccgccgcgaccacctttaagcagaatcacttcctgcccgtcttcagtcacatcacaaatgtactctccggtttcggcattgtaaacaaccgttccgcaaggtacttcaattaccttatcctcgccgtctttgccgaaactacgtcctttacttcccgactctccatgacctgccatcgcatgacggtcaaacttcaagtgtagcaaagtccagtaattacggttgccgcgcaagatgatatggcctcctcttccgccatcgcccccatcgggacctccgttaggacaatatttctcgcgcctcatgtgcgtagagcctcttccgcccttacccgagcgacagtatatctttacgtaatcaacaaaattcgattcagccacgttggttaatgattaattggttagtgatttatatttaaagaagactacagtccgtccaccgcttcacagatatccgcaaagataccttccatagtgcccagaccgttgatgtgttggtatttcttttcgttcttgtaccagtcaatcaacggagcagtctgcgagtgatatacgtgcagacgtttcttgatcgtctcttcattgtcgtcagcacggccggagtccttaccgcgtttgataagacgtaccatcagttcatcctctggaacatccaaatcgagcattacagaaacatcctgtcctctttccgccaacattttctttaatgcttccgcctgtgcaattgttcttgggaaaccatcgaaaattacacctttgctatctttaaagctatcaaatacgcttgccagaatatcaatcatcaattcgtcgggaatcaattggccttgatcgatataacctttagccgttttacctagttctgtgccgttcttgatttcagcacgcaatacatctccggttgagatgtgattgattccatacttttctacaatacgttcgctctgcgtccctttaccggaacccggagcaccgaaaattacaatgttcaacatcttttttacctaaaaaattaatttgtatttgaatttagtctactactgtataaatgtcgggatagttacgtccgaagccgtcatagtccagaccgtatcccacgataaagtcattcggtatctccatcgctacatactcgatgttgaggtctaccttcaacttctccggcttcaccagcagagaagcgatgtgaatttcctgcggattgcgtgtacctaatgtatccagcagacgttgcatggtgagccccgtatccacaatatcttctacaatgacaaccgtacgtccggcaatgtcttcattcaagccgattacctctttgataactcctgtggaagttactccctgataagaagccagcttcacgaatgagatctcacaaggaatcgtaatatgcttcaataggtcagcggtaaacataaaagaaccgttcaacacactaaggaaaagcggattcttacctgccaaatcgcgattgatttcgttcgctacacgaatcacttctttctgaatatcctgttccttaatagaaacggtaaactgtttgtcttttatctgaatggtatccataaccggttattttaaaaaagttgtcgcaaaaatacaatttttattctacttagtgaaatctatatgaacgtttttataaagaagcgaggagatgtgctcttgcaaacatacctcctcgccctgacttgtta

SEQ ID NO: 11831 - DNA, 16470 bp, Unknown
  gut microbiota DNA sequence
ggctgccgaattggtaatcaatgaccggagcaggtttttgcacactgtccatctgttggtaatggtctgcatataccatgccagcttgggtcattcccattatttgaaccattctttcaagagcgaacatgcctatttttagtgcagtgtgtttggtatagagcaaggtatatgttttatcagaatgttctgcaatagctcgcatcgcttgtgtagactgcattttctctacagagatgagttcgcatccgggaatacagacattggtaattggcgatgccaataaataaattttgtctaccagcgtcgatgcacgtaactctttaactgtttgcacagtttcttccaactggctgaaaggaagaaaacagttgattgttgttttcattattttacttcttgttgtgtagtatgagttgtgtaagatgtttcttatatatttatcataaacttgtttactttgctacaaatgtagggaatttatcatagatatatatactcttacatattttttattccaggagttccgccggtcgtatgtttagaggaacgccaattcttgttgagtgaaggtagttctggtgatttcttttcgagtgaaatgccgatagttttggatttgtcggtatcgtgcatttcgtcccagaaacggcaagtgtcaaatgtatgtcctttcccagtttttggggtgctggacagtgcgagatagcctccttcattatcaagtgccgggaatttggatatttctattaggttctctctattgacattgtgtttttgaataatcttgtcgagatatttagaaaagcaaagatatcctttggatgcaatgatcaggggttgggatggagattcattttgtaacgtagtggtactgtacactttgccgtcttcatgcatcttatatagaaaaagctgtggcaacacaatagtctgttcagtcggattatagagctctatgtattcggcgccgtctgtggcattatcatacattatctcattaaagaggagcatacctctcacatcttccggtagctcggtaatatctggctcttcggaatccggtttgtcgggagtattgtcggggtcggtcgttgtctctacaccgttggataatcgtacatgatggaatgtgaaggctttacagcgggttttggtgtagacacaataaattcccgaacaaacggaactctgtatgccggtatctttcacttgcttttccaatgtatatccgtcttcggattccaatcgtgtccaaaaagtccaatacccattgttatcgcattctacttttatgtataattggggggagttattacccttcatcacttcccgacccgaagccaacagcttgggctggtctccattctgacgataaagtgtcacattgtcttttgctcctcctatttgtataaaatacccgtttaggctaccggagaggatgttggaagaagaggtcagataaaaacgtgcatagttattggcggatggattgaatgtaaggtgaactccaaactcccagcgggtattctttactgacgtggacggtatggtgacataggctgttccactatcttctgccggatcattcagatggactccttctttagaattgatagtgaatttatctgtttctccttcccaagaaagttcggaagtggccgtatcttctccttctgaatcttcttcatcatcggcaggaagtgaacaattgtagaatatagaaatgaacagacctaaaagtgtaaacactttgtaaattctcatacggtttaattcttagatgataattaatgtttgaaccgtatttgtttgtgtataacgcagaggcaattgcggcttaaattctattttgtgaatgcaaaggtatataaaaagtccggtttcaaggacgaaaccggacttttctttcttaaatcaccttttatgatttagagattctttactttaatcagatattctgcgatctgcactgcgttcagtgctgcacctttcttgatttggtcacctacaatccagaaagtcaatccgttttcattcgtcaggtctttgcggatgcgtcccacataaaccggatctttcccagccaggaatagcggcatcgggtactctttttccgcaggattatcctgaagcaccagtccgtctcccttagcgaatgcttcgcgggcttcttcgatagaaatagggcgttcggtttctacccagatactttcagagtgagcacgtagtgcaggaacacgtacgcaagtcgcgctgactttaatatctgaatgcatgattttacgtgtttcgttatacatcttcatctcttctttcgtataaccgttttctgtgaacacgtcgatctgcggtatgaggttgaaagccaattgatatacaaacttttctactgtaacaggttcatttgccaatacttggcgatattgctcgtacaattcgtccatagcggcagcaccggcaccgctggctgcctgataggtagatacgtgcacggtttttatatgagaaagctgttcgatggctttcagtgcaactaccatctggatagtcgtacaattcgggttggcaataacgccacgcggacgttccaatgcgtcttcggcatttacctcaggcactaccaaaggtacatccgcatccatacggaaagcgctggagttgtcgatcatcacagcaccatacttggtgattgttttttcgaactctttggatgttcctgcaccggcagaggtgaaagcaatgtctatccctttaaagtcatcgttgtgttgtaagagtttcacctcgatctgtttgccgcggaaagtataagttgttccggcactacgtttagaaccgaacaaaactaactcgtccaacgggaagtttctctcatcgagcacgcgcaggaattcctgtcccacggctccgcttacgccaacaatagctactttcatctttttcttttgttaaatgtgaatactgtatttccctttctatactatctaataggaaagattagactgcaaaattataacaatttgccatataaaccgcatttttgtcgaaaaaatattatttgaatctatctacttatgaattggaggtatgcgaacttttttgttcctttgtagttgaattcctaaaaccacagtctatgaacctgtttgatctcaatttaacgttgccaatttctgatccgacttgggtgttttttttggtactgattattattctttttgctccgatgattctcggacggcttcatatacctcatattataggcatgattctggcgggagtactgattggagagcatggctttcatgtgctcgaccgtgatagcagttttgaactgttcggtaaagtcgggctttattatattatgtttctcgccggtcttgagatggatatggaggattttaagaagaaccggacgaaaagctttgtgtttggctggctcacctttctgattcctatgggattgggtatatggagcagtatgagtctgttgggctatggttttctcactgccgtactgttggcaagtatgtacgcttcccatacgttgattgcttatcctattatcagtcgttacggattgtcacgtctgcgcagtgtcaatataactattggcggtactgctgttaccgttacccttgctttgattattctagctgttgtaggtggaatgtttaagggaactgtggatggttggttttgggcgtttctggttgctaaagtcgcttttctcggatttttgattgttttcttcttcccccgtatcggtcgctggttcttccgaaagtatgacgatagcgtgatgcagtttgtgtttgtgttggcaatggtctttctgggtggtggattaatggaatttgtcggaatggagggtatcttgggagcctttcttgccggattggtcttaaatcggctgattcctcacgtttctccgttgatgaaccgtttggagtttgtaggaaatgcgttgtttataccttatttcctgattggtgtcggaatgattattgatgtaagaagtctgttcaccggtggggaagcgttgaaggtggcaattgtaatgacagtggtagctactttcagcaagtggctggcagcatgggctacgcagaagatttatcggatgcagccgaatgaacggagtatgatattcggtctgagtaatgcacaggcagcagccacattggcggcagtattgatcggacacgaaatcattatggagaatggagaacgtttgctgaatgatgatgtgctgaacggtaccgtagtgatgattctctttacttgtgtcatcagttctttggtgacggagcgttctgcccgccgttttgctttagacgaaaatgtgcagtcggaaaaagaaggggtgaaaaataataatgaacagatattgattccggttgccaacccggatacgattgaagacctcatcaatttggcattggtcataaaggatgccaaacagaaaaatgggttgatagcattgaatgtaatcaatgataataatagctcggaaaagaaagaattacagggaaaacgtaatctggaaaaagctgcgatgattgctgcggctgccgatgttcctgtcactatggtcagtcgttatgatctgaatattgcttcgggaattatacatacgataaaagagtatgaggctacggatgtggtgatcggtttgcaccggaaagctaatatcgtggattcttttttcgggcatttggcggaaagtctgctgaaaggtacgcatcgcgaggtgatgatcgcaaaattcctgatgccggtgaataccttacgccggattaatattgccgttcctccaaaggcggaatatgagaccggctttgcaaagtgggtggagcatttctgccgtatgggaagcattctaggatgtcgtgtacatttcttctcgaatgaacggacattgatgaggcttcagcaacttgtgaaaaagaaatatgtaggtactccgaccgagttttctacattagatgagtgggatgatcttttgctattaacgggacaggttaactatgaccatttgttggttgttatttccgcccgtcggggatctatctcttatgatccttcttttgatcgtttgccgtcacagttgggcaaatattttgcaaataatagtttgattattttatatcccgaccaattcggtgaaccgcaagagatcgtgtctttctccgatcctcgcgggcataatgagtctcagcattatgagaaggtcggtaaatggttctataaatggttcaagaaaagctgatggaaagagacgactggcaacaaagaacggaacttcttttgggagaagagaagatgaatcgtatccggaactctcacatattggtcgtggggctgggtggagtgggagcttatgcggcagaaatgatttgtcgtgcaggagtcggacgaatgacgattgtagatgccgatacggtgcagccgactaacctgaaccgtcagttacctgcattgcattccactttggggatgtcgaaggcggaagtgctggctacccggtataaagatataaaccccgatatcgacctgaccgttttacctgtttatctgaaagatgaaaatataccggagctattggatgccggtaaatatgatttcatagtggacgctatcgatacaatcagtccgaagtgtttcttgatttatgaagcgatgaaacggcggatcaggattgtttccagtatgggagcaggggcaaaaagtgacattacgcaggtacggtttgccgatctttgggatacttatcattgcggattgagcaaagcggtgcggaaacggttacagaaaatggggatgaaacgtacactcccggttgtgttcagtaccgaacaggctgatgcaaaggcggtgttgctcacagatgacgaacagaacaagaaatcgacttgcggaacggtcagttatatgcctgctgtgtttggatgttatctggcggaatatgtcattaaaagattataaaagctattatgataaaattagaaggaataacgaagaacttcggttcattacaagtactgaaaggcattgatcttgaaatcaataagagtgaggttgtcagcattgtaggtcctagtggagcgggtaagacaacgctgctgcaaattatgggtactttagatgaaccggatactggtctggtacaaatcgacggaactgtggtcagccggatgaaggagaaagagttgtctgcattccgtaacaagaatattggttttgttttccagttccaccaacttcttccggagtttacggcattagagaatgtgatgattcctgcattcattgcaggggtatccttaaaggaggcaaacgatcgtgccatgaagattctggattttatggggctggcagaccgtgcctcccataaaccgaatgaattgtcgggaggagagaaacaacgggtggctgtggcgagagccttaatcaacgatcctgccgtaattctggcggacgagccttccggaagtctagatactcaaaataaagaagatttacaccgtctgttctttgatttgcgagatcggctgggtcagactttcgtgattgttacccatgatgagggacttgctaaaataactgaccgaacggttcatatggtagatggtatgattaaaaaagattaataaaggaacctaacttctagaaatgtataccaaaaaggtggaatcttgcaaggattctatcttttagttatatatttatagtcgcttctctacagaagtctgtgaagatgatagtagagtgtttgttttgtttgtgtgtgatgcattcttgtctggtgtgataggaatgcatctttcttttaattaatcataacagatatagggctctatccgttcaaggtcggcagaagtgaattcttcatagagtgataattgtttcaaactctttaatcttcctttctttttccggtgctctacaatcactcttgcttgataataattgatatacggatgatgcatcattcgttccacgcttgccttgttcaaattgatacggcgtatctcatcgggggcgattgaaaaccatggacgaagcttttctacctttagatgaatctcttgcaattgttctattctataaaaagctcccagcttcttacggtaatttacaatcatccgggcgatactactcccgattcccggaatctttttaagttcggttgtgtctgcttggttgaggctgataacagtaccgggctgatacttgaataccgtgtcttttcgtatgttttgtatggtgagcagtcgcactgtatctttggagcggagcttttctgcaatccggatgtagggaagaagagtctgatattgttcttccttcagcccatatattttccggaaatcctccggatgtcggaatatcccctgtcttcttcgatagttcagaatattctttgccatccatgccggtaggccgagagagaggaaagtcatggaatcagcagtgttcggatcgaatgcgaaaggagtgatttctttccttacggatggtcgggaagtcggattcttcgactttttgtgagattccacttcttcgagagaagcgatgaactcattatattctttctgaaatatctcttgtttcaaggtgtctacctctttcggacgattgaaaagagggaagagattggggagtaagagtactcctaaaataaggacgacaaggacgataatgccttgtcgttcggttttagtgaaataaaaaaagtctttccacattatagtttgatgaatcctagctcattgatgaatattaatgtaatagcgattggtgcgatatattttaatataaagacaatcagccgatatacgggaattctaagtgtgccgttgttggtaatttccgaccataccactttcttgtcgagataccatccggtaaagagagaaatgcacagtccgccgaggggaagcatgagtttggctgttacaaagtcgaataggtcgaacatccccaagccaaaaacagtgaattcttttgttactcccaatgataatgaacagaatactccgaagaatatgcatccgccggtcacaagttttgccgctttcccacgggagaatttgaattcttcatgcagataggctgtcaccacttcgtgtagggaaatagtggaagtcaatgctgccattgccagcaatgcgtagaacattacagagaatatatatgccaatataggtaccccgctaaatgcttgttggaatacgttcggtagcgtaatgaaaataaggctgggaccggaccccggttggattccgacggaaaaggcggctgggaaaatgataaatccggctagtattgccacgaaggtatcgataatacccacgctgaaagccgttttagtcaggtttgtctctttactgaagtaggaagcgtatgtacaaaggcaacccattcccagactaagggaaaagaaggcttgtcccatagcactcagaaatacattgccgtccactttgctgaagtccggtttcaaaagaaactcgataccggcaccggcgcccggcaatgaaacagagcagcctaccaatataagaataatgatgaaaagtgtgggcatcattatcttggaagacttttcaatccctttttccaccccttttacaatgatgaagtgggtaattaacaagaaggaaaccaaccagaccaccggtcgccagggattgctggaaaactgttggaaagaagtgatgaactcttcgggagtttttcccgcaaaaccatttgaagctgcttcaaatatatattcaagtgtccatccggctactaccgaataataactgaggatcagaaaacctgccaatacacccatacggcctacccaacgccaatgtgtaccgggtgctaatttctgataagctcctgctgtgttggctcttgaacgacggcctatcaggaattcggcaatcataatgggaagccccaaaagcaagacacagcctaagtagatcaatataaaggcggctcccccatgatttcctgtctcgtaagggaatctccatatattccccagccctactgccgagcctgcagaggcaagtataacgcctaatttactaccgaagttcgctctatcattttttgtcataaatcttgttttatcttacaaatcgttataaaatatacgtattaaagtgcaaatatagaaaatgatacttatatttgtgctgaaactgtaattttatttagatatgctatcttatattaagaaatatcctatctcgctttttattattctgacagtgatttacctgtcattctttaaaccgcctaagacggatttgaatgaaatacctaacttggacaaattagtgcatatttgtatgtatttcggtatgtcggggatgttatggctggagttcttgcgtgcacatcgtagggataatactccgatgtggcacgcgtggttaggtgcatttctctgtcccgtcctctttagtggctcggtggaactgatgcaagaatactgtaccacctatcgtggaggagactggctggactttgcagccaatagtacaggagctattctggccagcctggtagcctattatggggtaaggccgagaatgaaaaataggaaatgaagaattttacaaatgttctaccgttgaacttagtttgattccgttggaacctttgatgagaatcgtatagcctttgggcttttgggtttccagttccttgataacttcctgtacgtttgcgtaggtcttgaagttatgctgtgttgctgcaaactgttctccaacgagccatacttgctcgaagttactatctttaatgtaattcacaattttctggtgttcgatgttgctttcagcacctagttcgcgcatatctcccagtagtagcattttgtggggaactgccatattgcggaagttctgcagggcagccatcatactagtcggattggcattgtatgcatcgataatcaacgtattgtctgttgtctgtttgagctgcgaacggttgttttgtggagtatatccggctagggcctcatcgatcttttgcatttctactccaaaaaaatgtccgatagttatggcggctaaagcattggggaaattatattctccgattagctgtgtctgtatccggtggatttcgttcccgtttcccgctttccattcgaaagccagataaggtgaattatcggtgatacgtccattgatatacaggccatcttgggttccgtaataaatccggtctagctcttcggacatattcatcagatagggattatcgtggtggatgaagatggtagaattttctttcttgcgaaggaaatcgtatagctctcctttggttttgatgactccttcaaacgagccgaagccttccagatgggctttgcccacattcgttatgatgccgtaatcaggttctgctatttcgcagagaaacttgatttctcccggatgattggctcccatctcaatcacagcgaggtcgtgctccggttttagacggagcagagtagtcggcacgccgatatgattgttcagatttcctagcgtatagagtacgttatgtgcctgactaagtacggtagatatcaattcctttgtagtcgtttttccgtttgttccggtaataccgattactttggtaccgagttggcgacgatggtagttggcaagttgctgcattgtttgcagacaattgtccacaagtatatagcgttggtcgccttctacggcatattcgccttcatcaataattgcatacgcgcatccggagttcaatgcaaacttggcaaatgcattaccgttgaacgactcacctttcaaggcgataaacaaagaaccgtccgggcagttccggctatcagtagttactgattggcattccaggaaaatctggtaaagagcagaaagtttcataacctgatcttttatttaaaaacgctgcaaagataggttattctttcggattatttctctacatttgcaacaatctaaaaggaatacgatcaatgataaagccaatgtctcctatttatataaatgtaaaagggcggttgcttgacctcgctacgccgcaagtaatggggattctgaatgtaactcccgattctttttattccggtagccggatgcagactgaagaagaaatagccgcccgtgcccggcagattctggatgagggcgcttctattattgatataggcgcttattcttcgcgtccgaatgccgaacatatctctgctgaagaagagatgcgccgacttcgtaccgggttggaaatcctgaaccggaatcatccggaggctatcatttccgtagatacatttcgggcggaggtggcagaacgctgtgtgaaggaatacggagttgctattatcaatgatatagcagccggtgagatggatgacaggatgtttgcaacagtagccgaattgggagtaccttatattatgatgcatatgcagggaactccgcaaagtatgcagaaagaacctcattatgagaatctgataaaggaagttttcttgtattttgcccgtaaagtgcagcaacttcgtgatttgggagtgaaggatatcatcctcgatccgggattcgggttcggtaagacactggagcataattatgaactgatggcacatctggaggagttccacatctttgaacttccggtactagtgggagtttcccgcaaatctatgatttataaactgttaggaggaactccgcaagactcattgaacgggacaaccatattggatactgtggcgttaatgaaaggagtgcatattttgcgtgtacatgatgtgcgtgaagctgtggaaacagttcggatcgttgaaaaaataaaaaaggagagccatgttttttgatattggaataaaagattttatagatgtcctgctggtcgcatttctgttgtattacacgtacaaactgatgaaagcttccggttccattaaggtttttaccggtattcttgtttttatcttgatttggctggtggtgacccaggtgttggagatgaaactgcttggctctatctttgacacgttgatgagtgtcggtgtgatagctttgattgttctttttcaggatgagatacgtcgcttcttgttgactttaggctctcatcgccatgtcagtgcattgtcacggttgtttaacggctcgaagaaggaatcgttgaagcatgatgatattatgcctgttgtaatggcttgtctgagtatgggcaaacagaaagtcggcgcattgattgtgattgagcataatactcctttagatgagatagtccgtacaggggaggtgattgatgcggcaatcaaccaacggctgattgaaaatatcttcttcaagaatagtccattgcatgacggggcgatggttatcagtaaaaagcgtattgaagcggcgggatgtattctgccggtttcccatgatttgaatattccgaaagaacttggtttgcgtcaccgtgcggctatgggaatctcccagcagtcggatgcccatgctatcattgtttccgaagagaccggagctatctccgtagcttatcgcggacagttctatcttcgcttgaatgcggaggaactggaaagtctgttgacgaaagaaaattgaatttgattgctagtaggctgctagtaggctatttttgctttatttccacccctttttgaatgataattatgccttttcttttaggtgaatcgcctacctttgccgtatactattaaaattctatttttgaataaaccatgaaaaacagattaattgcgttactggtactttttacagttacttttttcgttagtagtgcacaggcacaaactactgcccgtaagtttgaggcaggcaagaacacttttctgctggacggaaaaccatttgtagtgaaggctgccgagttgcattatacccgtatcccgcaagcttattgggaacaccgtatagagatgtgcaaagcgttgggaatgaatacgatttgtatttatattttctggaatatccatgaacaggaagaaggtaaattcgactttaccgggcagaatgacattgctgctttctgtcgtgcggcacagaaacatggtatgtatgtcattgtccgtcccggtccgtatgtctgtgcggaatgggagatgggagggcttccctggtggttgctgaagaagagggatatagctttgcgtacactcgatccttattatatggaacgggtcggtatctttatgaaagaagtgggcaagcagctggctccgttgcaggtaaataaaggtggaaatatcataatggttcaggtagagaatgaatatggttcttatggaatcaacaaaccatatgtatctgccgtccgtgatttagtgcgtgagtctggctttaccgatgtgcctttgttccaatgtgactggagcagtaacttcacgaataatgcactcgacgatttgatctggactgtgaatttcggtacgggagccaatatcgaccagcaatttaagaaattgaaagagcttcgccccgaaactccgttgatgtgtagtgaattttggagcggatggttcgaccattggggacggaaacatgagacacgtcctgcgaaagatatggtgcagggcattaaggatatgctcgaccggaacatctctttcagtctgtatatgactcacggaggaacgactttcggacattggggaggtgcgaacaacccggcttattccgccatgtgcagctcatacgattatgatgctcctatcagtgaggcgggatggactaccgagaagtatttcttgcttcgtgatttattgaagaactatcttcctgcaggtgctgcattgccggaagttcctgccgctctgcccgtaatagagattcctgaattccattttacgaaagtggctccgctcttctctaatttgccggaagcgaaacattcaacggatatccaaccgatggaacagtttaatcagggatggggaacgattctgtatcgtacaaccttgccggaggctgttgctgtcggtacggtcctcaagattacggaggtacatgactgggcgcaggtttatgccgatggtaagctgttggcgcgtctggatcgtcgtaagggagagttcacaacaacgctgcctatattaaagaaaggtacgcaactggatattctcatagaagcgatggggcgtgtcaactttgacaaatccattcacgaccgcaaaggaatcacagaaaaggtggaacttatttcaggaaatcagacaaaggaattgaaaaactggacagtgtataacttcccggtagattattcctttattaaagataagaaatataatgaaaccaaacagttgccaactatgccagcctattataaaggtacttttaaattggacaaagtaggagatactttcctggatatgagtacatggggtaaaggtatggtttgggtgaacggtcatgcgatgggacgtttttgggaaatcggtccgcaacaaacactctttatgccgggttgctggctgaaaaaaggagagaatgagattctcgtccttgatttgaaaggtcctgccaaagcttctatcaagggtttgaagaagccaattctcgatgtgcttcgtgaaaaagcacccgaaacacaccgtaaggatggcgagaagctgaaacttacaggtgagaaagcagtatgcgaaggagctttcactccaggtaacggctggcaggaagtacgatttgatactccggtgaaaggacgctatttctgtctggaagcactttctccgcaagcgaacgataatatcgcagcggtggcggagtttgatgtattgggagccgacggtaaacctgtgccccgcgagcactggaagatccgttatgccgacagtgaggaaacacgtagcggtaaccgtacggccgacaagatattcgacctgcaggagtcgactttctggatgacagtagacaatgttgcctatcctcatcatttagtgatcgacttgagtaaagtggaaacggtaaccggtttccgctatctgccccgtgccgaaaagaactatccgggtatgattcgtgaatatcgtgtatatgtaagacctgtggatttcaactattagagaatatcaaatgaatatgaagaaatatatcaccctcttggcactccttttcataggagtgctgaccggctacagccagcaatccgcttatctgtttgtttattttacaggcaatcgtatgagtgaagaagccgtccggatggctgtcagccttgacggatacaattataaagccttgaacgggaatcagccggtacttgattcccgtgtgattagttcaacaggtggagtacgtgatcctcacatccttcgttctgaagatggaaagactttctatatggtcgttaccgatatggtatgtggaaacggatgggattctaaccgtgccatggtgttgttgaaatcgaaggacttggttcactggacttctaatgttgtaaacatccaaaagaagtatcccaatcaagagaatctgaaacgggtatgggcaccgcagacggtttatgataaagaagccgggaaatatatgatatattggtcaatgaaacatggcaacggtgcggatatcatttattatgcgtatgccaacaaggattttacggatatagaaggtgaaccgaaacctctgtttctaccggcaaacggaaagtcatgtatcgacggggatattatttataaaaacggactttaccatctgttctataaaacggaaggcaatggaaatggaatcaaaaaggcgaccactccttctttgacttccggacagtggaaggaatcggatgattataaacaacagaccaaagaagccgtagaaggttcgggtattttccctttgatagggacggacaaatatatcctgatgtacgatgtatatatgaaaggtaaataccagtttacggaaagtatcgacctcgaaaactttaaagtaatagaccatgctgtgagtatggacttccatccgcgtcacggtactgtgatacccattaccggaaaagagctgaaacgcttgttcaaagcgtatggtaagccggaaggtctttaagcttcggtaggttgataatcttaatgaaatgtatataccatgagaaaattattcctgtttttagttgtcttgtttttgtcatttcagcaagtcactttagctgcaatcaaagaaatgacgagtacccccgattcggtttatctcttttcctttgctacttccgaagacgacggacgtagcgggcttcgttttgcctggagcatggataaggaaaactggtttgaagtcggccggaactacggatatctccggtgtgattatagccgttggggatcacagaagaaaatgctcaacccttatttgaaacagtcgcccgctggcgaatgggtttgtacctggaaattgaatgatcgtgatggatacggtcaggccactt

SEQ ID NO: 11832 - DNA, 28143 bp, Unknown
  gut microbiota DNA sequence
gccttaaattttattattttaggaatatccctaattacgtaattacgcaaggaaagaaatcagaacaccggcagctacggcagaaccaattactccggaaatgttacttgccatacaatactgcaatacatgatttttcgggtcatatttcaaagcaatctcgttagcaacacggcttgccataggcacagcacttaatccggtagcaccgataagcggattgattttcttcttggagaagagatttaccaatttcacaaacagaataccacctgtaatagaaagggcaaatgccaagaatccgcctatcacgataccgatagtcgtccagttcaagaaagcttctgtcgtcatagtagcaccaacggacaatcctaagaaaatagtagcagcattcataatgctgttagaagctgcatcaaacaaacggaaagtatttgttccgatctctttcaccagattaccgaacatcaacataccaatcaaaggtactgcgctaggtacgaaaagagcgacaacagtagtcactacaatcgggaagataatcttcaatacacgcaaatttttgatttctgtttttgacggatacttcttttcttgttctttcatgttgatacttaactctttctttgaacaaagcagtttcactaccagcggaataatcaccggaactaacgccatatacgaataagcggcaatagcaatcggtcccagcaaatgcggagccaacttaatggttgtaaaaatggctgtcggaccgtccgcaccaccaatgatacccaaagaagctgcttcttttggagtaaatcccatcaaaatagccaccagcaacacggtaaagataccaagctgcgcagcagcaccaaatatggaaagacgtaaattacgtaacatcggtccaaaatctgtcaacgcaccgacacccataaagatgattggaggcaggaaaccggtttttatcaacatatagtaaatgaagttcattaatcccaattcgtgggcaatgtcatgcaacggcatttcccagatatttttcaacactccgtttaccatcaccataccattctcatctgcctgaataactcccatatctccaccgggaaagttggcaagcaacaccccgaaagcaatgggaacaagcagcaacggttcgtactgtttcttgataccgagatagagcagaacaaacgcgatggcatacattatcaggaactgcggttcggcaatgatattgctgaacgcagtcatctcgtataaattctcaaatatctcgttcattatcctatcttcattaatacatcatcttctgaaacagcatctcccggagtaacgcaaatggcagtaaccgtaccgccaaactctgcacgaatggcattgtaagtcttcatggcttccacataacaaatgacatcaccttctttcaccgtgtcgcctacttgcaaagcagtctcctgcgcattcttcaccaagaaaaatttgccttctagcggtgaaagcacttccttgccctctccagccggagcagcggtagcggctgatgcaacaggaagttcggtatcaccataagccactgtcacacgataggcctgtccgtcaacttgcacagtcagtgtcttcggttttgcatcttcctccggagatttatctttttctgcacgacgcttagcaacatcttccaagaagtcttcttttgcttttccactcttgtaagcctcatactgagccggatgcatggcatattcgaagagctcttcgtcatcctgccctacgtcccatttattctccttcatcaacttacggtatttatcgagactgtccggatagttatcctgcggattcccgtcaaagaatttacggccttcacgctccgccttttcaataatttcagaagcgagtttacccggcaaacgtccggctttacccaaaatcatatcccaaatatcgtcggcaatcattccccagcgctctttgcctttctccatcgccatcacgttcatcatggccagattcttcacatattgactgaatggtgtaaccaacggaggataaccgacacgaggccatacgtaagccacttcatcaaacaacttaataagaagctgatcctgtgtcataaacggcaaattacgttttgccttgtatttattgatagattcaagattggattcaaggtcagccatcaaactccccatcataccgcccggcaatccgggagcaatcaataaagagttcatcagacggtttttcgggctgatgtacaatccgagaaaatcgtccataaattcctgaattaatgcacgcaccttcatataagcttccatattgatttcaggaacctgatatccggcgtctttcaacatagcctgtacactcagcaaatcagcatgacctgtaccccatgacaatggttccatgcctacgtcgatataatcacatcctgcctcgcatacttcaagaatacttgccatattaaatccgggaccggcatgactgtgatattgcacaggaatatcgggatgagcagccttgatattcgctacaattttacccaaagaaacagggcgtccaatacctgccatatctttgatgcagatttcatcagctcccagtttgataagctccaacgccatattggtgtagtactccacagtatgaataggcgaatgagtgatacaaagcgaacattgcgaaatcatcccagcttcctttgcatacgtaatggaaggggcaatattgcggacatcattcaatccgcagaatgtacgggtaatatctgtgccttgtgctttctttactttatagaacagtttgcggacatctgccggaacaggactcatacggagtccgttcagcgcacggtcgagcatatgagtttgaataccggcttcgtggaacggcttagtccattcacgtacagccttattcggattctcaccaaacaataaattcacctgttcaaaacctccgccattggtttctacgcgggcaaaacagcccatatcaacaatagcaggagctacctttacgagttgatctacacgaggtacatattttccggcagattgccacatatctcggaaaaccaaactaaactttacttctcttttcatgtctttcaatgatataactttttatagatttataatttttccactttagtgacttttcccttacctaatgtcaccacattcacagcagcactgatagcggccagaatatttcccggaataggtgcaggacctttctgtgtttccttcttcgcaggaagcacttcttcaggagcatatttgttgaccagagtaattaaaaatttacctaaataaatcacaatcagcagaataacaaatactgtagccattccgactaccatcagcaggatcgctgtttcaatattttccatataattaaattattagttatttcagtcgtttattcaaaaagcgttcgaaaataccaaatatttattataaaattaattaagggagggataataaagtataaaaccataaagtttcttgctcgcagacatataaaacaaatgtgaaagaaagctcaaaggaacgttctttcacactctccaaaatttccaaagtatagaatatactttaaaattcgcttgtaaaatggaatttaatatgtttgaaatccatttgagccatctgaagtacataaccggaatctgccaggaatacatcacgtccttccctatcctttgccatatactgatatttacgtttcttgaaagcttccaattctgccgggtcatcactttctacccaacaagccttataaagactcaccggctcccatcggcaagacgcgttgtactcattcaacagacgatattggataacctcaaactgcaactgccccaccgtaccgataattttacgaccgttgaattgattgacaaacaactgagccacaccttcgtccatcaactgatcaattcctttagccagttgcttctgcttcatcggatcggcattctcaatatacttgaacatttccggcgagaaactcggcaagccgcggaagtgaagcatttcaccttccgtcagcgtatcgccaatcttgaaagtaccattatccggcaaaccgataatatctccggcgtatgcctcgtcaatcgttgtcttacgctgtgccataaactgggtaggcgatgaaaaacgcattgtttttccatgacgtacatgctgataaggggcatttcgtacaaattttccggaacagatcttacaaaatgcaacacaagaacggtgattcgggtcgatattagcggtaatcttaaagataaatccggtgaatttaggttcttccggtttcacttctctttcttcagcctgcacaggacgaggactcggagctatttccacgaaacagttcagcaactcctgaacaccgaagttattcaaagccgatccaaagaataccggtgcacagtcacccgctaaataagattcaacatcaaactccggataaaccccttcaatcagttccagatcaccacgcagcttatccgccagcgttttgccaatctgcttatccaactcttccgtatgaatatcaacggcaaccttttccgtcaccatctgtttagacggctgatacaaatccagtttctgttcataaatattatatacccccttaaaacgaggtccctgttcaatcggccatgacaagggacgaacctgaatcatcaactcctcttccaattcatccagcaaatcgaacgggtcttttccctcacggtccatcttattaacaaaaataattaccggagtctttcgcatacggcaaacttccatcaacttgcgcgtctgtgtttccacaccttttgcaccgtccactacaataatcacactatccactgcagtcaacgtacggtatgtatcttcggcaaaatcctggtgtccgggagtatcgaggatattaatcttgtagtcccgataatcaaactccatcacggaagtcgtcaccgaaataccacgttgcttctcaatctccatccagtcggacgtagccgttttcttaatcttattactctttaccgcacccgctacctgaatctgtcctccaaaaagcaataatttctccgtcaaagatgtcttacccgcatccggatgcgcaataatggcgaacgttcgccgtctcaaaatttctgtattatctgccatatttattcatcattcttcattttaccaatgcatcgttcaagactctcttcccaatgaggaatctcgatgccaaacgttgtttttatctttgtcttgtccaatacggaataagcgggacggtttgcctttgccggatattccgcagtgtgcaaaggtttcactttacaagaagttattcccgccaaacgatgaatagctaccgtaaagtcataccaggaacatacgccttcattgctgaaatgataaataccacgaactatccccttattgataattgtgtaaatagcccgcgccagatcattggcataagtaggagttcctatctggtcaaaaacaactcccaaaccatcccgttcctttccgagacgaatcatcgttttcacgaaattatttccataaatggaataaagccatgcggtacggataactaccgctttctcacaatggtccatcacttcctgttcaccttccagcttggtagaaccgtaaattgagtccggacaaggcttgcattcttccgcataaggagtatgagcagtcccatcaaagacatagtccgtagacacttgaatcatagcagcattattggcttgcgcggcacgtgccagaatgcccggagctacactattaagtttatgagccaattcccggttatcttccgccttgtctactgccgtataagctgcacaatttacaatcacatcaatctgtttttcagaaatatatgaccaaacggcttctttatcacatatatcaagttcctgaacatccgtaaaataatacaaatgttgcgggttctctttcgcaagtacctgcatctcattgccaagctgaccgttggcacccgttactaaaattctcatttattcgtccaattttaattcacctttgcggtctttatcataatagttcgccaacatagacaagaaactagtaatagcttccactgcttttacagtgccttcgctaatcgtttttttctgaagacgaagcaaaaacacaccatacaatgcctcaaagcaagtttccaattcgggctcttctttcttaccgttcttatttcgcaattctacgataaatggtaatgccttaaaatatgcggcactataaaaaggaaatttaggagaagaagtcaatgcattatgcaattcagtcaaattgataattacatttttattaatctgcagatgtcctttttcacgaacaccttcttcacccatcatcgttatcagatttccataccactctctcatggcaggccgttggtcttccggatagcgggcaatcacattcgcttcgatttcctccggttcacaatgattggcgcggaccagatcttcctcctgccacatatatataaggtattcggcaatattcttttctttcagttgttgtgctatctgattcataagctatttcttaataaagtgactctcccagcaatgtataaaccagtccggctacagacgccagcatcacaatactgccaataacccggtttagtatccagataccgcgcaaattgaattttgtacgtaccttattcacaaaataagtgattccgagccaccacgtcaaagcccccatagctatggcaaaatatcccgtaatttcttcaaacaccaatacacccggctgcacaaatgcaaaacgggcaaaaagtccgataaacaggaatataattaatgggttggaaagtgttacaaaaaaagcggtaatgaaattatgaaaataggaacctttattcgacgaagccggacgaatggattgtaccggattactccgaaaggtatatataccaaaaaggagtagcataatactccccaacagctgcaaatagaaaatattcttattgatataatcaaatacaaaactcatgccataaccggtaagcaaagcgtatgctatatcactcaaggaagctcccagccctgttacaaagccataccagcgtcccttattcaaggtcctttgaatacacagcacgcccaccggaccgagaggtgcggacacaacaacgccaataataaagcctttaactattatatcgaatattgtctctatctgaatcatgtcgcaaatatcgcacttttttatgatatggggataggatattaacgttttttccacacaagaatcaagaatatactaacaacaagtaaaactgcatatcggaaatatacatattaaatatacgattggaatttattcttcttttttttcctaccaccaatgaaattaattatctttgtggcgcaaaagagaagagtttcttctacagagacttcaattataaaatggcaaatcataaaatcatatatataagacatgattctttttttcagaaccccttccaagagcgtgattgccgtagagagcaaccatcagctcacccctgacgaaagtaataaactctgctggctttttggcgaagccgtgatggaaagtgaagaaaacctgaaaggctgtttcgttggtccgcgccgcgaaatgatcactccttggagtacaaacgctgtagaaatcacccaaaacatggggcttgaaggcatcagccgcatcgaggaatacttccctgttaaggacgaaaatgccgatcatgacccgatgctccaacgtatgtacaaaggactcgaccagaacgtattcacaaccaaccgtcagccggagccgatcatttacatcgaagatctcgaagtgtataacgaaaaagaaggtctggcactttctaaagaagaaatggactacctgaagaaagtagaaaacgatctcggccgtaagttaaccgactctgaagttttcggttttgcacaaatcaactccgagcactgccgccacaaaattttcggcggaacgttcatcatcgacggtgtagaacaggaatcttccctgttccagatgattaaaaaaaccacacaggaaaatccgaacaaaatcatctccgcttataaagataatgtagccttcgctgaaggtccggttgtggaacagtttgctccggcagatcactccaaacctgattatttccaaataaaggatatcaaaagcgttatctcactgaaagcggaaacacataatttcccgacaaccgtagaaccgttcaatggcgcatctaccggtacaggaggtgaaatccgcgaccgtatgggtggtggtaaaggctcttggccgattgcaggtactgctgtctacatgacttcttacccacgcacggaagagggacgcgaatgggaagaaatccttccggtacgcaaatggctataccagactcccgaacagattcttatcaaggcttccaatggtgcttccgactttggcaacaagttcggtcaaccgttaatctgcggttcggtgctgactttcgagcacacagagaataaggaagtttatggttacgacaaagtaatcatgcttgccggtggtataggctacggtacgcaacgcgactgtttgaagggagctcccgaagcaggaaataaagttgtggtcatcggtggtgataactatcgcatcggactgggtggcggttctgtttcttcagtcgatacaggccgttacagtagcggtatcgaattgaatgcagtacaacgtgccaacgccgaaatgcaaaaacgtgccaataacgtagtacgcgctctttgcgaagaagacgtgaatccggtagtttctatccacgaccacggttcggccggacacgtcaactgcctgtccgaattggtagaagaatgcggtggattgatcgacatgagcaaattgcctatcggcgacaagacattatcagccaaagaaatcattgctaatgaaagtcaggaacgtatgggcctgctgataaaagaagaagcaatcgaacacgtacgtaagattgccgaacgtgaacgtgctccgatgtacgtagtcggtgaaacaaccggtgatcatcgtttcgctttccaacaagctgacggcgtgcgtccgttcgaccttgccgtagaacaaatgttcggttcttctcccaagacatacatggtagacaaaacagtggaacgtcattacgaaatgccgaaatatgaattgcctaaacttcatgaatatctgacgaatgtattgcagcttgaggctgtagcttgcaaagactggttgacgaataaggtagaccgttcggtaacaggcaaagtagctcgtcagcaatgtcagggtgaacttcagttgccgttgagcgactgtggtgtcgtagcactcgactaccgtggcgaaaaaggtatcgctacctctatcggacatgctccgcaggcagcattagccgatccggctgccggctctatcctttccgtatccgaagcgctgaccaatctggtttgggctccaatggcagaaggcatggacagcatttctctgtctgccaactggatgtggccttgccgctctcaagagggtgaggatgcccgtctttacacagctgttaaagcattaagcgatttctgctgtgcgctacagatcaatgttcctaccggaaaagactctctgtctatgacacagaagtatcctaacggtgagaaagttatttctccgggaacagtgattgtttctgcaggcggcgaagtttccgacgtaaagaaagttgtatctccggtattggttaacaatgaaaagactacactttatcatatcgacttcagcttcgatgaactgaaactgggtggttcggctttcgcccaatctctgggtaaagtaggcgatgatgtaccttgcgtacaggacgctgaatatttccgcgatgcattccttgccgtacaggaacttgtcaacaaaggactgattcttgcaggacacgatatatctgccggtggtttgattaccacattgctcgaaatgtgtttctctaacgtagaaggcggtatggaaatcagccttgacaatatgaaggaacaggatatcgttaagattctgtttgcagaaaatccgggtatcgttatccagatcagcgacaagcataagaatgaagtgaagaagattctggaagatgcaggtataggtttcgtgaaattgggtaaaccgactgacgaacgtcacattctggtatccaagaacgatgccacctaccagttcggcatcgattatatgcgtgatgtctggtattcttcctcttacctgctcgaccgcaaacagtctatgaacggttgcgccaagaaacgtttcgagaactacaagatgcaacctgtagaattcgcatttatgccggaattcaaaggtaagctttctcaatatggcattactccggaccgtcgtactccaagcggtatccgtgccgccatcatccgtgaaaagggtacaaatggcgaacgtgaaatggcttattcactctacttggcaggcttcgatgtgaaagacgttacaatgaccgaccttatcagtggacgtgaaacactggaagatgtaaacatgattgtttactgtggtggtttctccaactctgatgtgcttggttccgccaaaggatgggcgggtgcattcttattcaatcctaaagcaaaagaagcattggataaatattatgcacgtgaagacaccttatcattgggcgtttgtaacggttgtcagttaatgatggagctcaaccttatcaatcctgaactggagaaaaaaggcaagatgttgcacaacgattcacataaatttgagtcacgcttcctcggccttaccataccgacaaaccgcagtgtaatgttcggttctctaagtggtagcaaactaggtatttgggtggcccatggtgaaggaaagttctctttgccatacgatgaggataaatataatgtagtagcgaagtatagctatgatgaatatccggctaacccgaacggttccgactattctgtcgcagcattggctagtgcagacggccgtcacctggctatcatgcctcacttggaacgttctatcttcccgtggcaaaacggttgttatccgaccgatcgtaaaaacagcgatcaggtaactccatggatagaagcatttgtcaatgcccacaagtggattgagacaaaaatgaaataaacagtcctttaaaattttatgccacaaagagagtgtgtcagttctgatacactctcttttttctccttctgcttcccgctctaacttaattcctgttttctgcaacttaattctctgaaataagcaacatatacaaacagcaatagaacaactgatccgccagatatttgagatccacgttatctttatccaaaattttgttatatcgaaaattcttcctaattttgtcaaacttttcctcctctagaataagattcaataacccttaaaagtcctttcacatgaaaaaatggatttttctattattattgtttcctctaacctgtgtcgctcagacgtatcaatatcttggagtggaagatgggttaagtaatcggcgagtttactgcattcaaaaagacaaaatcggttatatgtggtttctcactcacgaaggaatcgaccgttataacggaaaagagttcaaacaatataaactgatggatggcgacatagaagtgaattctctgttaaatctcaactggctatacatcgaccaagaaggagtcttatgggaaatcggaaaaaaaggaaagatattccgatacgatgagcttcacgataccttcgaacttgtctataagctgccgatagaaaactttcgcgatttacctgctcctatcagctttgcatggcttgacgaaaacaaacaaatctggctatgcaatgaagaaacaatcttcctctacaacacagctaccggccagatcggtcacataaagaataaaataaaagaagaaatcacagatatcgaacaaatagataaatctcatttctttattggcacggaaaggggcgttcactatgccaaactggaaaacaacactttggaacttatcgactgtgacaaattggaaaatcaaaaagttcaagtcatcgatctctattttgatagaaaaatcgggaaactatttatcggaactttccaacggggaattttcgtttacgacatgagtatcaaatccgtcacacagccggaacgcaatttaaaagatatcagtatcacgcaattcaagcctctgaatgacaaagaattgctagtagccacagacggaggaggagttcataaaataaatactgaaaactacttactggagccttatatcatcacagactacaacagtaataatggcatgaacggcaacagtatcaatgacatttatgtagacgatgaagaacgtatctggctggcaaactaccctattgggattacaatacggaataaccgttaccccagctacaaatggattaagcattctataggcaacaaacaatctttaatcaacgaccaagtaaatgcagtcattgaggacagagatggagatttgtggttcgcaacaaacaatggtatcagcttcttcaattcaaagaccggccaatggagttcggtcctcagttcttttgaaaaaccgcaggcaaacaagagtcacatcttccttaccctctgcgaagtatctcccggcacaatctgggcaggaggatattcctccggagtataccaaatagacaagaagtctctacaaatcagctatttcatgccaccgctatatagcgaaggggtcatgcgaccggacaaatatattcgcgatatccgtatggactcacaaggatatatctggtcaggtggattctacaacttaaaacgtatcaacctgaaaacgcagaatgtacgactttatcaaggactgaactccattaccgccattactgagaaagatgccaatagtatgtggataggtagtgcaacaggactatatcttctggataaagaatccggaaaattcgagcatatcaaacttccggtggaatctacctatatctattctttatatcaagccaagaacggttcgttatatatcggaaccagtggttcgggattgttaatctacgactttgcccaaaagttattcactcattactactcggagaattgtgccctgatatccaataatatctataccatattatcagatgcggacaaagaattactgatgggtacggaaaacggactaacaagtttttatccgcaacagaagaagttttataactggactaaagatatgggattaatgactacgcatttcaatgcgctgtctggtgttttacgtaagaacaaccactttgtttttggtagttcggaaggggctgtcgaatttcataaagatatgaaattgcctagagattactcttccaaaatgattttcagtgatttcaaactcttttatcagactgtttatccgagagacaagcactctccgctaaaagaaagtatcaatgatatcaaaacattggaactaggatataatcagaatattttctctgtacaagtttcttccatcaactacgactacccttctaatattctatattcctggaagttagacggtttctatgaagaatggagcaaacccggagccgaaagtacgatacgctataccaatctcgcacccggagaatataccctaagggtacgtgcaatttctaatgaagacaaacgcgtcgttattgaagaaagaagcatcgatattattattgaccagccgttttggttaacattctgggcaatgttgttttatgcaggtatcctatttctcatagcttccgtcttattgcgtattataattttaagaaaacaacgtaaggtctctgatgaaaagatccatttctttatcaatacagcacatgatatccgtactccattgacactgatcaaagcacctttggaagaactccgtgaaaaagaagaactgagcaaagagggaatttctaatatgaatacagctctgcgtaatgtgaatgcgctattgcgccttacgactaatcttatcaatttcgaaagggcagatgtatattcttccgagctgtacatttcggaacatgagctaaatacgtttatgaacgaaatatatggagcattccagcaatatgccaatattaaacatattaacttcacctacgagagtaatttcagatacatgaatgtgtggttcgacaaggaaaagatggaatccatcctcaaaaacgtcatttcgaacgcattgaagtatacaccggaaaatggcagtgtacaaatctttgtttcagaagctgcggattcgtggagcgtggaagtcagcgatacgggaatcggaattcctgccaatgagcaaaagaaactgttcaaactgcatttccgtggcagtaacacgatcaactcaaaagtgacgggcagtggtatcggacttatgctagtctggaaattagtccggctgcataaaggaaagataaatttgtcaagtatcgaaaatcagggatcaatcatcaagataactttcccgaaagacagtaaacgttaccgcaaagcacacttgacaacgccaaacaaacagcgtccggaaacaaaaagcagcaacgacattccactcccggcacctgaaatttacgagaatacacaaaaagaagaaaaaaaagaaaagaaagaaaagagccaacgtattctgattgtggaagataatgatgaattacgcaattatctgtcacaaacattatccgaagaccacctcattcaagtatgttccaacggaaaagaagcattgaccgtcattcccgaatataagccagatctggttatctcggacattatgatgccggaaatgcgaggtgacgaactatgtcaggctatcaaaagcaatatcgaaacctcgcatatccccgttatcttattgaccgcactgaataatgagaaagatattctttccggactgcggatcggggcagatgaatatgtgttaaagccattcaatatcggtatattgaaagcaaccatctccaacttgttggctaatcgcgcacttctacgcaacaaatatgccagcctggattcggaggatgaagagaatgatgatgatgaagaatacatcaactactcccaggacatcgactggcagttcatagcagatgtcagaaagaatataaaagacaacattgacaaccctgcgctcacagtagatgtactcgccagcctgatgggcatgagccgtactagtttttataacaagttgaaagcgcttaccgaccagtcaccgggtgactacatccggctgattcgcctgaaacatgccataaagttattaaaagaaaatgtacataatataactgaaatatccgaaatgacaggattcaatgatgtcaagtatttccgtgaagtattcaagaaacactataacgtgagtcccagccaatactttaaggagaaaaaagaagacaacaaggaaggaggagaaaaagaagaatgaacatatatctcgaatcatttggaatcttttttaaaataggcgccttcaccatcggaggaggatacgcgatggtgccattgattgaaaatgaaatcgtaaccaaacggaaatggattgcacaggacgacttcatcgacctgctggccatctctcaatccgctcctggcattttggcagtcaacatatccatctttataggatacaaattgcgcggtatacggggaagtattgttacggcactgggaacgattctgccatctttcattatcatattgaccatcgccctgtttttccacaacttcaaagataatccgatagtggaacggatattcaaaggaatccgtccggcagtagtggcgcttatcgccgcacctacgtttactatggggcggtctgcaaaaatcaatcgttacaatctgtggattccggttgtatcggcactacttatctggctattgggcttctctcccatctggattatcatagctgcaggtgtaggaggcttcctttggggaaaggttaaagaagttgagagttgaaagttgagagttgagagtgagaggccagtactatgtactatttattatttgttctaaataaaaagagatgatatatattcagttgttttatacgtttttcaagatcggactcttcggtttcggaggaggatatgcaatgctttccatgattcaaggggaagtcgttacccgttatggatgggtaagttcgcaagaattcacagatattgtcgcgatcagccaaatgacaccgggacctatcggaattaacgccgctacttatgtgggattcacttctacaggcagtatctggggttctatcattgcaaccttcgccgtagtccttccctcctttatcttaatgctgactatcagcagattttttctgaaatatcagaaacatccagtagtggaatcaatcttcaacggactacggccagcagtcgtaggactgctggcctctgccgcattggtattaatgaatgtagagaactttggctcacctacaaaagatacctatacatttgttatcagtatcatcatcttcctgattgcttttatcggaacgagaaaatataaggccaatccgattctgatgattatcgcttgcggtattgcaggattgctgctctattaaagctttacctttttacttacggacttcgattcattatgaagacggtccaaagccgttaccacatagcgatgttttgtttttcccgtctcgtatggaagtctgtagaaaggattactggtgatagctacaatatgagaaggatcgtcaaggttcaccttctcttttccgctaaagcggtaaaccacataccgcaccgctttatccatttccgtttccgctttcggggcagtccagaaaagaacatagccgtcttctgtccacaccttcttcattttgcgtactttgcccggagccttattgtccataaaatcgaagacgggaatcaaagctggatatttatgatactcgctcactaaagcatcacggtatcggccttgattttcaacaacggctgaagcataccattgacaactgccgccaatcgtctgataagcacgttgtaaggccatttttcgcgggagctgattgatggaaggattctttggatcagcatgttggatcgtattcgataccgactgaccgataaataacggacggttctccgaatgcgtagcccaccatttcactaaagtctcatagtcggcagccttatgccctatttcccaataaatctgtggaatattataatcaatccatccttcacgcgcccaaagcaacacatcggcatacaggtcatcataattctgcaaaccattggtatcactgcccaacggatcactcttctgattacggtaaatgccgaaaggactgataccaaacttcacccacggctttacggcacggattgtctcatgaagctttttaatcagcacattgacattactacgacgccaatcggccttattcgtaaaaccaccgccataacgggcaaagctcgcatcatccggaaagtccattcctttcacgggataaggatagaaataatcgtccatatggatagcatccacatcataacgggacacgatatcggtcacgattttacaaatatagtcccgactttcaggaagtgccggatcgaaatacagctgatcgccatacgtaacaaaccattccggatgttgatgataaatatgttccggcgccaactgatttttcagcgaagtcttcacccggtaaggattgatccaggcatgaaactccatattccgtttccggcactcttcaatcataaattgcatcgggtcccacataggagaaggtatctgcccctgcgtccctgtcaggaaacggctccacggttcatgctgcgaagcatacaacgcatccgcttcgggacgcacctggaaaataatagcattgatacctgccccttgaagagaattcaattgatcaatcaacgtttgtttcagcttcccggtaggaatacctttgaactgcccgttgacagcttgtatccacgctccacgaaattcacgtttgggatatttattgccggatggcacttgtgccctcactcctaccaccagaagaagagcgaaaagtaaaagatagtttttcagcttcataatattcttaaatcgtaataatgtgacgcaaagataatacaaactcccgataaattcgctaactttgccgactaccataaaaaaggagtattttatgtcagaaaacaactatatttcgatcaaaggtgcacgagtcaacaaccttaaaaacatcgatgtagatataccccgcaacaaacttgttgtaatcaccggattatcgggttccggtaaatcttccctcgcttttgacactctctatgcagaggggcaacgccgctatgtggaaagcctgagcagctatgcccgtcagttcttgggacgaatgagcaaaccggaatgcgactttatcaaaggcatcccacccgccattgccatcgaacagaaagtgaacagccgcaacccacgctctacggtaggtacttcgaccgagatttacgaatatcttcgcttgctctattcacgcgtaggaaagacattcagtcccattagcggacaagaggtgaagaaacattcgacagaagatatcgtcaactgtatgcttacgtatccggaagggacgagatacaccgtattgacacccatccgtctgcgtgaggaccgcaccttgcaacaacaattggaaatagacctgaaacagggattcaaccgtatcgaagtgaacggtgagatgaaacgtatagatgaatatacccctgtggcaggtgacgaagtttatctgctggtagaccgcatgacagtaggcaatagcaaagactccatcagccgactgacagactctgccgaaacagcgatgtacgaaggcgacggaacttgtctgctacgtttttatccggcagacggaactacgaaactacatactttcagtactaaattcgaagcagacggcatcacttttgaagagccgaacgaccaaatgttctcattcaactctcctatcggtgcttgccccacctgcgaaggattcggaaaagtcatcggcattgacgagcatttggtcgtgcctgatcgctctttatcagtttatgagggagctatcgtatgctggcgcggtgagaaaatgggcgaatggaaagaagaactgattcataatgcggataagtttgattttccgattttcacaccttattatgagttgacggacgagcaacgccggatactctgggaaggtaaccaatactttcatggcattaatgatttcttcaaaatgctggaagaaaaccagtacaaaatacaatatcgggtaatgcttgcacgttatcgcggcaagacgctctgtccgcaatgtcacggcacacgcctgaagcccgaagccggttatgtacgggtaggcggaaagaacatttccgaattggtggatttgcccatcactgaactcaagcaattctttgataacttaaaacttagcgagcacgacagcaatgtggcacgacgaatccttgtcgaaatcaacagccgcatccgttttcttattgacgtagggttgggatatcttaccttgaatcgtctcagcaactctttatcgggaggagaaagccagcgcatcaacctggcaacttcattgggcagcagtctggtaggcagcctttatatcctcgacgagccaagtataggattacacagtcgtgacaccggccgtttgatttatgtactgcgccagctacaacagttaggcaatacggtagtggtcgtcgaacatgatgaagaaatcatccgtaccgcagactacattatcgacatcggtcctaatgccgggcgtttggggggcgaagtcgtttatcaaggggatatgaaagacctaaagaaaagaagcaacagccacacggtacgctacctcttgggagaagaagaaatcccagtccccgcacaccgccgtccgtggaataactacatcgagttgaaaggagcacgcgagaataacctgaaaggtgtaaacgtacgtttcccgctcaatgtgatgacggtagtcaccggagtttccggttccggtaagagtacgctcgtccgggatattttctatcgggcactgaaacgtgaattagatgaatgcagtgaccgtccgggagagttctcatctatcgggggcagtttgcgcgacctgcggaatgtagagtttgtagatcagaatccgatcggcaaatcctcccgttccaaccccgtgacttatatcaaggcttacgatgaaatccgcaagctctgggccgagcagccgctagccaaacaaatgggctacacagccggattcttcagtttcaatagtgaggggggccgttgcgaagagtgcaagggggatggaaccatcactgtggaaatgcaatttatggcagacttagtgttggaatgcgaatcctgtcacggaaaacgtttcaagtccgacacgctggaagtgaagttccatgataaaagtatctatgatgtattggagatgaccgtgaaccaagctattgagtttttcaacgaacacggacagaagaaaatagtaaagaagttacttccattacaggatgtcggattgggatatatcaaattgggacagtcctcatccactctttccggcggtgagaaccaacgcgtgaaactggctttctatctaagccaggaaaaagcggaccctaccctgtttatctttgacgaaccgactacaggcctacatttccatgatatccggaaactattggacgcctttgacgcactgattcgtcgcggacatagtattgtaatcatcgaacacaacatggatgtcatcaaatgtgctgattatgtaattgatctcggccctgagggcggtgataagggaggaaatatcgtagcagtagggactcccgaagaggtagccgcttgtggagccagctatacgggacagttcttgaaagaaaagctcagttaacgaattcggtctcctctacaataaattaaaagaaagatttgctgtcacctgtcacagattatcacttaataatctgattattaaatgataatgacgtgacaacagcaagtgacaacactgtgacggcaatcataccgtcacgcagagatacaatacccacacactttatgctttacaccacaatgctttacagtttccaacagcgagaactagtgtttcgaccgttggaactttagtttcaacggcttgaaactttagtttcccttgcttgaaaccagagtttcttcggcttgaaactaaagtttctactgcctgaaactaattgtattccagtttgaaaccaatagtgaaactatgctttatggaagcagtatgatagtaaaaagttactctcatgcctaccctcatactcgctatcatggttgaaacaccgatgggcaattggattcacacatacgatgataggtgacgaagattatctttaaaagtagaatccgaatcctaccttgatgccgaaacgtgagttgtcggagtcatcaaaacgccatttgtaataaacggcaggttcgatagtcaccgtccgggaaaggaaataagcatatccggcttcaatacctaccccccaatcgttattatgctcaccacctttcagacggatacgttcccaatcaagaccaccaccgatataaatgcctgtagtattgaaataacaacgaactccggtaccaagagtatacgtatctttaggctgcgaccagtctgctcccgcattgaccatcagcgcaaaaccatccgccaagaatgtaccgacctgtgctcccaagccaaacttcgcatcgtcattcttgctatacgaaaagtccaatcctgtgacggaaggattaagaatcatagtacctttttcaaattgagcctgtgcagtaaacgagactgccaataggcaaaaagctaaagctaatttcttcataaacttactttttaaagtgaatagattgttcgtcttttttacggcgttcacgcatttgctcctttttacgaagcaccagccaaaggagaaagacaatgacataagaacctgccactgtcaggattttctctgtctggctgacttccgtattacgtggcaacaaataagccgcagttactgatacataaataaggaatgctaacgcaactcctgttgatctctttattttcctcattctgataattttcttgttttctgtttacccagccaagcatagaaccatacaaccgcaatcactacacacgctatgccaacgctgtaagaaaccacagatgaaagtcctaacccttcgggagcaatacatatataagtagaacatacacttgtcataaacagtgccggtatcaaagtgatgatgtaaggtttcttggacacagccagaaataccgttatagcccacaaagtgaacacagctaatgtctggttagcccaagcaaaataacgccatatcatattaaacccgttggcatcacgcaaactgtacaggagcagaccgatagctaccacaaacatagggatacaaatgtataaacggcgacgcatacttttttgttccattcccaagaaatccgccacaatcagacgtgccgaacggaaagccgtatctcccgacgtaatcggagctgcaatcactcccagaatggcaagtatccctccgattgttcccaaccactccttcgtgatggcgtctacaataacagaagcattactttcttccatcccattcttatggaaaaagtaagtagccgcagcagcccagataagagcaacgataccttcagtaatcatcgccccatagaacaccggacgaccgtgacgttccgaagtcatacaacgcgccatcaaaggactttgagtagcatgaaaaccggaaatcgcgccacaagcaatactcacaaacataatcgggaaaatagggagtttgcttgcttcgggatttgtattttgcaaaccatcccacagctccggtaaaacgggatgattgacataaagcattactaaaattcctaccgccataaacagcagtgcgactgcgaacagaggataaattttaccgataatcttatctaccggaagcaaagtcgccagaatatagtaagcaaacacaacgacaatccaaaacgtagtatccaaatgttccggtgtaagtttcgccagcagtccggcaggaccggccacaaaaaccgcaccgaccagaatcatcaaaataacggtgaatcctctcattacctgcttcgtagtaatccctaaataacggcctatgatttcgggcaagctttcaccaccattgcgcaaagaaagcattccggcaaaataatcatggacagcacccgcaaagatactccccagcacaatccacaaataagaagaagttccgaacttcgctcccatgattgcaccgaaaattggacctagtcccgcaatattaagaaattgaatcatgaaaatcttccaagtgggcaatggaatatagtctactccatcagccttagtaagtgccggtgttttacggtcatcaggaccaaagacgcgttccatgaggcgtccgtacgtaaaatagcctactatcaacacaagcaggcatagagtaaatgtaatcatagtgtgtcgctttttaacttggcaaatgtaacataatctcatgaaacagcccaacaataccgacacttttactaactttgcagagatttaaaacaaaaaacaaaggatatgcgcctatttattttcattctttcacttttgtttcctttcctcccgacaagtgcgcagcccaagcacgaagttcgtgcagcatgggtaacggctgtatacggtttggactggcctcgcacacgtgcaacgactccgcagacaatccgcaaacagaaagaagaattgacagatatccttgataaattgaaagcggctaatttcaatactgttttattccaaacccgtacacgaggagacgtactatatacttcagcaattgaaccgttcaattcaatcctgaccggaaagacaggaggaaatcccggctatgatccactggctttcgccattgaggaatgtcataagcggggaatggaatgtcatgcgtggatggtaaccgttccgctgggaaacaagaaacatgttacttcactcggaagtaggtccgtcaccaagcggatgaaagaaatctgcgtcccttacaaaagtgaatatttcctcaatccgggacatccggcaacgaaagagtatttgatgaaactggtacgcgaagtcgtaagcggttatgatgtggacggcgtacatttcgactatttacgttatccagagaatgcaccttttttcccggataaatatgatttccgcaaatatggcaaaggacgtacgctcgaccaatggcgccgggataatatttccgagattgtacgttatatatataaaggtgtaaaagcaataaaaccttgggtaaaagtaagtaccagccccgttggcaaatatcgggatacttctcgttatccttcgcgtggttggaatgctttctttaccgtttaccaagatccgcaaggatggatgggagaaggtgttatggatcagatttatccgatgatgtatttccagggaaataatttttatccttttgccctcgattggcaagaacaaagtaacggacggcaggtgattccgggcttgggcatttacttcctccatcccgatgaagggaaatggacgcgtgacgagatagaccgccagataaacttcatccgcaatcataagatggcaggcgagggacattaccgggtgaaatatcttatggagaacacacagggtatctatgatgagttggtcgaaaacttttatgcttatcctgctttacagcctcccatgccttggctagatagtgttccgcctacggccccgtccgaattgacagtaaccgatattgacagtggctatacggaattaaagtggcaggctgccaccgacaatgatgcacgcaataagccaatgtatatcatttatgcatcgaatgattttccggtagacattaatcgaccggaaaacattgttgcacaaggtattcgggagacaagttatatctatgctcctatcctaccctggaatgcaaaaaaacattttgctgttacggccattgaccgttacggaaatgaaagtagagcggtgcaaaagtaaaagactttgtataagaaacggaataacggctaccgtttcatattacacaatgtacactttctgacacaagaatccacgcacgatacttactttttttataaaccggcactaatggcaaataaccagagcagattcttccctgctccattttcaatggataagtctctgccattgctgtgtgtgcgttccatgctgctccatccgaaggggcatagtctatctgaaaaatccctgttgagaaaggacatatataacggtcatacaagtgacgcgctactactcccatattcatccgtaagtttatttccacacaaggatgaatacgataagccggagattccgggaagcggcaaatcatcatatcaactcccaaatagccattgtaaacacttccaaagcgaagagataattcccgttcaagacaattacgcaatttatcaagctccccaacggggacatattccgaaagattccgttcaatcgcagcatttgaaatcaaccgattaccctcatacgctccactcccacccgtacgaaattgagagtatccgatgaaattgaaccgtccgtcacctgaagaatgaaattccatagcaaagtcttctaccttattatatataggttcaccgattacgccaccctgctgacttccgatacgcaaacaccaaccggaaattgaaggcgtataaatgcctttacaccagttcaatcccttaccgctacccgaaagaggtgctttcagcagacaggtatcatgcgattcaacaaatgatttccattcttcgggaagtgtcaggtagaaggattcaccgcaaaaataattgtccaattgcagatgaggcaacaactctactgcacaggaacggtgtgaacaagaacgtaatttatttaattgttcaatagaaggtaatgcgtgtttctctattcctaagtccaagagacgttttcttacggcgatgtcccatccccaaggacggatatccaggtttcgttcggaagcaagttccggttctgtcatcagatgtaccgaaagtcccaacaattgctgcatccttttcagatagtcaagattataagcggaaggagccaataccgcactcccctcttcggcataccacaccggcagcaaggccagctcggtcgccatctgccgggcggaggccggtggcatataattgatttcaccgctagccaacgccaagtcatgttccgggttgaatagataaagagtctttttagccatctcaaacgaattcaaaactttattctgcaaatatatacaggaaatagtcagcaatacctaataataagaagaaagttagagttaaaagcacaattttgccatctctactttgcaaatcttaaaaaaagcactatatttgccacccgtaaaactaagaacagaaatggaagcattctatcgcacacacgcctaccttgttgagcacaccaatgcccccgttcgccgtgaccttatggatgagattgattggagcgaccgcttgattggtatcaaagggacacgtggcgtaggaaaaaccactttcctgctccaatacgcaaaagagaaattcgggaccgaccgctcttgtctgttcatcaacatgaacaacttctacttctcgggacacagcattgtggactttgccaacgaatttcaaaaacgcggtggaaaagtactactcatcgaccaagtgttcaagcacccggaatggagcaaggagttacgtatgtgttacgaccgctttcccaatctgaagatagtctttaccggttcgtccgtgatgcggctgaaggaagaaaaccttgaattgcgcgatattgcaaaaagctacaacctgcgcggattttctttccgtgaatttttgaacttgcagaccggtatgaagtttcgggcttacagcctcgaagagattctaagcacgcatgaacagattgccaaaggagtgctttccaaggtacgtccgttggattattttcaggattacctacatcacggattctatccgttcttcctcgaaaagcgcaacttttcggagaatctgctaaagacaatgaacatgatggtggaagtggatatcctacttctcaaacaaatagaactgaaatatctttcaaagataaaaaaattactatatttgctcgctgtcgacggaccgaaggctccaaatgtcagccagttggcaagcgacatacaaacatcccgcgctacggtgatgaattacatcaagtatctggcggacgcacgactcattaatctggtttatccgaaaggggaagaatttccgaaaaaaccttcgaagataatgatgcacaactccaacttgatgtattccatctacccggtgaaagtagaagaacaggatgtattggacactttctttgcaaactctttatggaaggaccataagatacacaaaggagacaagaatttctcttttatcgtagacgaagtgatgccgttcaagatttgcctggaaggtgcaaagattaagaataacccgaatgcgacgtatgcgttgcataaggcagaaataggtcggggcaatcagatacctctctggatgttcggctttttatattaaaagatttatttacttaaatatttaatttagttatgactaaacagaagaaattcatcacttgtgatggtaaccaggctgcagcacatatctcgtatatgttctctgaagtagctgctatctaccccatcactccttcttcgactatggctgagtacgtagacgaatgggctgccgcaggacgtaaaaatatcttcggcgaaacagtattggtacaggaaatgcaatctgaaggcggtgccgccggtgcagttcacggttctctccaggctggtgcgttgactactacttacactgcttctcagggtcttctcctgatg

SEQ ID NO: 11833 - DNA, 6273 bp, Unknown
  gut microbiota DNA sequence
tgaaaataggaactgcaatatgggtctgcctgttgctctcttttttcttcggcacatcagcaaaggccgaaagtatcacttctcctgacggacaattaaagctaaatttctctgtcaacacgcaaggagaaccggtgtatgaactctcttataaaggaaaagaggtgattaaaccttcgaaactgggactggaattgaaaaatgatcccggactgatgaatggattcactctggccgatattaaaacttctgcttttgatgaaacatgggaaccggtgtggggagaggtgaaatcaatccgcaaccattataatgagatggctgttactttgaatcagaaggcacaagatcgcaatatcattatccgtttccgtctttatgatgatggcttgggattccggtatgaattcccattgcagaagaatttgaattattttgtgattaaggaagaacattcccagtttgctatggcgggagatcatacggccttttggattcccggtgattatgatacgcaggaatacgattataccgagtccagactttctgaaattcgtggattattgcaaggggcgattactggaaacgcttctcaaacctctttctcgccaacaggtgtgcaaacttctttgcagatgaaaacggatgatggcttatatatcaacctgcatgaagctgctttggttgattattcctgtatgcatttgaaccttgatgatcggaacctggtttttgaatcgtggttgacaccggactcacaaggagataaaggatatatgcaagcaccttgtcgttctccttggcgcacggtaatcgtgagtgatgatgcacgtgatattctgtcgtctaagctgacattgaatctgaacgatccttgtgcttatgaagatgtttcttggattaaaccggtgaaatacattggtgtgtggtgggaaatgattagcggaaaaagttcttgggcatatacggacgatgtttactctgtgaaattgggcgaaacagattattcaaaaacaaaaccgaatggacgccatgcagcgaataacgataatgtgaaacggtacattgactttgcttctgaacatggatttgatcaagtattggtagaaggatggaacgaaggttgggaagattggttcggcaaatcaaaagattatgtatttgatttcattacaccttatcctgatttcgatttgaaaatgctgaatgcatatgcgaactcaaaaggagtaaagctgatgatgcatcacgagacatccgcttctgttcgtaactatgaacgtcatttggatgcagcatatcaatttatggtagataacggctacaatgcagtgaagagtggatatgtcggcaatatcattcctcgtggcgaacatcattacggacaatggatgaacgaccattatctatatgcagtgaagaaagcggctgattataagatttgtgtgaatgctcatgaggcagtccgtcctaccggactatgtcgtacttatccgaatctgatcggcaatgagtcggcacgtggtacggagtatgaagcatttgccggtaataaaccgtttcataccactttacttccttttacccgtctgattggcggaccgatggattatactccgggtatttttgataccaaactttctttcttgtcgggcgatcatagttttgtacgtactacattggctaaacaattggctctttatgtaacgatgtacagccctttgcagatggcggctgatttccctgaaaactacgaacgtcatatggatgcatttcaatttatcaaggatgtagccgttgattgggatgacagtaagtatctggaggcagaaccgggagattacatcaccgttgcacgtaaggcgaagggtactgatagctggttcgtaggtggtatcactgatgagaatcctcgtacttctgcttttacacttgattttctcgaaccgggaaaacaatatgtagcgacattgtatgctgacggaaaggaagcggactttgaaaagaatcccacctcttatcaaataaagaaaggtatagtaactgctaaaacccggatttctgtcaaactggcccgtagcggaggatttgcgttgagcttgattgaagcagctccgtcggataagaagataatcaagaaatggaaataagatctaggcaaagagattgttctcggattccccgcttttaataaatattagttgttgccccgcaaggaaaacaaaactttgcggggctctttgttttatcagacggattcttttttgtacttttgcacatctttttaaaaaacatcaataaagagaataacatgggaggttttttcggaacagtctcgaaagctagttgcgtgactgatttattctacggcacagattataactcacatctgggtacaaagcgaggaggactcgcgacatacagtaaggaaaaaggttttatacgctccattcataatttggaaagtacctattttcgaacaaagttcgaaggagaattggacaagtttaaaggaaacgccggtatcggcattattagtgacacagacgctcaacctattattataaactctcacctcggccgcttcgccattattaccgttgcaaaggttgtcaatattcagcaactggaagatgaacttctcaatcaaaatatgcacttcgccgaactgagttcgagcaataccaatcagacagaacttatcgcattacttctgatacaaggtagaaactttgtggaaggtattgaaaatgtgttcaagcacatcaaaggttcttgctcaatgcttatcttgacggaggacggaagtatcatcgctgctcgtgaccagtgggggcgtactcctatcgtaataggaaaaaaagaaggagcatacgctgcgacaagcgaatcatccagttttccgaatttggattatgagatagagaaatacttaggtcccggtgaaatcgtccgtatgtatgacgatcatatcgaacaacttcgtgaaccgaatgaggatatgcagatttgttcgttcttgtgggtgtactatggttttcctacttcttgttatgaaggacggaatgtagaagaggtgcgcttcacttgtggattgaagatgggacagacagatcaatcggaagtggactgtgcttgtggtattcctgattcgggagtgggtatggctttggggtatgcagaaggcaagggggttccttatcaccgtgcgatttcaaaatatacaccgacttggcctcgtagttttactcctagtaatcaggagatgcgtgcgttagtggcgaagatgaaattgattccgaaccgtgcaatgcttgaaggtaaacgcttgttgttttgtgatgattctatcgttcgtggcacgcagttgcgtgataatgtgaagatactatatgattatggagcaaaagaggtacatatgcgtattgcttgtcctccattgatttatgcttgtccgtttgtaggtttttccgcttccaaaaatgcgttggaactgattacccgccgtattattaaggaattggaaggtgacgaaaataagaatttggataaatatgccactaccgggtctcccgaatatgagaagatggttggtattatagccgaacgtttcgggctttcttctttgaagttcaatacagtggaaacattaatagaagctatcggtctgcccaaatgcaaggtttgtacacattgctttgacggtagtagccatttttaaagtggtcagataggtcagttaagtatccagataaaactatacaataaaaaagagccgtgaattgctttgtaattcacggctctttttttacctttacggcactataaactatcaatttgtaaattgtaattagtaacttgtaattaaaacgatatgactttagtagacagatttttaaagtatgtaagcttcgatacacaatctgatgaatcgacagggcttactccaagtacttcgaaacagatggtttttgcagaatacttgaaaaaagagttggaatctttggggttagaagatataactttggatgagcatggttatctttttgccacgctccctgccaatatagataaagaggtgccgactattgggtttattgctcacatggatacaagtccggatatgacgggtaaggatgttactccgcgtattgtagaaaagtatgacggttcggatattgtactttgtgccgaagaaaatgtggttctttccccgtcgcaatttccggaattgttggatcataaaggagaagatttgattgtaaccaacggaaaaactttgctcggtgctgatgataaagccggtattgcagagattgtttccgcaatggcctatctgaaagaacaccctgaaatcaaacacggaaaaatccgtatcggtttcaatccggatgaagaaatcggtgaaggcgctcataaattcgatgtagaaaggttcggctgtgagtggggatatacaatggatggcggtgaagtgggagagttggagttcgagaacttcaatgctgctgccgctaaagttacttttaaagggcgtaatgtacatccgggatatgctaaggataagatgattaattccatttatttggccaatcggtttattactctgctgccgacacaggaaaggccggagcatactacgggatatgaaggattttatcatttgattggcattcagggtgaagtggagcaaagctcagtttcttatatcattcgcgatcatgaccgtactaagttcgaaaaccgcaagaaagaaatggaacgtctggtcgttcaaatgaatgccgaatatggtgcgggtacggtaactctcgaattgcgcgaccaatattataatatgcgtgagaagatagagccggtgatgcatattatcgacaccgcttttgctgcaatggaagctgttggtgtgaaaccgaatgtgaagccgattcgtggaggtacggatggtgcacaactttcttttaaaggcttgccttgtccgaatatctttgccggtgggctgaattttcacggacgttatgaatttgtgcctatccagaatatggagaaagcgatgaaagtaattgtgaagattgccgagctcgtagcttccaaataactgatacttaaaacttaatacttaaaagataatgaaaaccactccgtttatagagaaacatatagcgcttggcgctaaaatgcacgagtttgcaggttataatatgcctattgaatactccggtatcattgacgaacatctgacggtctgtcagggtgtcggggtatttgacgtatcccacatgggagaattctgggtgaaaggtccgaaggcattggcttttcttcagaaggtgacttccaataatgtggcggtactgactccgggaaagattcaatatacttgtttcccgaatgataaaggaggaattgtagatgacttgctggtatatcagtatgaaccggaaaaatatatgttggtagtcaatgccgctaatattgaaaaggactgggactggtgcgtttctcataatacggaaggagcggaattggagaacgcttcggatcacatggcgcaacttgctgtgcagggaccgaaagcgattcttgctttgcagaaattgactgatattgatctggcatcaattccttattatacttttaaagtcggaaagtttgcaggtgaagagaacgtgataatttccaataccggctatacgggtgcaggaggttttgaactatatttctatccgaatgtggctgatactatttggaaagcggtctttgaagccggtgaggagttcgatatcaaacctatcggtttaggagctcgcgatacacttcggttggagatgggattctgtctgtatggaaatgatttggatgatactacttcaccgatagaagctggacttggatggataactaagtttatagaaggtaaagagtttatcaatcgtccgatgctggagaagcagaaagcagaaggagtaacccgtaaattagttggctttgaaatggttgatcgtggaattccccgtcatgggtatgaacttgtaaattcggatggggagaagattgggatcgttacttcgggcactatgtcgcctacccgcaaaatcggtatcggcatggggtatgtgaaaccggaatacagcaaggcaggtacggaaatttgtatcgatgtgcgtggtcgtaaattgaaagcggtcgtggtaaaacctccgttcaggaaataattgaatatttatagaaacgcagattaacgcaaatttgcccagaataagatttgaaatt

SEQ ID NO: 11834 - DNA, 3794 bp, Unknown
  gut microbiota DNA sequence
gggaaccgttaatcggggctaccgtagctgtgaaaaactcgacagacggcacggtgaccgacatcgacggaaactactccctgaagactaagaaaacattgactcaaaaggatttgcttgtattcagttatgtgggatataaaacgctacagaagaactatgcaggcaatacgatgaacgtaaaactggcggaagagtcgcaacaactgaatgatgtggtggtgactgccctggggatcaaacgtgaagaaaaaggattgggatatgccacggaaaccgtgaaaggggatatgattacgagtgccctgcccaccaactggtcgacggcactgaacggcaaggtagccggattgagtgttatctcttccggtggtccgcttaattcgagccgtatctcgctgcggggggacgtctcgctgaaccagaacggaaacgacgcattggtggtagtggacggtgtaccgatgagtagtccgatgaccaatccgggtgttgcctacggtgcaggttcaaacagcgaactttccgtggactatggtaacggattctccgacatcaatccggatgatatcgaaagcatccaagtattaaaaggggccagtgcgacagccttgtacggtacgcgtgcagccaatggcgtgattatggtgactaccaaatcgggagcgggtgcacccaaaggtatcggtgtgtcttacagcggtaacttcagtattgacgatgtgatgagatggcccgattaccagtatgaattcggacagggattgccgagcaatatcggtccggcaggttctatctacgaaggccagccctattactcttacgggaaagcggaagacggcagttacgcaagcactagcggaaccagtagcgcttacggagcacgtttcgacgccaacaggttgttctaccaatatgaccccgtaacgcagggacgcgcttctgttgccaccccttgggtagcgtacaaaaacaaccgcaaagatttgttccagacaggatacaccctgaccaactcggtagccttgaccggaaaatccgaccggggcagcgtacgggcgtccatcacccacactaagaacgaatggattctccccaatacaggtttccagcgtatcaccgccatggtttccgcccaacagcagatttcgagggcactgcgcattaatttcaagtcgagttatacgtaccgcaagctcaacaacacgcctgcactgggatataacagtaactctatctcctacttccttatcttccagaatccgaatgtcaacctcgactggttgcgtccgatgtggcgtaccggacaggaaaatgtgaaacagctccaaccgtacagttcctttatcggaaacccgtatgtcattctgtacgaatctgaaaatccttcggagaaacacagtaatgtatcatccatttctgccaatctgcgcatcaacagtaaattcgatttcatgatccggtccggtatccagttgtcagcagaccaacgcgaacagcatcgtcctatcagtgacgtggttttcggaaacggttttttcaagaagcagaatgtgttcgattatgaattaaacagcgatgctttatttacttaccatgattcattcgccaacggattgcgtgtcaacgcttcggcaggtggaaacatgatgcaacaaagctacgatatgttggctgcctcggtggtaggattgattacgccgggagtatacaaactggcaaacggtgtttccaacccgaacgtgcagacggttatcaaaaagaaagcgttgaacagtctttatttcacggccaatttctcgtataaggataaactgtttctcgatgtcaccgggcgcaatgactggtcgtctaccctgccgaaaagcaaccgttctttcttctatccgtcggtcagcgtcagtgcagtgatgaacgagtggttcacgttgccggaacagatcagtctgttgaaagtgagaggttcgctggcacaggtcggcaacgacacagacccttacaagacatcgccctattatggcacaagcgatttccccggctcggccatcgtatcttctacgctctataatcaggatttcaaaccggagatttcgaccaattacgaaacgggattcgacttccgtatgtttcacaaccgcatcggactcgatttcacattctattataaccgcaccaaaaaccagattctggatgctccgatggacccgaccacaggttacagcaaagctaccatcaattcgggatgcgtccgcaaccgcggttacgaaatccagttggacgttactccggtagtcagcagggatttccgatggaatgctactttcacctggtctaagaacgagaaccggattctctcactggcggaaggggcggatgagaaccagttaatcagcagtatcggtagtgtgtctatcatcggacgtgtgggtggaactacgggcgatctctggggatataaactggtacgcgacccggaaggaaatgtggtcatcaacgacaatggattgcccgaacgttcgggagagatcgaatacgtcggcacggcctatccgaaatggaaagccggactgtataacgaattttcttataagaacttcacgcttagcgtcctgctcgacggacagatgggaggtaaaatgtactcgcactcgcaccacaaaatgacggaacagggaaaactgcaacatacgctgaacggacgtctgccgggaacggaattttatatgtcgaaagacgacccgcgcatcgctgccgccggactttcaccacaagacgggatgtacatgattgctccgggaacggtgaaaaacgatgacggaacttactcgccaaacaccaaagtggtgaccgtggaaagttattataaggaatattaccggatggccaatgtggaaactaacacattcgacacttcattcctcaagttgcgcgaaatgagactggagtacaagttgccgaacagcacactgaagaaaacaccgttcagcaaagcatcggtggcactctacgcacgcaacctgttctgtatcaccgactatcctctgttcgaccccgaatctgccgccctcaacggaagttcgatggtgaccggtgtggagacgggctcactgcctacggcacgtactttcggactgaatattaacgtatctttttaaacactgacttatgaaaaccaataaacttttcaaaaatatagtatggggaatgactttgtgcggagctctctgcacgacttcctgcaccagcttcgacgaactcaatacagaccccacccgcatggatgaggtgaatcccggcacgctgctcaacccgattttatacgaaacatcggtctacaactggaaacgctacaacagctatacctacgacctgatgcaatgtgccgtatctaccagcagcaccaacggtgtgggatggtggtatatgacggacagcgaaggagacggcacatggactacttattataaatggatcaacaacgccaaagagatgatgcgcctcaccggaaaattgccggaagcctccaaacaacccaactacgatgctatatcgctgactttgcaatgttggctataccagattctgacggatgccttcggtgatattccgatgagcgaagcctgctccgccgacgagggaatacttgcaccgaagttcgacacccagcagcaggtgtaccaacagattatcgacaatctgaaaacagctaacgagttgttcgacaaagctaacgggttgatctacaaccaatcgggcgaaatgttgtacaagacgtccaaaggggatgcaaccgg

SEQ ID NO: 11835 - DNA, 137 bp, Unknown
  gut microbiota DNA sequence
aaagacaaatatatttaacgctaaccgaattaagaaagactataacggcatttgcttgattggaaacaactataatataatacgtatatgattgcattgaatctgaactgcaatcagcgatctataacatacttcag

SEQ ID NO: 11836 - DNA, 10558 bp, Unknown
  gut microbiota DNA sequence
ccggtctgtccggataaactccaaaagtcgttctactgcctcttcttcaggaatattcttttctacacagaccttgcctttataaagactgattttgcctcgtcctgctcctacataaccgtagtcagcatccgccatctcaccgggaccattcacgatacagcccatgataccgattttcagtcctgtcaggtgtgaggtagcagccttgatgcgggcaattgtcttctccaagtcgtaaagcgtacggccacaaccgggacaagatatgtattcagtcttagaggtacgggtacgtccggcctgcaagattccgaaagcagtagcgtcgacaacggcatggctcaaaccgccctgattgaacaggaagataccatcgcaaagcccgtcaaagatcagagcccccatatcggccgcagcttttatctgcaaatcctccgcatcatcttccgcataatgctggaagaaaacaaccggattttgcagcccctctgtcatcagttgatgcaccaacgcacgatgttcacccaaacggttcggatggttgctttgagagacgacaaccacttcgggatgttgtttcagacaggcaatcacttcatccgtctgtgccatataaggcataaacaggaatttgagttctgcattacatcctcccatcaacggcagttgctgatgattataagcaggccaagtaccggcttctccggtccatacgtccgcatcaagaatatagtccacaccttcttcccgttgttcgggcaaagcacgtccggcataaatatagtccggagtaaattgcggattcacttcggtcttcccgtccatacggtcggcaatgaccacaggcacgtgttcacctcctatattgcggacagcccgcgtcttacggcgttcgggcgacaaatagttaaatccaggcgcttccagtccgggaatataaggatgattccgcctcaacaggatatagtccaccaacttacgggcaacaggaatttccgcttcgggagcttcgctcaaagatacccgtatagtatcccccagtccgtcggccaacagtgcaccaatgccgagagcggacttgatacgtccgtcctcaccgtctccggcttctgtcaccccgagatgcaacgggaaagccatcccttctttctccatcacagctaccaacagacgaacggttttcaccatgacaaccgtattggacgctttgatggaaataaccacatcggtaaagttctcatcaacacaaatgcgaagaaactccatacaagactctaccatgccttcgggcgtatcaccataacgggacatgatgcggtcggacaaagagccgtgattcacaccgatacggatagccgtatgattctctttgcagatattcagaaaaggcacaaagcggtcatgaattttttgtatttcctgcgcatactcctcgtcggtatattccagcttcttaaaagtacgtgcagcgtctacataattccccggattgatgcgtaccttttccgcatatcgggctgccacatcggcaactttcggattaaagtgtacatcggcaaccaacggaaccatatattcctgactgcgcaaaccgatattaatatttttcaggttctccgcttccttgataccttgcgtcgtcagacggacatactcaccgcccgcgtcgacaatacgtttcgcctgttccacacaagcctgcgtatcctgcgtagacgtattggtcatcgactggatacgaatagaattggggccacccaacggtacggccccaatattcacttcggtagtttccctccgaaaataattgaatagatccattagtttgttttatattcaaacttgacttctttcagttcttcgtttgcttttacgattttctttttcagtccttctttgtaagctgcaaatgcttccgccagcttttcatcactcaaagcaagcatctgaatggccagaatagccgcattcatcgctccgttgatagcaacagtggctacaggaatgcccggaggcatttgaatgatggaataaagtgcgtccacaccatcgagcacggagcctttcaccggcactccgattacaggaagtgtagtgttagccgcgattacaccgggaagggcggcagccattccggcagcagcgataattactttaatgccacgagtacgggcattcttagcaaactcttccacagcctcaggcgtgcggtgagcggaaagtgcgttcatttcgaacggtacatgcatatcattcagcagttgtgcggccttttccataactggaaggtcggacgtactgcccatgatgatacttacaattggagtcatatttttaatgtttaatttatccgttaatcacttctttatacccttccgcatccagcaagtcttctaccgccttcacatcagcaggtttcatcttaatcagccaaccctcgccgtatgggtctttgttcaccagttccgggttctcttccagcgcttcattctgttccagcacctcacctgccaccggcaggaaaagatcggaaattgttttcactacttcgatagttccgaaaacctcaccggcttccagcgactcaccgaccgtcggtatgtccacaaacacaatatcgcccaattgctcctgagcgtaatcggtgatacctacgtatgcaatgtctccttctacgcgtatccattcatgttcgttcgtgtacttcaaattctgtggaaagttcataataattagtttttaggatttatactgttttaaaataaaaatactcgaaataagatattactcaccggatgaagcaccaaaagggcgcataccaggccgaccgtaaaaccggaaatgacctctcccagcgtatgatgtcccagaatgatacgggcagaacccagcacaccggctatcaatataaacaggcacagccaccctaccgggttataaccgaacaaggcgctaaaggaaaccaatccgcctatcactccgcctatgcccgccatgtgctcgctcagtttccatctcagatttactgctatacaaataatggagactacgagagaagccagaataatgccggtcatgtaccaaggcagattcagcctacgcatcatcagcaggcagaatacatacgaaatgatagtcagcaggataggtacaaaacgtttcttccgttcgcccagctcctgacgggcaaaaccattgatcttgcggaacagaaagatggttatagtgggagtcaatatagtaaagcaatagacaattcccaatacaatcaacttatataccatcggcatgatacggagataagaaaacaggaatagcaccagaaatgacaaaaacggaatagaaaacggggtaaacaccatcgaagtgactcttgccacctgcaacattgtcttatccgctatgatatgctctttctctctatccattatcaattatctattaatcaattattttctaagtcttgccaccggaatattcaactgctgacggtatttcgccactgtccgacgtgcaatagggtagcctttttctttcagtatgtccgccaattcatcatcggtcaacggtttcttcttgtcttctccgtcgatacattctttcaaaatcttacgaatttcgcggacagacatctcttccccgtcttccgtcgtatatccgtcgctgaagaagaacttcaacggataaataccgaaattggtctgcgcatatttactgttgctgacacgggaaatggttgatatatccagtcccgtacgttcggccacatcttttagaatcatcggtttcagcagggattcgtccccttcgagaaagaaaggacgctgcaggtcgatgatagcctgcatagtagtcatcaacgtattctgccgctgtttgaccgcatctataaatccttgtgccgcatccatcttctgtttcagaaacatcatcgcttctttggactctttggactggttggccttattcttggtatgttcctccaccatctccgtaaaatcacggctcatacgaagctccggaacattacggttattaaggctgacattgatagtaccgtcatcatacgtttccacgatgaagtcggggactatctgctggaggttcctcccgatagcctctcccaaagaagctcccggacggggattcaactttgtaatctcactgatagcttcattgaatgtttcttcatcaacatccagcttttttataatcttttcccaatgcttccgggtaaattcttcataacaatctctgatgatgcgttcttcgatatccaatataggagcaggattcatcccttcttccttcttccggcggatctgtatcaacagacattcttgaaggtcacgtgctccgatacctgccggatcgaaatcctgcaagatgcagagtgcttcttccagctcctcttccgtagattctataccggcataaatagccagttcgtcacagatactttccaaagatttgcggagcaggccgtcatcgtccaacgagccgatcaggtattccaccagttcatgctggtgttctgtcaaattgcgctcacgaagctgctccttcagtatttcgtaaaaagaggtagagtcggagaacggaatatcttccgcctgctcgtctttagatcggttgttctcttgcagtttgtagtcgggaatatcgtcttcggtgagataatcactcaaagaatcgtattcgttggcatcattctccataccctccccggaagtgtcaccatcggaatattcatctgcgacattctcttctttgccctcctcaagtgccgggttttcaagcagttcagcatggatacggtcttccagctctactgcgggaagctccaacagtttcacgactagaatctgctgaggcgagagcgtttggatttgctgttgcgcctgcgattgtatttgacgggaaccttgtgccatattcgtttttgctttctactctgtttctcgctacaaaagtaactttttaaccagagattacacagattagaggaataatttttaatcctataacacaaaaatcgttatctttgttgcacgaacttaaaattagaacaatatgtttgccaaagaaacgtatatgcagcgaagagccctgctgaaaaagaaattaggctccggagttttgttatttctaggaaatgacgagtgcggactaaattacgaagataacaccttccgctatcgtcaggattctactttcctttattatttcggactgtcatgtgcaggactttcggcaataatcgatattgacgaaaacaaggaaattattttcggtgatgaattatcaattgatgccatcgtgtggatggggtcacaacctacactacaagaaaaatgcgaacgggtgggcgtggctaacttactgccatccgcagaaatagtcagctatctccataaatgtgtccaaaaagggaagtcagtgcattatctacctccttaccgtcccgaacataagctaaaactgatggattggctaggtatcccccctgcacatcaggaaggttccgttccattcatccgcgccgtagtagcccagcggaactataaatcggcagaagaaatcgtagagatagaaaaggcttgcaatgtgactgccgatatgcatatcaccgccatgaaagtacttcgtccgggtatgtatgaatatgaagtggtggcggaaatgaaccgggtagcggaatcaaataactgcgaactttctttcgctacaatcgctaccatcaacggacaaactttgcataaccattatcacggcaataaagtaaaaccgggtgatctgtttttaatagatgccggtgcggaggttgaatcgggatatgcaggagatatgtcatctaccattcctgccgacaagaaattcacgccccgccaacgggaagtctacgagatacagaatgccatgcatctggaatcggttaaagcactccgaccgggcattccttatatggatgtatacgaattgtccgcccgtgtcatggttgatggaatgaaagctctcggactgatgaaaggcaatgcggaagacgctgttcgcgaaggtgcgcacgccttattctatccgcatggattaggccacatgatggggctggatgtacacgacatggaaaatctgggagaaatatgggtaggctacaacggtcagccgaaaagtacgcagttcggccgtaagtcacaacgccttgccatacctctggaacctggatttgtacatacggtagaaccgggtatatactttattccggaattgatcgatatgtggaaagcggaaaagaaatttaccgatttcatcaactacgacgtagtggaaacttataaagatttcggcggtatccgcaatgaagaagattatctgattaccgaaaccggcgcccgtcgattaggcaagaagattcctttaacgccagaagaagtggaggctttgcgataattgttcaccacagattacacggattaacacagataataaaataatattgataatcaatgtattaatctaatctgtgtaatccgtgtaatctgtggtaaaaatgacttcaatcatcccaatcggataaaggtaatactttctttccataccacctcatccaggcatacgccttcctttttctaagataaagtgtatcaccacaattctccaatgcctcccaatcaaagacagagtgagagcggaaggacttctccaaccaataaaagatgtggtaagtcgcaaagggaagcaacatccaccaccatgagaagaacaacgacaagaccaaagcgggtagcaacgtcaacaagaagcattcccagaactgccttgcatggattctgacttccatatcttcccaaatctccaaatatttatatcgggtaaaaaaaagaccacccaacataaaacaatgcttctttccttttcttaagaaccattttgccaaaagattattataaaaaatcatactcttactatttttgcatataatctatataacagaatataaaatcaaaggtttaggcttttagcgtttaatatcattatacacaccctcttctcacttaatatttaaagctgcttcccccaagaaattcgcgaagcaaagaagtcggcggaatttccttatcctgtacgggaacgaaatatttgataaacttcaataaccgataagcctcgcaatattcgggacaattacgcggtactcccatcaatataggctcggcatggagacgaagcacggcaaactcgaaaagcagtgccgagttaaacattacatctgcattttcctgataagggaagatccacttgtcttcacccgcacgcacactaggccaacgcgagattgtctcacgggcagaatatccccgataattgaaatcacggataatacggcgtaacaaacgattgtccgttgtcggaatccagttgtggtcgtccaacgaaatggtcgtcaacgcagaaacataaatcttgaacttccgttctgccggaatatgaggagtaagttcgggatttaaggcatgaataccttccaggattaatatcgtattatctttaattttcagtttatcacccttatactctttctttccgagtgagaagttaaaacggggaagttccacctcctctccacgaagcaatgcctgcaactgccgattaaacagttccaagtcgagcgcgtaaagcgattcataatcatagtttccgttctcatccaacggcgtatcttcacggtctacaaaataattatcgagagaaataggatatggctttaacccgttcgtcataagctgaatagaaaggcgtttgctgaaagtagtctttcccgaagaagatggtccggctatcagcaccagtttcacccggtttccgttttctccccgatggaaaatggtatcggcaatctgagcaatcttcttttcctgcaatgcttccgcaacgtttatcaaatccgtcgcgtgtcctacttcacatgccagattgaaatcacccgcattgttaagccccatgatatagctccaattcagatattccttaaagacatccagcatcttctcctgcttcacgacatcttccaagacttccggattctcacggctcggaatgcgaagaagtaatccatcgtaatatttcacaatgtcgaacagtttcagatacccggtgctgggcaacagattaccatagtaataatcgaccgtatctcccaacgtataataataggtatagagagaaccggaagtttcgagcaatctgaccttatcattcattccccgttcgctgaaaatacgcacagcctcagttgtatggcattcaatgcgatgataagaaatatcctcagcaataatttcctgcatacgctgcttgatacgcatcacgtcttccagctccacaggacgcccgatccgcaaattgcagaaatatccttttgagacagggtgctctacaaacaattttccttccgggaacaattccgtgacagccttgaacagtacaaagcaaagcgaacggacataagtccgcataccggactggtcacgcacatccagaaactctatatccttattattatagactctgaaattaagcccttcagatcggttattgactttggcgctaaccacctggtaaggaaaattaagattaaaaccgtaataaatatccaaaagtgagctcccgatagggaattctttagaaatattattatttttgcaacatatttgtaacatctgtttcatcgagttcgttaaaaggtgaatattatgggactaaatatacttataatcagattgagaacaaataaccattaaaaatattatagatggaatattctttttatgattttttaaagctcataggctcattaggactcttcctttacggaatgaagatcatgagcgagggcttacaaaaggtcgcgggtgacaggctacgaagtatcttgacggcaatgactaccaatcgggtaacgggtgttttaacaggtgtgctaatcacagcccttatccagtcctcttcagcaacgactgtaatggtcgtaagtttcgttaatgcaggactgctcactcttgccgaatccatcagcgtaattatgggcgccaatatcggtactaccgtaaccgcctggattatttctattttcggatttaaggttgacatggccgcattcgcccttccacttctggccattgcccttccgcttatcttctcaggcaaaagcaaccgcaaatccatcggtgaattcattttcggtttctctttcttatttatgggactttcttacttgaaagccaatgctcccgacttgaacgccaatccggaaatgcttgcctttgtacagaactatacggatatgggatttttctccatcctcctgttcttattcatcggtactatactgaccatgatcgtacaggcctccgccgctacgatggcaatcacgctaatcatgtgtgccaacggctggatcagcctggaattgggagctgccctcgtattgggtgaaaatatcggaacaaccatcaccgccaatctcgccgcattgacagccaacacacaggctaagcgggcagcattggcacattttgtattcaatgtattcggtgttatctgggtgctgattattttccatcctttcatgcagatggttaactgggtagtagacactttcttccaaagcagcgatccggaagtcgccatctcctacaaattgtcggctttccactctatcttcaacatctgtaacgtatgtatcctgatatggggtgtgaaattgattgaacgtaccgtatgcgctctcatacacccgaaagaagaggacgaagaaccacgattgcgcttcatcaccggaggtatgctttccactgcagagctctctatacttcaggcacgtaaagaaatccatctctttgcagagcgtacccatcgtatgttcggcatggtgcaggatttgctacacacagaaaaggatgacgatttcaacaagctgtttagccggatagaaaaatatgagaatatcagtgacaacatggaacttgaaatagccaactatctgaatcaggtttctgaaggacgcctaagttcagaaagtaaattgcagatacgtgccatgttgcgggaggtgacggaaatcgaaagtattggtgacagttgttataatctggcacgcaccatcaaccggaaacgtcagaccaaccaggattttaccgagaaacaatatgagcatattcatttcatgatgaaactgacgaacgatgcacttgctcaaatgattgtggtagtagaaaaaccggaacatcagagcatcgatatcaacaagtccttcaacatcgagaatgaaattaacaactaccgtaaccaactgaagaatcagaacattctggacgtaaacaacaaagaatacgattatcagatgggagtttattacatggatattatcgccgaatgcgagaaactgggtgactatgtggtaaatgtggtagaagccagcagtgatgtaaaagagaagaaagcttcttaatagagcaaaattgaatcataaaaaaggagaatcagctaaaatatattt

SEQ ID NO: 11837 - DNA, 34060 bp, Unknown
  gut microbiota DNA sequence
attatgcttctttaagagccagcgacgacgacgaatattaaggaagaccttcttgccacggagaggaaaatcctgaacaataacagggtcataaaagcctttactctcagtatcctgatctgtatacttctcaggaacgatatttttctcctcaaggtagaacacaacttcatttacactttccttcacatcaacaagatcaaagtagtctaaagtgccttcaggaagaagaaggcgataaccgtttaattccataagctatgaatttggagacaaagataacaatttataaatttacccctcaggtttttacattgacccttttgatacacctttcatgaagagcgtcacttaatagtgaaggatgcttccaggtttgcgttggagtctctgcctatccatagtttgtactcacctttttcttgtccccaagtcatatctttgcgtgtgaaagagaggtcttcgggagaaaggttgaaagtgactttctggctttctccggtaattcatagctttttattttttgagcaaagtaaagcttttcttgctttctactcaaattccggacgtcgtatcgaatacgtcagtatgaaaaaagagaatctttttactactatttctatactacattggtagataagtgattgtgtattagttgtgtgtatctgctatttgtcttttgtttcctgctgtccatttcatccgtttttatgcgctgtttagttatttgatgatgatatggcatgtattcagacctgattttgtatcttgtttgttttttgccggtagtcttaaaaaatacaatactctcctcgctttaagtaaaaacttcctccgaaacgtattatagttcgttaaaaaagtgtacattgcaacgtttctggacatttttgatggataattggaacaaaattgtaatgttaacccgttttcttttgctatttttgcatcgtgtacgcaaacgacgtacatttagcagagaggcttattcaataactaaataaataaagtatgaaaacgaactatgaaattcgctatgccgcgcatcccgaagatgcaaaaagttatgataccgcaagaatccgtagagattttttgatcgaaaagatatttgtccccaatgaagtaaatatggtgtattccatgtacgaccgtatggtggtaggtggcgcgcttcctgttggtgaggtgctgaagcttgaagcgattgatccgttgaaagctccgttcttcctgacccgccgtgaaatgggtatcttcaatgtgggaggtcccggtgttgtaaaagcaggtgatgcggtatttgaacttgattataaagaagccctttatctgggttcgggtgatcgtgaggtgacctttgaaagtaaggacgctgcccatccggctaagttctacttcaactcgctgactgcacaccgcaactatcctgaccgtaaagtgacgaaagctgatgcagtcgttgccgagatgggttctctggaagggtccaatcatcgtaacatcaataaaatgctggtgaatcaggtacttcctacctgccaattgcagatgggtatgacggaacttgctccgggaagtgtatggaataccatgcctgctcacgtacatagtcgtcgtatggaggcttatttctactttgaaattcccgaagaccatgctatctgtcactttatgggcgaagtggacgaaacgcgccatgtatggatgaaaggcgatcaggcggttctttcacccgaatggtctatccactcggctgccgctacccacaattatacctttatctggggcatgggcggcgagaaccttgactacggagatcaggatttctcattgataacagacttgaaataaacaactacaataattttcctaatttaataacaaaaaattatgaatcagtttttgaatttttctttggaaggtaaagtagctctcgttacaggtgcttcttacggtatcggatttgcaattgcttctgcattcgcagaacaaggtgctactatttgtttcaacgacatcaatcaggagttggtggacaaaggtatggctgcatacgctgcaaaaggtatcaaagctcacggttatgtatgtgatgtaacagacgaaccggctgtacaggctatggttgccactatcgcgaaagaagtaggtacagttgatattcttgttaataatgcaggtattatccgtcgtgtgcctatgcacgaaatggaagccgctgatttccgtaaggtgattgacatcgacttgaacgctccgttcatcgtttctaaggctgttttgcccgcaatgatggagaaacgtgcaggtaagatcatcaacatctgctctatgatgtctgaattgggacgtgagactgtatctgcatacgctgccgctaagggtggtctgaaaatgctgactcgcaatatctgctctgaatatggtgaatacaacattcaatgtaacggtatcggcccgggttacatcgctactccgcaaactgctcctcttcgtgagccgcaagcagacggaagccgtcacccgttcgattcattcatctgcgctaagactccggccggtcgttggctgaatccggaagaactgactggccctgcagtattccttgcttctgaagcttctaacgctgtcaacggtcatatcctttacgtagacggtggtatccttgcttatatcggaaaacaaccgaaataatagtgagataacgagatattccgataaggtgatagaatggtaaagagcttcctcttttcgtctgtcaccttatctttttattattcattcaatgtagattaatcatgaagaagatattaattctggttgctgcagtcttgatgggagttgcttcctgtgctgacagcaaacaggcaatgacggttacagtgaccaatcctttggctttagagcgtacaggggagatggtggaagtaccgatgagcgatgtggttgcgaagttgaaactggcggacacggcacagattgtagtgcttgatgcggacggacagcaggttccctatcaggtgacatacgatgaaaaggttattttcccggctacggtgaaagctaatggtacggccacttataccattcagccgggtgctccggaagcctttaatgtgattgcttgcggtaaatattaccccgagcgtcttgatgaccttgcttgggagaatgacttggtaggtttccgtgcgtatggtcctgctttgcaggcaagaaacgagcgtggattcggttatgaccttttcacgaagtataatactaccgaaccgatcttggaagctctttatgccgaagaacttaatccggagaagcgtgcgaagattgccgaactgaagaaaacggaccccaaggcggctgccgaacttcaacgtgccatctcttatcacgttgatcatggctacggaatggattgctatgcggtaggtcctacgctgggctgcggtacgtcggctttgatggagggtgatacgattgtctatccttactgctatcgtacacaggaaatccttgataatggtccgttgcgtttcactgtgaagctggaatttaatccgctggtggttcgtggagattccggtgtggtggaaacgcgtgtaatttcgctggatgcaggctcgtatttgaacaaagcggtgatttcgtacaccaatctgaaagaaacaatgcctgtggctacaggattggttttgcgcgaaccggatggagtaacgatggcggacgctgcgaatggctatatcacttatgtcgatcctacaaccgaccgtagtggtggaaacggcaaaatctttgttggtgctgcgttccctgcacaggtgaaggatgctaaagtagttcttttccaagagaaggaaaagaaagaacgtggtggggccgatggtcacgtgctggctgtcagcgaatatgaaccgggttcggaatatacttattactggggatctgcgtgggataaagctgctatcaagacggcagaagcctggaatgaatatatgtcccaatatgcacagaaagtacgcacaccgttgactgtggcttattaaactgttttgggtataaaataccttgtttgtaggctgttaatacttgtcgtctcaggtattaacagcctatatattaagtgttaatacctgagacgacaggtgttgatactctatgcggcatattttaatagcctgtatgatagctaatagctgcttgtatgccaagagaacttcctgatatattgtttgctaatatttcatttgctgatttactttttgctattgtttctttgcatgaaagaaacttttgcttatttttgtcttctgtagaaggaaagattttataaaaagtgtctttatgggaaagaaagaattactaaaacaactgattgcgggatttcaggcattactgccaatagaagtctaccctcgtgaacttactttgccgcttgatagcgggaagattataactgtgccgggggtgagaaggtgcggtaagtcttctttgttcctattgacgataaatcagcttattcgcgaacggattattgcgaaggagcaaattctgttcctcaatttcgatgacgaacgtctgcacttgaatgcagataatctagatgaaatacttcaggcttatcgggaactctatccggcaattcctctgaaggatgtatatatgttctttgatgaagtacagatggcggatgattggcaaccttttgtaaggagagtatacgagcaggaatgcaggcatatcttccttaccggaagtaactctcgaatgctttcctccgaattggctacctctttgcgtggccggacattgcaatacgaagaattcccgttatcattcaatgaattttgtaactttaccgatatcaatacaaactattatgtgcctgagaatcgagccaagcttgtgaatgcgtttaagacgtatttgcatggagggggatttccggaagttgtattggcggctccactgtataaagacaggattttgcaggaatatttctttgtaatgctttacaaagatcttgtagagagatatgaaataaagaatccggaaccgatacgttattttataaagcgcgtgatgtcgaatctggctaagcctacttctatcaatcgtatttacaatgaattgaagtcgcagggagtcagcattgggaagaatacgctttatgatgtgattgtgcagacagaatctgtctaccttttcttctccctgacgaaatatgagccatctctggtgaaagagagcacaggagataagaaatattattgcattgataatggtttgcgctccgtcctcttaaatccgcatagtgaagataatggaaagcttttggagaatgcggtctttcttcatttgcggcggaacctgcgaatccaagaggagttgcattattataaggggaagaaagagtgtgattttgtagttgttgaatatgataaagtgacgcgattgattcaggtaagttaccaaatgggggatgaggagacccgtaaacgggaagttgatggtttgttggaagcagcccaagcgacaggttgccgggaactgactatcgttacgatggaagcagaagccgaatggaaagaacaagatatgtctattcatgtggtacccgcctggaaatggatgcttagttgagggcgccgatatgaatcggaaccctcaacttatgtgaaatatattttgggtacattgcttattgagcgattttcttcagagtctctttttcatataattcccatccggtttctttccaatgatattcccatacaagtttgtctgcggatatctctacaattttcataatatccggatcctcataatcgtatccaccgtcattcggataatagaagataagatggacagagccgttttttaactcccatttaccggtttcactagggttactgcttcctttggagtaactattgaaggtcatatcagatttcagttcatatcgtctgccgacatagtatgatggattgtcctcttcgcgttcaccatcttctatttcatatccgctatgttcgacgacttcccacatacctactaattcatctactgatccgatggagtcttcgtcatcgtcgccacaggaatacatactgaatgataataatactacggctacgcaagtagccagtttccataatgttttcataactgattaattattaattaatatttgatattattgtttggtaaagtagagttcatgatcattatatttgactatcatttgattttctgatatagatagaatttgattccatatccggccatgggcttagagtgattattccgccttctgtatcttttgtacagatataagtacctttttctctaccgtcaagtgtttcgtttatatacttttttcaataaaaatctccattgggttcgaatttccatacccaatggtgattattctcctcaatttgtatccaagtgccccataaggtttttgcatcatagatatagaatatattactgattatttgaaaaaacagcattcaagtctctttttacggagagaggagaacatgaatgctgaatgaaaaatgatattgaaaggtctgattttactttttttacaatcttgttggtagagtttagaatgctacacctaaccgaatcagtacgttgcttgtatttgattcccaagttttgataaatccgcgttgataggtaatgtcgaaattgaaacggtcgtaccatatgcctacgccgatattcattcctgcgtcaaaacgtttccagtcatcccaatctccaattttcacggtagtttcttctgttttaccattgtagtcctctttttcggtgatttttcctaagtagtcacaacttacataggctccgagatgtgcgtctagtgcaatattatttgtgatgttgtacttatatccgaatgtaaacggagaaatttgtacgttgtgtgctatttggctgatttcgtaatcatcttcagagtatccccaaccacgagagccaaggccgaattccatcccccaataggttcctatgcttcccatcggtttctgaaagccatatatgaagttgtaaccaagtttgctaccactttcatcatcgtctcctgtcattttcataacgtttaagccaccgcgtaagaaccactgcttgttagactgttgtttttctgttcttacaatggaacttctggatgatacgatctgtgcctgtgtgcctacacataagagaagtgcggctacgattgataatacttttttcattgtttcttatgttttaatagttaattattggtttttacgaccggtgctattacccctttctcatccgtaggagcgagtttctttatccttatccattcataatcgtccttagtggcggtgtaccatttactaaaaacggcagggaagcctaccaccgttactgtgtagcctccttcatcgttagtttccactttataggtggctgccatgataacgtcgctaccggcatcttcgttggctttataagtagcccatgaacggacattgcccaagtctcctttcaatccgatttctacttcttcacgtgtgaacttataggtgaatacttgtcgtttgggagtctctcctcccagcagcctgacttccgctactacaggttttacacatacttcgcttactgcatcacctgcacgcgattgtgcgtcacgaaactgaaatgtagacttttgagcatagctctccaatgtacaaccgagaatcaatgcaattaatagaattagttttttcatcttcatcattctgtgagttttgttaatatgtcgcaaaggtatgtgaaaggaacataacaaaggggaaacgggtagttcctaaagggtgacaaatatgtcgcctatttggagacagtgttcgtaggagggatgaggttgatcgtatcggacaagtctctgaagaagtcgtgattgaggatgcaggatatacgccaaagcaattggatatcaatattctctttgtggaatattttatagacattgggacgggtacaacacaattgggcagcgaaccaagtgacgctacgtccttggtcgtgaagaatacgttcgataagctgtcctgcatgaatcatatccatacaactctgtgtgtttcgcccagattcccgtaggtgaactaattttagtaaatgtaactttggaagaatatatatgaaaaaggcgcgggaatcttaccttcgtccgttccgtgttcaaggccttcgcaatgccagctaccgggaacgaacaacgcagaaagcccacgccgatatgtacaacacccgcagcctctctttgtttttcaaagcgaggcacggatgtatataagcacacatcaggaggacgtcttcgttgcagctcgtcattccggtagaacgaaatttgcgaagttttgaacaccaatgacaaacgcttgtaaacgtcttctcaatataaaaacggctccccctcaccacccgaaggctttctgcggaagagtccgttgcaaatgtaaataaaaaaatgagattatgataggataggagggaatatatgctttgaattatacgatttatgtaattcaaagcatataatcagagtcatttatgagatatcctagaatactttaaactcgtatccttctgcttttaggaattcgatggcacggggtagggcatattgcaaattcccgttgttccaagatttcagtgagtcgtggaaggtaatgatagagccgttacgtacatagtgtttcacgttgtccaatacctgttcgggacgtatacatttactgtaatcgcgggttacgaggtcccacatgatgatgcgatagtggtggcgaagcgtatagtactgccggaaacccatatgcccgtgtggcggacggaacaggtctgaatggataatctcgtctactttcttggcatttgccagatagtccggattggaatactcaaatccgcgaatatggttgaatgtgtggttgccgatgcggtgtccgcgctctactaccattcgatattcatccgggtgcttgcgtatattgtcgcctaccatgaaaaaggtagctttgatgtggtgtttttccaataaatccaatatccaaggagtaacctccgggatgggtccgtcatcgaaagtcagatagactgcccgtacgttcggatccatccggaagattgcttgtggatacaacgcccggaaaaaccaaggtggttgttctataaacattgtactaaattactatttccctttcattctcgtcacatactcgttgtataattggtcgagttgctcggagtaatgttttgcgagtttttctgatttgtatttctccattaagcgaatttccgcgtcaagcaagcttgcgttatatacgaaattctctccggcaatggcaagctggttatcgttcagactgagataccagatcatatattcgagtgacttgttggcaaggtcgtcaatgatcttgttggccttctcgttctgacctaattgatagtaagattctgccatttggaaagcaccgtttgcccagtcatacggcacgttgtaagccggaatcaccttttctgcatagtcgagcgcagcgagtgctttatctttcttgccctctttgatgagctgccctacgagttgcgtgaagatgcgacgatgtgtgtagcacatacgcatcacgttctcgtcgatgtatatgcccggctggtcgatgccaccgaacttgaactttttcatcaggttgccgtacatcttttcgctgtcaatcttgctgtccagcttttccgtatcgaacggagtgaagcggtaagcgagaccttcctgcgtgaagtgattgcccatgcccaaatggttctctccgcctacggtgattgccatatagataggacgttcccagttggcgttagcgagcatttcgagcatcatcagttcattcttgtagagcgcacgtttcgggcttccgttggcgtctctgagggtgatcgtcatatattcggggatagagtcgcccaaagcttccggtatcttcatgccggagcggcgtacagcttcttcgtctatcttcatcacgatactgtctgttggaatcagcgggagctgtatatcctttccggtctttttgagaagctccttcagctggtcgttcttgccgagcatccagcggttgatgatttccttcagttcataggggttctcaccgaagatggagtgtacgagcgataatatggtcgtatctcctttggcagccaattcgttagcttgcttgaagtaactgtcgatgaaggctttcatttccgggcgtaccgggatatattcattttgtccttccacatactccacacggtcccaagtgatagggagcgatggagaatcgtatgccggacgcttcatctggtcgatgtaccaatccgtttgcaggtagcttaggttgcaggtacgggcatctgtgcggaagccttctgtttcctgattgtaccacaaggggaaggtatcgttatcaccgttcgtgtagatgatcgggttgcctttttcctgcagagtcatcaggtagttctgtccgaagtcacgtgccacaaaacggccactacggtcgtgatcatcccacgtctggcttgccatttgtatggggacaagcaaacagatgatggaaaggatgcacgccattgccgcagacggtttgtacgggatgtaagtttcgtatagcgagtcgagcttatattgcagctcggcctcttcttcttccgtgataaacttcgctcttttctcttccagcgtttttctaatcttctcggcttcttcttccgtagctcctgcgatgaggcgttgttcgggtttcattcttgagcaccactgaatcagtcctgccactcccataccgacccagatagcgaaagcatagaacgaaccggcatacgcatagtcacgttcacgaggctgtgcgggtgtctggttgaggtagagcacgatggcgatacctgtcatgaagaacaggaagaatactacccagaattgctggataccacgctggttgcggtaagcctgccagaagagtccgatcaatccgagaatcaacggcagacagtagaatacattgtgccctttgttgttcttgagatcttgcggaagcaattcctggttgcctacaagtatgttatctatgaacgggataccggtgatccagttgccgtgttctatctccccgctaccctgtatgtcattctgccgtccggcaaagttccacatgaaataacgccagtacatgaagttcaactggtaggtgaagaagaatttgatattttcccactgggtaggcatatttaccattaccatttccccgcattggtcgtatggcacatcatggcctttcacgttcacccattgcttgtaaagttgggcgtgtgaggaactgtacatacgcgggaaaagcatattctgcgcatattcgtactcgatacgtcccggaagttcgatgtaagagtctttctcgtcgggagaaatcttctctttgcggacatacttgctgcccgtttccgactggcgagggatgcaatagccgtcttttacgtcaagcgctacttttgaagagaaagcaggaccgtagaaaagcggacgtgtcccgtattgctcacggccgagatattcgcctagcgtgaagatgtcttccggcgagttctgatccatcggagtgttggcggtggaacggatgacaatcagcgcgtatgaagaatatccgattacgatcatcatggtgcatagcatggctgtattcatggtacgtgcggaaatacgccatttctctttgattttagcctgtacgttcggagcaagataaatgcccaaagcggcaataaccagaataccgataacgatactgcttgggccatgaccgtagaacgggatacccagcaaggcaatcgtcaagatgaatgaaatagccatgcgtgtcttgtccttttcggtgtagctttcgtatactccccaaatcaaggcggctgcaagcaggacgatataaactacaacgccggaattgaacgacattccgaatccgttgacaaacagcagttcgaaccatccgcctactttcacaatacccggcacaatgccgtagagcacggcggctactaatacgcctgaaccgagtagggctataaaagagcctttggcagtagcgctcggagttttcttgtagtagtataccagtacgatggcaggcagacagagcaggttcagcaagtgtacgccgatacttaagccggtcagataagcgatcaggataatccagcggtcgctgtgcggttggtcggccacgtcttcccatttcaaaatcagccagaaaacgactgcggtgaacagggaggagaaagcgtatacttcaccttctacggcggagaaccagaatgtgtcgctgaatgtatataccagtgcaccgaccagcccgctgcccataatggtgataagctgccctttggtaatgttgttctcgtcggtgatgataagcttgcgaaccagatgggtaatactccagaaaaggaacaggatacaggcaccgctcatcagggcgctcatgtagttcaccattttcgcaactgtcgttacgtcagaagcgaactgtgtaaaaagattcgccatcagcatgaagaaaggcgcgccgggcgggtgtccgacttccaatttatagccggtagttataaactcagggcaatcccagaaacttgcggtcggttctatcgtcatgcagtagactgttgccgcaatgatgaatgtaagccaacccatgaggttgtttacggttctgtactgtttcattagcactatggtagtttattcgttaaaaacaagttatgcggtcgcaaagatagtgatttaactgcataatgcagaagaaagtaagatttattaagtataagggaaactctttgatagttaatgatggtgatgatgctctcctaaaatccggtgaggcaatgtgccgtgtcccaatagctcgatagggcagttgaagtttctttccagccattccgtagtaacgcctgtatccggatggtaatccaatgtttcgttgacacaagcgatggattttacctgttgcagcacggtgccgatgtcgtggctgacaaggatgatggcgcactctttattgatttcagccaataactcataaagacgcgcttcgaaacgtttgtcgatatacgtgctgggttcatcgagaatcaataccgcagggtcggagataatagcccgtcccagcaaggcacgttgcagttgtccgccgcttaattgtccgatagaacggtgttctagcccttccagtcccatacgggagataatctgtttgcctttctctttctgttcggaagtgaatcgggaggtgagagacttttgtatgctcaatcctgacaggatcacttcttccaccgaaataggaaattttttgtctatggtgctgtactggggaagatagccgagtgagggctgaatatcagacccttttgtggcagggatgtgtaaaataatctctccccctgtcggtttcagcagaccgaggatacacttgataagtgttgtcttaccacctccgttgggaccgataatacctaagaaatcacgttcgtagacgttcagattgacgtcatggagaacagtgcggccgtcatatccggcggataggttctttatttcgatgattggtttcattgcttgaaatggctaggcaggttcttgattcttctattttgcttcagcttgcggagcaagtgcttgggctacgttcagcatttcttcttcccaatcatagcttaacggattgatggggacaactttcgttccggtttgttgcgcgatggtttccgcattgcgcttgtcaaactccggttgtacaaagatgacctgtacgttttctgcccgacatcgatctattaattccttcaaatgagcaggagagggttcttttcctccttcttcgatagaaatctggtgcagtccgtagtcgcgggcgaagtaggagagagccggatgatagatcataaaggctttggctgcctccggtgaagaaagttgttggcgaatcaggcggtcggtatgttgtatacgttggcagagagagtcgtagcgagccatataataggcgtcattggctttatccaattggctgagggctttataggtatttcctgcaataattaatgcattggcggtagaattccatatatgcggttctacagcatggatatggccgtcgtgggggctatgtccgtttccatgtccgtggtcgttattgttcaagataaggtcgattcctttggaagtatcgaatacctgaatatggggcgtattgttcatcaagcggtccatccaggtttgctcgaagccgatatatccgatgcggaagtaggctttgctatcccctaaagaaacaagttgctggggaaccggatcgtatgtttccgggctggaacctttgggaaccatgctgagtactttgaacttatctcccgcaatggcttcggtgaagtaacgttgaggctccaacgtaaccgtaattacaggtttctcttcataactgttggtttgggacgggcgtccggcacaggctgccaataataggcagacacttcccaagaataggtttcttatatcttttagttgtttcttcattgctctttctatttcgtgattttctatcttatttctcatttcttgtttttcgggcgcgcaatatctcccgttttcctcccggaggtcccggaaggcgttctactgtgaatccggctgtttgtaacattctccggacaacccctttggcacaataggtagtcaggatcccgccttcgtctaataaaacgtgaagacagttgaatagttcttgcgaccacatttccggttgcttttcgggggcgaaagcgtcgaagtaaaccaaatcgaattggaagttgaaagtgctttcaactttcaattgatttgcgtccttttccattttccgcaggatgaaatggggagtgagttgtacgtcttcttgccagggagatgtgtggagttgtttgaatagctcgatggatggttgcagttcaccgtttactaataattgttcgtcattgcggacatatccgagctcttccactgtctgccattccaaaggatataattccaatccggtgtaatgtatatgtcggccgctctgttcggcctcttcgagggtgagccatgcgtttaatccggtaccgaaacctacctcaagaatacgtggggcggtggaagcagaagccttcagtcccatctcaataaagatatgttgagattccgtgcgtgctcctttcgtcgaatgataatgttcattcaattccggaacaaacagggtagcgctcccatcatcggttttctcaataattcttttcatcactcactctaatgttttgttatctaatattcttacattcttatgttgccactgcatcccatgcgctttcgagcacatataggagaaggatataacgtattagtttgccgagaaacatagaacctaccgtaatccatgtgttgctccgcataaatcccagtgcgatggcaatcacttcccctatggcggggaggaaggcgaagaatgccatcatggctcctttcccttgcaggaagtttaccatcttgtctactttttctttctttaccttgaaatatttctcaatccaggcgattttgcctaagcgtcccatgtaataacatgtcattcctccggcggtattccccaaagtggcggacaacagacaggcgataggaggcaagccaagcttgattaaggctaccaataccagttcggaactgaaaggcacgatgctccccgccaataaagccgagataaataatcccggaagtccccattctatgaggagttgtatcgctgagtctataaaagcgtccatatattgaatgcgaataaaagggtgagactgactaaggaaatgatgaaaaatacattcgaacttttgctgttggtcagtacaaaaaagtgtcctatcagaatactgttgctaatcataagcaatggcaacaggtcattgcagtaattcggttggatggctatcagcaggaagaggaagatggtcaagtctatcaggaattgcagataggcgcgtgtgcgtatcttatcttcaaacccggcagcgatacaatgaacagcactgacaataaacagtataagcagatatcccaatatcgccagttcccaagactgaagggtctgtaggtggaaagcttctccgaaagttgacagctcgataaaaggacggtagaacaggtccatctcattgtagaagaatgcgtgtccgaacagaaaccagtaaggcaacatccagccgagcagtgccccgcagaaactgcgtagggtgagagattggaaacgataagcctcaagtatccaaagtaccgaaaaaacagttagttggggaaaaatgatacttcccattccgataaagaggaaggaataaaaaaggtaacccgccgcgtgtgattgctggtagcttctgaacaggaaatagatggatatcagagaagccaaagcggcaatatctcccgcatatagcagatgcatctccggacagacggtgacaaacaggaagtaaatggctgtctgcatggaagccctcatacggataatgccgaactgattgttcagttctattaagaaatagccgataatggcgtagattaggaagctgacgatctgttccgcccagcccggaagcaggaagctctgtatggattgccagaagaaaggctggttgtcctgtgtggggatggatgcgagttggggaaataaaaaggaggtcgacacccagcaaagagtgcagataagggtaacggcaggcagggtgaaccgtcctgccgttacttgattctgtaaccttttatttctcattcgtctattataaatcgaatccgatatcgcggcggaagtacttcttgtcgaagttgatcatatccgccaccttatagctctgcgccaatgcttcttctttggttgcaccgtaagagcaaacggcgatgacacgtcctccgtttgtcattacttgcccgtctttcattgctgttccggcatggaagatgatactgtccgtagcggcagcttgttccagtccgctgatggggaatcctttttcgtaggcttccgggtatccgccactgacgagaatgacacaaccggctgaacgtgggtccataaccaatgtcttttcgttcagattgcctgcggcagtgccttcaagcagttcgacgagatcactttggatacggagcatgacgctttctgtttccggatcgcccatacggacgttgtattcgataaccatcggctcgccttttacgttgataagtccgagaaagatgaaacctttgtaggtgatgttttcttctttcagtccgttgattgtcggttcgataatacgtgtgcgtactttttccatgaacacttcatcggcgaacggaacgggggttacactgcccataccgcctgtattcagtcctttatcgccttcgccgatgcgtttgtagtctttggcaacggggaggaccttatagttttctccatctgtcagtacgaacacggagcactcgataccacttaggaattcttcgatgacaacagttgcagatgcagagccgaacataccgccgagcatttctttcagttctttcttcgcttcatccagagtaggaaggataagaacacctttcccggcacaaagtccgtcggctttcagtacgtaaggagcttccagtgcttcgaggaaggccagaccttcttcgatgttggtggaagtaatgctcttataacgggctgtcgggatatgatgacgcatcataaagccttttgcaaattccttgcttccttccagctgtgctccctgtgcggaaggaccgataacggcaatatgttttaactccgggcgattctggaaatagtcatagattccttctaccaacggatcttcgggacccactactaccatttcgatgttttctttcaaggcgaaagtactgatagcgtcaaaatcagttgctttgatattgacattctcacctacggcagttgttccggcattacccggtgcaatgtatagtttttcaactttcggactttgggctattttccatgcaagtgcatgttcgcggccacccgagcctagtaataatatcttcataatgagttggtattatagatgttcttcaaaatatcgggtaattttctcgtgcaaatgtacgcggtcacggcccattacgttgtgtttatggcacgggtaaatgaacaggtcgggataggtgcgtgcgtctacgcaggctttcatgaacgatagggtgtgctgcggcacacaggtgtcatcatgatcgtcatggataatcaacagatggcctttcagctgtccggctaagttcttcaaattacactccttgtagccttccggattcgtttcgggtgtatccatataacgttcgccgtacattatttcgtagtacccccagtctatcacaggacctccggcaacacctactttgaatatttccggatagcggagaagcagggcagtagtcatgtgtcctccgaaactccatccatgtacgccgatacgctcactgtccacgtaaggtagggatttcagatattctataccttttacttggtctttaccttcttccacaccgagacgccggaaagtagcgttctcaaatgctagtccacggttactgctgccacgattgtcgatggtgaacatgatataacctttatttgccatataagtatcccacccgcgtgcaccgttctgccatcctccggtgacacattgtgcatgaggacctccgtagacatagacgatgaccgggtatttcttgcttgaatcgaagtctgccggtttcatgattcggaaatgcaggtcggtagtgccatcggctgctttgattgttccggtttcgatacttggcatttggtaaccttcgtaaggacttttggcggttagcagattgacggtttctttgaacttctttgtgtctaccagattgataatgcggggttggtctttggtcgaataacggtcgataagatatgtgccggatgcattgagcagtccgttatgttcgctttcttgagaggtactgaatggctgattcatctttccgttggcggtgttaacggcgaaatgtccgctcttcaacccctctatggcagtgaagatgatatctttgcgtttggcattgaatcccagaatctcacttaccaaccaatctcctttagttagttgttttaccttacagtattgacggtatgtgccaccgttggcagaagtatgtgtttcgggatatatcttggtgtgtgtatcgaagagataaaggtggttgtagccatcccgctgactttggtagatgaacttggtgtcatcccatggcaagaatacgattggattttgcggttcgacgtatttgggatgtgtctcttcatataaagtctgcatcagctcacctgtctctgcattatattggcagagtttgacatggttctgatcgcggtttacctctatgagataaagacttttttcgtccggtgcccaactgatattggtgaaataacgattggtgggatcgcctgtattcaagtaaatgtttttatcggtagaagggttataaataccgacttgtaccttgtggctggtcattccggccatcggataacgtatgttatttacttctcctacacgtgctgtgatgtctacaagcggatattgagtcaccatactttcgtccatacggtagaaagcgagcaaattgcctttcggactccaaaaggttcctttgttgataccgaattcattgcggtgcacagattgtccgcaaacgataccttcgggttcgttggtgatttgtcgtccgttgacatacagattgttttttacggtataggcgagattcttattgatagcatagtcatagttggcagatggttctttgggtaggtcatctctgccgataacttcttccttcttccaattgtaaacagcatagcggacgtttctaggtagcaatacttccgttttgtcatcccagaggaattggaggtcgtaaagatgagataactttgggtatccggcagatgccagtgctttgtttacttgttcacgggtgaacaggacttcttcttttcctgtttggggttgaaccgaataaagagtgtcgatgcccggtttgatgcattcgtcaccccaccattgcagtccgtacaggttttctgcatagaggtaactctcgccgcccggaatcagttcttccagcatcggctttttggtttcttgtgccataacattgaatccgattggtagtgccaacaataacagaatagctctttttccaattttactcattgctcttttctttattatttgttttaaatccttctatttttactctgtccaaaggagtctgctttatttgaatggcagcactcaatttggcaaaagcggtgaataggtcatcaaattgcttctcgtagctttctctgtcggaggatatgtcctcttccaagtattcaatccttttcctcaattcttccaattcctgttttggagcatgggagagcaggtattggcgcatgtggacaaaggctcgcatgatgttgatgttgacttcgatggctttttcactatttaaaagacctgatagcattgcgactccttgttcggtaaaggcataaggttgatatctaaaccagtttatttctaaggtgccattttggcaccttatgttgtttatcagtaagttagcttctgcttttgtaagctgaaacataaaatccgcaggaaaacgatttatatttctttttactgttcgttttaggttctttgtttcaatctcatacatttctgccaaatcaaagtcaagcataaccttttgtcctctgatttcatatattttgttttctataataactaattcattcatttttagtctaattggtggtttactatctacgcctattacttaacattattgttgtttgaacttgagatcacaatttgtgacctcatatgtctatcagttagttaataggcaatttggcgtcaatgtataattaaatattgatgcttgtttattcctcttccttcttcggaatcctcggctcccggttccccctaaattctcttggccctcttgaatctcttcctccgcggaattctccccgtggctttctatctctgtcatcacctttgaactcatcaccttctctgcgcggcttgtattctccctctctgcgaggtctggattcaccatcccgacgcggtttgaattcaccctcgcggcgtggcttaaattcttttctctctctgaatcttggagcctgttctccttcagcctctttcttttcttctccctcttcctggctcttgaattctttgtattttccgtcaaaaatctcatatttgcggaactcacactccaacggtccattgaacaaaggaaccttctgacttgctttcaaaccaatctggtcgaaacactcttcccgataagaaagcacccatgcttcgtttcctacaaacgcatgtttcagacgttcgccgatcatttgatagaggccgagcaaatcatttgtagaaatacgttctccataaggaggattggtaatgatgattgatttctcttttggctgttcaaactgctggaacggttggagtttcagcacgacgtctttcgacacaccggcagcttttatattgtgagtcgcaatctcattcgctttcggattgttatcatacccataaatcttatgagtaaactcacgctcctggctgtcgtcattgtaaatctcatcgaacatatccgcatcgaaatccacccatttctcgaaagcaaatcctttacggaatactcccggtgcaatattttttgcaatcagtgccgcttcgataggaatagtgcccgaaccgcacatcgggtcaatcaggtcgcattctccacgccatccggtcatcagaatcatgccggcagccaatacctcatttaacggggcttctaccgcttcctggcgataaccgcgacggtgcagtgattctcctgaagagtccaaagacaaagtgcaagtagtctgtgcaatgtgaatattcagcagtacgtccggattgttgatgcggacagacgggcgtttcccggttttctcgcggaagtaatccacaatcgcatcctttaccttatatgaaacgaactttgaatggcggaattcttcgctgaacactaccgcatcaatggcaaatgtcttgtttacatcaagatattcttcccatggaatggtttgtatctgattataaacctcgtctgcatctttagcagtgaagtttttaattggtttcagaatgcggatagcagtacgaaggcagaaattggctttatacatcatacgtttatctccactgaatgaaaccattcgacggcctatttgaatgtcgttggctcctaatgttgtcagttcctctgcaagtatctcttccagtccttggaaggtcttggctatcatttcgaattgttcgctcatatatattatttgatattatttttttgctttggtttgtacgattcttgctccggcaggcacgttctccgttacccagatgttacctcctacagttgcatcgtgcccgatagtgattcttcccaaaatagtggcgttggaataaacaataacattgtcctccagaatagggtggcggggaatccccttgataggctttccgtcagcatccaacgggaaacttttggcccccaaagtaacaccttggtatagtttgacattattaccgataatactggttgcaccgattacgacacccgtaccgtggtcgatagtgaagtaactgcctattttagctgccggatggatatcaatccccgtttcgctatgcgccatttctgtgatgatacggggaattaagggcactccgagttccagcaattcgtgtgctatccgataattgctgatagctttaatagctggatagcagaagattacctctccatagctttcagcggcagggtcaccgttataggcggcttccacatctgttgccagtattttcctcatggtgggcagtttgctgataaacttagcggcaaggcgggctgcttcttcccgtttggaatcggagcagacgttgcattttccctctatggaagtactgaaacacaatccggccagaatttgctctgcgagcagatcaaatagtttttcaacgtttacaccaatgtgataattgatagtccggctgttaatggtcgaatttccgtaataaccgggaaatagaatagagcgtgagagctcgataatttcatacaagactttagcagaaggcagtggttcgccatctttgtgttgatgaaacagtcctttgtaagattcgctttccgatagctcatcgactgcctgtgtcagaatgtgggtgaagttcagtggactcattaggtcagttactcatatttatatgggtacaaaggtattaaaaaaataataagattgattgggattcaggataaataatgtattttcacgtggaacatccgattatataatgtgaaatgccacttcttcaccagaagcggcattccttgctattagaatattagaatgagagagagttttgttacatatttgtattatccatcgtaacggtcatttcgggaaccaatacgtaggcttgctttttagtgttccatttatagtagttggtagtgacggttttaccttcgtaaatatagttgattcgtaaatctttttgccattcatccttgtcactgtcccatctcaaagcttcactttcaaccatccgtttgctatcatcgtacttataattgtacttcatgtagttagcaagggtacttccgtccattttgtaaacggtttgtcctattgtcataccattttcttctaccggattgtagatcagttgaccatcattgctgcgcgcagaagtggcaattgatgcaaccagaagaactgctgatacaacgaacatctttaaaaatactttggctttcatggctatttaagtttttgagttattctttcatttttctataactgcatctgttttacgctgcgaaattacatattaatttggtatttatgcaatattgaagatgaaatattatcaaaatgtcagatttgtgcgttagtattgacttgctttttggcaatattggtgacaaaaaaatatccggcagtcaatctgccggatataggatgaatcacttcgttgaaaaagtgttcctttttcttgctttctggttgtcaggttaaataatgttattacttaatccttttgaaattttgctggtatgcactgtggcggtgcaagatgcattatcggttttaatgtgcttcgagccagttctttccccatccgcaatccgcttttaagggaacgtgcatacggtatgctttttccatttcttcgataacgatttcttctacccgttctttctcatcaatggggacactgaaatttaattcgtcatgtacttgcagaatcattttggtttttattccttctgcccggaaccgttggtaaatacgtgccatagccaccttgataatatcggccgcgcttccctgaataggagcattgatggcgtttcgttccgcatatccgcgtacgactgcattccgggagttgatatccggcaagaaacgtttccggtggaaaatcgtttccacatatcctttctcttgagccacccggatactctgatccatgtaggctttcactccgggataggtttcaaaataaccgtcgattaattctttagcttcttttcgttctacattcatccgttcggcaagtccgaaaacggatataccatatataataccgaaattggcggtttttgctttgcggcgcatatcagagtctacctctttcagtccgatcttataaatctttgcggctgttgcagcgtggatatcatgattgctgaggaaagcgtcaatcatattcttatcttcactgagatgtgccataatccgtaattcgatctgtgaatagtcggcggaaaagaaaagacagccttcatccggaataaatgctttacggatttctttcccgttttcgtcgcgtatggggatattctgtaagttcggattgcttgagctgagacgtcctgtagcggtgacagtctgattgaaagaggtatgtacccttcccgtacgtggattgataagttgggggagtgcgtcgatatacgttcccagtaacttcttcagtccgcggtgttccagaattttctccaccaccggatgtttgtggcgaagactttcgagaacctcttccgaagtgacatattgccctgtctttgtctttttggctttttctacaatcttcagcttatcgaacagaacttcaccgacctgtttcggcgaagcgatattgaaagtctcgcctgccagatcataaatctctttttcgatgcgttccatctgttctgtaaaatgagcggacgactgtttcaacgcttccgtatccaataacactccgtttctttctatattgaccaataccgggacgagaggcatttcgatatcatagaacaaacgttcggtgccattctctttcaattctttctccagtacgtttttcagtttcagcgttacgtctgcatcttcgcaagcgtagcggtaaacatccttcggagcaaggtcgcgcatattcttctggtttttaccttttggccctatcaactcatcgatatgaatcgtctgataatgcaaatagatttctgccagataatccatcccgtggcgaagttccggttgaagaacatagtgagcaatcattgtgtcgaagagcgggccttttacttccactccataattttggagaacaatcatatcgtacttgatattttgccccactttcagggaactttcgttttcgaataccggtcgaaactcattgacgatttttaacgtttcttcttggtttgcgggaaccgggacataaaatgcttcattttcggcaatggagaaactcattccgaccaattctgcatccatcggttccgttccggtggtttccgtatctaacgagagaattttagatgtaagtaacttttgaataatttcctttcttttctcttctgtatcaatgagttgatagtcacaacagagcgattctaacgtctctagattcgattttttggcttcactcggctcattgcccgtgaaatttgcaaataaatcgccttgtatcccttcacttttttcgggaaagagtgggagaggagcggaagtctcttttttaagtacccggtcgataagtgttctaaattccagttcctcgaagatggaacgaagcgcctcttcgtccggttgctcgcgaacgagcgcatccatctcaagttggataggtacatcgattttgatagttgccaggaatttagagaatgttatcatctcccggttcgtttccacttttgtctttaatgctcctttcagttggtcggtatgctccaataggttctcgatacttccgaattcggcaatcagtttctgagcggtcttttcgcctatgccgggacagccggggatattatccgaagagtcgcccatcagaccgagcatatcaatcacttgtgccggagatttaatatcgaacttggctttcacttcttccactcccattacctcaaagcctcccgtatgtttgggacggtacatgaataccttgtcacttaccaattgtccgtaatccttatcaggtgtcatcatataagtagtgatgccttgacgaccggcttcggtagcaagtgttcctatcacgtcatcggcttcgtaaccgggaacctccagaataggaatgcgataagcacggataatatcctttataataggtacggataaccggattgcttccggagtttcttcgcgttgtgctttatattgttcgaaagcttcatggcggaaggtaggccccgaagggtcgaaagccactcctatatgcgtcgggttctcttttttcagcacctcttcgagggtattcacaaagcctagtatggctgaagtattgaatcctttggagttgattctggggtttttgataaaggcgtagtatgcacggtatatcagtgcataagcgtctaaaagaaataatttattatctgaatccatagatttaattaatttttcatggtaaaagtacaaaaaaataccgtattaagcgttttattattacttttgtgctcaaattgtgtagtaaatggacagtatatcacttatcagaactccgattgaagcggaactggaggctttcaagaaactttttgatagttctctttccagttcgaatgcattgctcgacagtgtcgtatcccatatacggcagaggaatggtaagatgatgcgtcctattcttgtcttgttggtggcacgtctttacgatgtcgtccgtccttctacccttcatgcggctgtttcgctggaactgcttcatacggccagtttggtgcatgacgatgtagtggatgagagcaccgaacgtcgtggtcaactatccgtaaatgccatctttaataataaggtagccgtgttgacgggggattatttgcttgccactagtctggttcacgccgagcaaacgaaaagccatcttatcattcgactggtttctttgctggggcaggaccttgccgacggtgaattgcttcaactttcgaatgtaagtaatcatagcttctcggaatccgtttattttgacgtaatccgtaagaaaaccgctgctcttttcgctgcctgcacgaaggctgcggctctctcggtagatgcaaatgaggaagaagccgaattcgcccgtttactaggggagtatattggtatttgcttccagattaaagatgatatttttgactactttaatagtaaggagattggtaagccgacaggtaatgatatgctcgaaggcaagttgaccttaccggctctctatgtgctgaacaatacgaaggacgatactgctcgggagattgcgatcaaggtgaaagacggtacggctacccctgacgaaatagcccgtttgatcgcgtttatcaaagaaaacggaggtatcgaatatgcaattcaaaccatgaacctgtataaagagaaagctctcggattattggcctctttgccggattcggatgtatgtacagctctccgggcctatctgaattacgtggtggaccgcgaaaaatgattactttcgatatttatccaagcgggaataacaagacaagaatcgatcccaatcttctatcttttctgatttcatagctttgcctattaggaagcttttatctatttcttccggtgtatggagtacatcagcgcataatgtattggcctgttctatgtatctccaggcttcttcttttgtaatatatccgcttcctaaagcactgcgaaccaatcctacgagcagccccatatcccatccgacaatacctctttccaaatcatttatccatataatagggtctcttctttcctctgtatacttcacgaaattgtatagattctttccttgtcggatgaagcgttctattccggaaaagcgtttgtggatgatctcttcgagctcatgtatgttacttgctgaaagcaggtgaggaagcatgatttgataggagaccctatcgccttcattgatcagaaattggaataatccggtgacggattcggtgtcgttacaataaaatttctctaacaataaatcggataatttttgcggatgcattccggtttctatggaattaagataaaatccttccaatgcggcttccatatagccgatgcgtaatccttttttcctctcggttttgaggaatagatttagagggttatgattgaatcgtaaggttctcgtgtatacgtccatcctatactttcattcagatttaagaaaagcgtgagaactgttgcaatgtatcctcctgaggcttcggcaagccgttatgataatacaagcaacagtcccacgctccattcgatatataacaaaagtatatacatgaaggtgcgtgagacccgtttgcttattaccttcataactttgaattttgccgaatttcaggaagttggtaataaatgaaacgttctctaatataactgattagctatattttcatcgctaaatcgtttacaaagataacgaattttccgaattgtaggataacgaactttagtttttcttaatataaaaaatgccgcgtcggcttccgtaaagacgggagccagcgcggcagggcatatttgattgctaatgtagcccttggggtttagaagaatttgatttcttcgcctttgatatccgaaaggaggagattggccagacggctggtacccaagcggaacagctggttgttgagccattcctcgcccagtacttccttgacgatggtgtaataaacaactgcatcgttgactgtattgatgcctcctgccggtttgaatccgactttatttcctgttttctgatagtattccttgatggcttcacacatcacatacgcagcttccggagtggcggcaggctgttgcttgccggtggacgttttgatgaaatccgcacccgaatacatggataggatagaggcttttttgatgttggaagcactcttcaaggctcctgtttcgaggattactttcagatgatgttctttgcatacttccttcaactccactatttcttcgcacattccttcgtagtctccgctcaagaactttcctatggagatgacgatgtctatttcatcggcgccgtctgtgattgccaatgcagtttctgctacttttacttcgatgaaagtctgagatgaagggaaacctcctgatacacaggcgatattgactccgtctacctccaacgtattcttgacgatagcggcaaaattaggatatacgcagattgccgctacattcttcagatcagggtattcatcgtcaaactgattgactttttcggtgaaatgcattacgctttcatcgctatctgtgctgttcagtgtagtcaggtcgatacagttgaacaggaacttcttaacgtcttccgtattgttttccggaactttcttcttgatcagttcggctacgcgagcttggatgtccgcatcgttcagattggtgttatactttgccagtgcggcatcatacttgctaggctgtgagttattctcttccatgatctttcagttttgggttgttgatatgtcttttattatctcgtttcgttttcttgtctatactcttttgtaacgcatcggtgatgtctacacccgtctggttggcaatgcagagaagcacccataatacgtctgctatttcttcatcaaggttgtctttttctccctctttgaaggattggtcgccatattttcgagccataacccgtgccagttctccgacttcttcggtcagaactgccatgttggtcaactcgctaaagtagcggacaccgtatgtcttcacccattggtctacttgtttttgagcttcttccagagtcatttctttagtgcttaggggttaataattgtgattaatagggttgttactgatggttagtcagtctgttattctttgttcttggtatctatacatatagtaacagggccgtcgtttaaaagttcgactttcatatccgccccgaaagtacctgtaccgattgccttgcccagtgcgctactcagatctttgcagaactgctcgtaaagcggaatggatacatccggctttgcggctttgatgtaggagggacggttccctttcttggtggaagcgtgcagagtgaactggctgacgaccagaatctcgcctccgtcttccagaatagacttattcattactccattttcatcgtcgaaaatacgtagatttactatctttttgcagagccagtcaatgtcctcctgaccgtcggcttcctcgataccgactaaaatcagcattccttttccgatggcagacttgcagtttccgtcaatagtgactgatgcatggcttacccgttgtataacaattcgcattactcttcttttatttcatgattatgaaaggcaaatttacaaaattaagaagagaaaacggtgtattgggaagaaaatattataatccttctttgactatttttgctttggcttctccgacaacggcagcaatatcctctaatgaggcctctttgattcgttttacgctcttgaactcttttagaagagccgttttggtcttttctccaatccctttgatggtatccagtgcagatgccacttgccgtttgctgcgtttatcgcgatggaaactgattgcaaagcggtgtacttcatcctgaatctgtgtcagtaggcggaagagtgggctatgctgcttgataccgattatttgcggtggaaagccgaataggagttccgatgtacggtggcggttgtcttttgccagtccggcaataggaatattgaggtgcaactcatcctcaataacttctctgacgacctctatttgtccttttccaccatcagtgataatcaagtcgggtaaaggagcgttttcttcaatagcgcgctgataacgccttctgacgacttctttcatcgaagcgtagtcatccgggcctacgacggtctttatattatatttccggtaatcctttttcgatggtttggcttttttgaatacgacgcaggctgccactgcgtcagaaccttgtatgttcgagttatcgaaacattcaatctgcaatggtggcctttccaaatgcaattcttgttgtatctctttcatcaaacgcatgctcctctgctccggattcagcttttccgcctgcttcaggcggtcggccttgtattgcttcacgtttaagatggaaagttccaatagcttcttcttatctccccgttggggaacggtgaaaactacattattcagctccatatcaagctcaaaaggaacgataacctctcttgactgactcttgtaacgctctcgcatctcgataatgcccagcgtcagaagttcttcttttgattcattcagcttcttcttatattcgaaagtgaaagcctggttgatagctccgttggtgatatggaggtaattgatgaaggctgaattggtttcgtcttcttcgatagaaaagacatctatattatgaaggacagagctgaccacctccgacttcgaacgatagttttctattaaaagatacttctcttttattttctgtgcctcctcaaacttcatctcacctgccaatgtctgcattttctccagcagcatacggcttacttcttgcgtatttcctttgagaatctctttgatttcatcgatattcttgaggtagtcttcctgtgattgcagcccgatgcatggtccggcgcatttcttgatatgatattccaggcagacattgaatttacctgcccgaatgttctccgggcttaagtttaaattgcaagtccgcaaaggatatagatgctttattaagtccaataccgcatacatcgaggggatgtggctatacggaccataataggaagaaccgtttcttattatctttctcgttttgaaaactcggggaaaatattcgttttgtacgcaaatagaaggataagtcttgtcatccttcaataaaacgttgtaacggggtttgtatttctttatcagattattttccagaaggagagcgtcctcttccgtgttgactacaatgtagcgaatatccacgattttgctgaccaacacccgtgtctttccgggttcgtgttctttactgaaataggagtagacccttttctttaaatttttagcctttccaacgtatataatcgttccttccgaattcaggtattgataaatacccggcttttcgggtagattggctacgattcctttcagatattcattgaacttcgcttccatacgtatgcttattctcattctttgggtttcatcacacagaggacgcggagtattatagcgtcagtacggattctacctctacatcatcgccgaatacggctttcccgttcaggtctttcaactcgatgatgaagtttacatatacttttttaggctttagcattttcacaagttcacaagctgctttcattgttcctcctgttgccagcaggtcatcgtgtatcagaactacatcgttctcgtccagcgcatctttatgaatctgcacggtatcttttccgtattccttgtcataacttgcctcaagtgtttcggccggaagcttgcctggtttgcggataggaacaaagccggcattcaggcgggttgctaaaataggccccatgatgaaacctcttgattctatgcctataacttttgtgatacctttgtccttatacatatcgaacatgacatccgacaattcctgcaaacaccacgggtctttgaataatgtcgtaacatcataaaacaagattccgggaatggggaaatctggtatttcccgaatacttttgattagcgtttctttgctcataatcattgatttatatcgtttctttaaatgttttgtttcacgtgaaacgttgcacgattatcatcgtcccgaaagcaccagcaatacattgatgtcgcttggagatactcccggtattctgcttgcttgggcaattgtttccggatctatctttaccagcttttggcgggcttcggtagacagcgactgaatggaagcataatcaaacttccctttaatttttatactttccaatcgtgccagtttttctgctatcatccgttctctgtcaatgtatccttgatacttgattaagatttcagcagcttcgataatttcttcttttcggccctcatcggaacttgtcgctttttccaattcccgttggaatgccggaatatgctctgatatgttttcaatcgtcacttgcggacgattcagtatttctatcaacttgcatccttgacgcaggggagtggttcctatctttttgagtgcatcattgattaatgcaggtttcatcgaatagttttgtgcgaaggaaacgatttgctcc

SEQ ID NO: 11838 - DNA, 1484 bp, Unknown
  gut microbiota DNA sequence
aaaatatccagctgggccccttctttcattggaggaagaataaccgtaccttcaccttttaaacgactcaacgtagctaacttcctgccatccaagaaaacttgcgcccagtcatgagcctctgtgattgtcagagtctgttcctctttagatgccggtagtgtagtccggtacagaatacttccccatccttgatcaaacgcctccattgactgaatattttcactaatctttggctccggcaaattatcaaacagtatcgccacttcatccaacttgaatgacggaatggcaatagtcggaacagaatccggaatttccggcaatgactcgccttcgggtaaatagttacttaacaaattgcgtacctcaaaatatttgggagtgacttttcctgattcattgatgggagcatcataatcataagacgtacacgtcggagagaaattagggaaatttgctcctccccaatgtccgaaactagtacctccatgagtcatatacaaactaaatgaaatattccggtcaagcatttctttcattccttttaccaaatcctccgcactacgtgtctcatgcttcgctccccaatgatcgaaccatccggaccaaaactcactacacatcaacggaatatcaggacggagttcttgcaaccgcttaaattgatcgtcaatattagcccctgtaccaaagttgattgtccaaagcaaatcatccaatgcattattctcaaagttcgaattccagtcacattggaataaaggaactcctgtgaaacctgcttgctttacaatatcacgtatttcggcaatgtatggtttgtctattccgaatgatccatattcattctcaacctgtaccataatgatattgccacctttactaatctggagatcggtaagctgtttacccacttcattcatgaacaatttcacccgctccatataatacggatcctgttcacgaagcttgatgtccttcttctttaataaccaccaaggcaatccacccatttcccactctgcacaaacatacggtccgggacgaacgatcacatacattccgttttcctgcgccagccgacagaaagccgcaatatctttttgaccggtaaagtcatattttccctcttccggctcatgaaaattccaaaagacataaagacaaatggtattcatacctaatgccttacacattttgatacgatgctcccaatactcttttggtatacggggataatgaatttcggctgcttttaccacaaacgggtttccgttaagtaaaaatgtcttgtcccctatttcaaatgtctctttcgaagattgggaacaggaagtgctgaaaacagtcactaataaaataagcaaatacaataaaggtttcttcattttctaatctattgttttcatgatacaatactatttccaaataaatccaccatcggtcaatgtttccattcagaccgacagcgaatttgcaaa

SEQ ID NO: 11839 - DNA, 22512 bp, Unknown
  gut microbiota DNA sequence
atgtaaggaaactaaagaacttgcagggaaaggaaagctgggaacgacacatgattgcccgtaaacgcaagacgattgccgtgtgcaggagttgtcacaagaagatacatgacggaaagatagactgaaattagtggagagccggatacgctgagaggtgtaagtccggttcgggggcgagcatttggaaacctaccatagaaatatgataaggcgctgggtgcttagcctacacaaaacggttagaaagtacttcggtgaggctgtggttgtcactcaagagttggatgatatcgtgtcaagtcccattatcaaggacaccatcatcaacaatgccgattgcaagattctattggatcagcgaaagtatatcaacaagtttgactccgtacagtccctgctcggactgaccgacaaagaaaaaggacaaatcctgtctatcaatcaggctaacgatccggcaaggaagtataaggaagtttggattggtctgggtggtgtccagtctgctgtctatgcaacagagacctctgtcgaggagtatctcacctataccacagaagaaaccgaaaagttggaagtcacacaaatgaccgagaagctgggcggtaatatggagcaggcgatccgcgtgttggctaaagagaagaaaaagaaaaaataaacgattaaaatcaagaagcaatgaaaaagagaattttaagcatgttgtttgtcctgtcgccctttatggtaccggcaagcgtgcaggcacaatgggtggtcagcgatccgggcaacctcgtccagggtatcgtgaacagtgtcaatgaaatggtggaaacatctgaaacggctcaaaatgcactttccacatggaaagagacctcaaagattttcgaacaggggcgtgagtattatgataaactgcgtaaggtgaatgacttgatcagcggcagtgagaaagtaaaagagtccgtcctgatgctcagtgacatttctgaaatttatgtaaacaatttcggcaagatgctgaccgacaagaatttcagccagcgggaactgaatgcgatagctgccggttataacaccatcatgaagaagagcagccgcagcattgcagagctgaagaatatcatcaaccccaccggcatgtccatgaacgacaaggaacgcatcgacctggtgaaccgggtatacagggaaatgacacattacaaggaattggccaactactacacccgcaagaacctgcatgtatcctacctgcgtgccaaggagaagaacgagcagcaacaggtattcgacctgtacggcaaggatgagcgttattggtagtctacaattttaaaagaatcaattatggtattattatccatttcatttgaaaatatgcaccagattcttcggaatctctatgatacgatgaccaaactctgccacccgatgatggacatggcgatggcactcgctgcattaggggctttgttctatatcgcttaccgtgtctggcagtctctctcccgtgcggagcccatcgatgtcttttcgatgttacggccttttgtcctgggcatgtgtatccttttctttgacgtgatggtgctgggaactctcaacggtatctttagccccatcgttcagggaaccggaatgctgctccgtgaccagaccttcgacttgcagaagtaccagcaggagaaggacaagctccgtgcggacatgatggctaagacgatgatgaccggacgtgtctttgcttacaatgaggagctggatgcggaactggataacatgggctggagtgaggaggaacatacggccttgcagaccatgtatgaggtttcgtatgccttctccctgcaaggtattgtccagatggtcatgcgcaaattgctggagattctcttccagtctgcctcgctggtcatcgacacgatccgtaccttctttttgatagtcttgagcattttggggccgatagcctttgccctgagtgtttttgacgggctgcagaacacgctcatccaatggctggcacgctatatcagtgtctatctctggctgccggtatcagacctattcggggcgatgcttgccaagatacagacgctcatcctgcaggaagagatgaacctgatggccgatccgatgagtatcatcgacgtagacggttcctcggccatctatctgatattcatggtcatcggcattatcggatatttttgtgtgccgactgtttcgaactggattgtccaggcgggaggtatgagttcctataaccggaatgtcaacaatacggcatccaaggtgaccaatgtagccggtgctgcggcgggtgcttcaacgggaaacgtcggtgccgtattattgaaaaagtagaaattgaaaaaacataaaattatggaatttaaaagtttaaaaaacatcgaatcctcgttcaggcagatccgtctgttcacgttggtctttctgggcatttgcgcctcgctgactacgtatgccatttgaaggtcctatctctttgccaaccagcaacgggagaaggtatatgtattggatcagggcaagtcactcatagtggcgttatcccaggatgcggcattgaaccgtccggtggaggcccgcgagcatgtgcgccgcatgcatgaactgttctttacgctggctcccgataaggccgctatcgaatccaatatcaaccgggccatgtatctggcggacaagagtctttatagttattaccgggattggaacgagaaaggctattataaccgtctgatcagcggcaatatcaaccagactgtcctggtggacagcatgcagtgtgatttcgataactatccgtaccggatcaccacctttgcccggcagatgattatccgaaacagcaatatcaccgagcgttccctggtcacccgttgcttcctgcagagtacggtcaggtcggataataatccgcaaggcttcatggcggaacgctttgagattttggaaaacagggatataaggaccgttgaacgctaatataataaggtaatgaaaagcaggaagataaagacagagatcagcgaaaagctaaagaacgtttgcgaggagctgtccgaaaaagagcgtaagggagtgcttgtgggcatgctggctatcagtaccgttctatgtgctatcaccgtaacacgcgctttcgggcgttttctctcccacggcacacaaaaggagttgccgtttgtccatccggcggactccatccaccgggcggataaagacagtataatgtatcaccctaaaacccacgagtaatggaagataaagatttggaaaagcccgaagcggcagaagaaacggcggtacagccggaaaacgtcagagccttgaaggaagaaccggaaaaagagaagaaggtgctcacaccggaagagatggaaaaaagaaggaagttcattgtgattccggcctttgtgctggtcttcctgggagtcatgtactgaatatttgcccccaccggcaaggaaaacgggacggaagctcccggaaattcaggattcaatgtgaacgtgccggagcctaccacggccaaactggttgataagaagaccgccgcctatgagaagcagcaggcggaagtggaggaagaaagccggatgaagtcgctggagcagcttgccgggacattgatgaataatggaaaatcatccgataccggtgaaaaagaaaaggacggagaccggttgcaacagtctgttaatacctacgagcaaatctccgggcagttggatgatttctatgaaactcccaaagagacggcaagcggcgatctggaaagaaaagtggacgaactgaataaaaaactggaagaggcggaaaaggaaaagagcaaggcggctacccgtgaagaactgatggagcgttcctacaggatggcggcaaagtatctgaaccctgacaaggatacggttcgggagaaagctgtcggagaagaacccacggaagttgttccggttcagcgggcggagtatcagacgacttccggcctttcacgacctgttacggattccgcttttatcgcttcgctcactgtcgagaggaattacggttttaatactgctgtcgggagcagctaccaaatggggacgaataccatcgccgcctgcatttcggagaaccagaccattgagcagggaggcagggtaagactccggttgctgcaacctctgcaggcaggaagtattaccgttccggagaacagtctggtaacgggtgcggcggtcatacagggagagcgtctggatatcctgatcagcagcatcgagtatgccggaaatatcatccccgtgcagttggcgacttacgatatagacgggcaaaaagggattttcgttcccggatcggaaacccgcaatgcggcaaaggatgcggctgggacggtcagcgagagcatgggaaacagcgtatcattcgcacgttctgccggacagcaggtggtcatggacctgacgcgcggagtcatgcagggcggcacgcggttgattgccgggcgggtccgtgcggtcaaggtgacgctgaaagccggatataaggtgctgctggtcacaaagaaacaataacggattattcactttaataaaaaagataagacaatgaaaatagtaatagcattattgatggctgtactggcctcggtatccggtttcgcacaggaagaaagaccggcaaatcccgtcaggattctgacggcgggccagcatatcactccttataagatagaggtcactttcggaaagacggtgcatatcctctttcccactgaagttcgttacgtggacctgggaagtaacaatatcatcgcaggtaaagctgacggggtcgagaatgtggtgcgtgtcaaggcggcggtgaaggagtttccgggcgagacgaacttctccgtgattacgggagacggttctttcttttctttcaatgtggtttataaggaggagccttccacgctgaatatcaatatggaccagtggatgaacccggacgagggagaaaagaagggaggcagttccatccgtgtcacggaactgggcgaggaagatccgacggtcattgccagcgtgatgtacaccatccaccggctggaccgcagggacgtgaagcatatcgggtgcaggcagttcgggatgcaggctcttttgaagggcatttatgtgcataaggacctgatattcttccatgtttccctgacgaacaattccaatgtgcctttcgatgtggatttcgtgcggtttaagatagtggataagaagatagccaaaaggacggcccggcaggaaacttatattgaaccggtacgcacgctcaatgccctgacacgcatcgtgggaaagagcacgggacgtatcgtgtatgccttcccgaagattgtcattcctgacgacaagttgctggaagtggaaatttacgagaaagggggaggccgtcaccagcggttctatatggagaacagtgatctggtggatgcgcgtattgtgaatgaattaatcggtgagtaatcatgaaaagagttttatttattatgttatgcatttgtctgccctttgcggcaggcgaatgctttgcccagcgttacctgccgggacagaaaggtatccagctcatgttaggcggtgtggacgacttcggttcgaatgtgaagcatctgcgtggtaactttcagctcggagtggctctgagccggtataaccggaaccattcccgctggctgttcggggcggattatgtgaagaagcactattcctacaaggacattgcgattcccaaagcgcagtttaccggagaggtaggctatttcgtgccgttcttctcggaccgtggcaggaacgtgttcttctctgccggtctttccgctctggcgggttatgagacgaccaactggaactgcaagctgctctatgacggggcgactttaaagaatgacggatgcttcatttatggttttgccccggctttcgagatggaggcgttcctttccgacaggctggtttttcttttcaatgtccgccagaggatattcttcggatcatccgtggggaatttccacacggcggtagttgtcggtgtcaagtacatttttaattagcggcaatagtatggaacaaggcaattggaacgtggatgagatgcttcattggctggatatgaaaataaaccgggaagaccgggacatacgtgaacaaagcaagaagatgaatgggaatttcctgcactttttcgaatggaatgcggagagcctgtataagtctcattttatgtccgggtgttataagatactccggcaggcggtggacggggcaaaggacatggatacggttcggaatattgttgaggacaacattgcttactgtgagagcaaactgttgaacggtcaggtggattgtaacagttccagccggacaacgaatgttgcccatttcctgaagttggagtgtatgcagcagttggttagggattaccgggaattcgcgaatatccttgcgcaaacgcctcccgaagagaatttgcaacagacggctaataaaacagaaaagaagagagaagagccgcctgaaagaaagataaaaacgggcatcaggcgttagccgacaacggactcaatcaagtaaattattcatttagtaatacgtaaaatcatgaagatgaaattaataataagtggtatcatgctcacattgctttgcctgctgggtggctgtgatgataaattggaagtacagcaggcttatgatttctcgctaacgtcctggtatctccagaagaccatttccccggatgaaaccgtggagattcgtctgacactcaatcgtagcggaaactatgaggaagccggctatcaaatcggttatatacagatggagggcagcggcgaggtgtacgacaagaagaaggtctatctggtgaaccgggagatgcaaccgttggattcgatagcggagttggatgacagcgatccctgccgccaggtattcacgctcttctatcataaccgaagcagcaagaatgcggagattaaattcgtgatagcggataatttccatcaggaaagagaactggatatatcctttcagagcaaaactgaaacggacatggaactataaatcggacaacaatggataaaagtgatttaaggatcgaacaattgcagcaatatcttgacaagaagaaaggggttgtggaaagcgatataaaagagtataaccagcaactgggaaaaaactatcttcatttctttgactggcatgccgatgacttgtataaggcctgttatatggataagaattataaggccattcaggaggcgattgatgccgctgaaacgccgaaggatattgaagggattttgaagcgttataccctgtatatagaagatgatctcctgaacggtccgcttgtcaagaaaagtaccagcccgatgtcgaatatggcccattccctggagatagaatgcaaacagaaattgctgaaggacctccggtatttaaacaggcttcttcagagtgagactgtaagtgaaaggataaggccgcaagaagcaccccgacaagagattgtgcctgtgaaagaaaagaagaaaacgggaccacggttgagatagtatcaattgaaagcaataaaaaagctactgaatttttgtttcagtagctttttttgaattagtcaagacttaatctgacagttacgtataaaaagaataaatttgtaacagaaaacagattaagttatgacaacatcagaaaaggtcatcaagaacaaactgggattgcttgaactctcccaacagttaggaaacgtatcacgtgcttgtaaggttatgggctacagtcgtgacagtttttatcgtttcaaagagttgtatgaacaaggcggtgaagtcgccttgcaggagatttctcgtcgtaagcctgtcataaagaaccgtgtggaagaacacatcgagcaggcagtcgtacagatggcgatagacaatcctgcattggggcaagtccgtgtatccaatgagctacgtaagaaaggtattcttatttcgccgggcggagtgcgttccatttggctacggcacgatatggagaccttccagaaacgcctgaaagcattgtcagccaaagtggaacaagagggcattatccttgatgagaaccaagtggcggcattggaaaaagcaaaagaagaaaagcaggctcatggagagatagaaacttattatcccggttttctacttgcccaagacacttattatgtaggatatatcaaaggtgtgggacacatttatcagcagaccgtcattgatacttactccaaaatcggatttgccaagttgtatgacagaaagaatgcgcttgttgctgccgatatgcttaacgatagggttattccttttttcgagcagcatgacttgaaactgatgcgtatgctaacagatagaggaacagaatactgcggaaacagagaaaatcatgagtatgaattgtatttggctgtggaagacattgatcattctaagattaaggcgaaaagccctcagacaaacggtatatgtgagcgatttaacagaaccgtgcagaatgagttctatgctattgcattcagaaagaaaatctatacctctatcgaacagctgcaagcagaccttgatatgtggatgaactcctacaatacccaaagaacacactctggaaagtactgtttcgggaaaacgcccatgcaaacttttatcgaaggaatcgctgtggcaagaaagtatcaactgcaaaatcaggaaatgataaaaccgaatgagcaggataaaatctcattcggttgtgaggatgatgaaacttgtgtaacttcgcaacaaacatctgacagtttttttgtccgatagtaaaacaaatgtcagaacaagtcttgactattacacttttttatttatcccagtcttatattccggctataccagataagcctcaaaaagataatgtatgaataaccgacccttttccgtccaaacggtcaacatggccgtgccggtttctcctgtgcggctttcccatacatgggtccgggttgccgtatagccttgattctgataaggagctttgagcagccattgaccggattgacggaactggatgcctgcccatcgaagccgtttgttcagcataccggcagtcattcccaattctttcgctatctgtgtggtcgtgtaggtgctttgggattggaggactttgtcataatactgaacttttggggcctgtagcttgagtttcaggatagcatagttgttctccttctccaatgctgaaatacggctgtctcgctcttttatacggttctgtgcgagcaatatggcacgcgcaagtagttcattatccgtttcgccattcttcttaagaagatagccaccgttctttagtgtttcgggaaccagttcatcaaatatccagctttcgaatttctcagcggaaggcagcttgctaccggcaatcagccggtatacgttcccttcgctgatgtacttgattttctggacggcactgcgtgtaggggtgtcgtaaaccacgacgcccattggtttacaatgtcttacgacggcatctctcggattggagtagccaagtgcggcggcaacatctgaggcgcagaaccatattttcccgtcaatttccagtgtccggatgcgtccgaactcaggatgttcaaatattgatactttattcatgactgtttaatttataggtttcttctattgctttaaatatctcgtagactacctgggggacgatagcgttcccgtatcctttaatggatgcctgtcttcaccgagaaaaggagataccgtccagtcgggggggaagcccatcatctcggctacaaacaggggattcagctggaaactctttccagtccgggcgaagaaatcgggcaggctgttcttttccggtatccggcctctcttctccagactttccgggcttgccgcgcccttccagtccctcgctgtcggagtgggcagaagctccgccatcctcccaagccctacactccagacatggcctttctgattgatctttctcacctttcctttcggtgtcactatgatcttgtcgtttttccccattaccgcacccacaccggcatcgctggctaccggggtgggcagcagcatcccgtaaaagtccagaaagtcgctcaatccgttgggtttcttctcccctttgagctggctgtgcagggatggagcatgggcctgtttccatttgtgaaccctttccggatggtgtatctccgtagccaatggagtgggaaggagtatttcatggatcatctccggcaatccctgctggcggctgttcggtcccctgcgcttgtaatcctgggctgtcacggtgggcaataaaccatacccggtcccggcggtggggagctccgacggcacaagccggtataagtaccggctggacggaatatccttcacgttcaagatcacggcaaatggtttcaacaacatattgctgccgtcttttaaatacaggctcactctctccgaatagagtggactgacttcccacttcagtctcctggccgggctgtaccatcgtgaggatgccagcaacgttctcaccaatgacccaatcgggcctgatctcatgtatggccctgagcatatgaggccagaggtaacggttatcatccgctccttttctttggcctgcgacagagaatggttgacaaggaaaacctcctgtaaggacattgatttttcctctccattctctgaaatctgtcgttgcgacatctgtataactttttgcatctttaaaccagtaatttaaaatggtattacaaaaatcgtctatctcacaatggaaggcattctgccatcccattcattcggcagccaggtctggggcgccgaatccactaaacagagaagcgtgtaccagacgcttccgctgtttcttgtcttgctcttcttctttcattgtttattcattatttagaggttcgagattcattacttttttgtcgatcttacgatagacactccccatctccagcatattctccaatcggagcaggtccgtgatttcatagacggtcatccctttctgtgtcgtgaagcggatatatcctttctgtcgctgtatctccacttcctcgggagtcatgtgcaggacttcacagatttcctgcaaggtcagggtcaggcttacttccttaactgtgtagatgtaggtcaggatgttcagcatctgaagacatttgcggtgtgatttgacaagtgatgcgaatttgtttcgttctatgacgattactttagcttgattttccatgtgaatttttatttatgagttaatagaatcggatatgaaatcttcgtttagacattcttctctcaggaatttatatacgtcagaagcccagaagtaaatcttgccgctgagtttgaaaaatgggagtttgccggaattacgccagcggatcagtgtccggtcgcatactttcagcatcaggcgcatatcccggctgtccagcatttgcttgccgttgaaactggttactgcttccagagccgtttccagcttggcaatcagttttcgttgttcctcaaagttttcctttatcattgctttgagtatctcaatatcatttctgttctcttccataaaatattcctttgttccaatgggttatttttctttcttcggttgcaaagttttcaaaattgggcatgaaaaaatagggctgacggtaaccgccagccccatattttctttgtaacttacttagtatcaatgtcgatttacagaatgctttttttcttcctttaaggtagaaagaaaaatagcagtagttaccattcttttcaaaaagatatttataggtaaacaatataatgaagggcaccccaaaaatcagattttactcttctcagaactatcagtagaggggtaattttctataaaaagttttttagtaccctccaattaataccaagccttctaataaattcagattaacttgtaaccgtcaaaaacattaattacatttgtgttagagtaatacttgaaattgtacagagcaacagaatatgtagctggattgcgctactacaatactgtttctgccagttttaaagcagtaaaatgatttttcctttgttttaaactaaaaattatgacgaaacaagaactgttaattgggaagcatccagataattcacatccttatgggaaatggcttgctgcaaatgatttgccagattcctatatgaaatgccacagggaacttactgaaattacagctgtagatgatgagttaatagaatggatggcaaaaaaaataattaatcaccattatactcagtttagaatatctaggttaaaagaaaaatataaaagtttaggctttgctaaatatgcagagcagcatagaaaattacctattacggataaggtgaaaaaaggtaatgctacggaaatattacttactgattatattcaagcatcacaaaaaaaagaatttatcaaggtatataaattgaaatataatccaaatgttgatcaagccattaaaggagatgacactttgatggttgatttatttgaagaaaatggtaatgagaaaatcaaaatttatttgggagaatcgaaatttcgcactactcctcaaaagaatgtagttgaagatattaccaaatctttaaacaaagatactttgcctttatcgtacactttcttagtagaagaaatagcaaaatcagatgaattacttgctcgaaagctggatgattatatagtgcaagatataaaagatagaggcgaccttatttatgttggtttgttactaagtaataccaagacttcagaaacagttgaaaaacatttgaatagtgataattcaaatttggttttcatttctattggaattggtcagccagaagagtttattaaatccatatttgaaaaagcagaagaactaatatctaaccctgatttattatgaatatagagcatgttgaaaaaagctaccaagaattagaatcagattctactttgcaaaacttaatagctcaagctaacgctagatatatcctatataatacggaagaatctaaagaaaattttcctcgatatacaattaaagatgagcagctaaatatcttagctttcaaatatctaaatattggatgtaattattttagtgaacataattatctaaaagcatctcattctctagaaaaaggagctttaatacttgagtatatacacggttctattcatattcagacaaaaaataagaaactattttgtctaatctccgctctttcttattacgtttgttttcaatactctaaggcatttatacttataggcaaacttgagagtgatacaatgatttcaagtttagtatctctatttcttaatagaaaatttgatcagttattaagtgaaatcgataaacttattacaaactccagttatggggatgaatatctggctgaacattttgaagaagataatgctacaaaaatttatgagataattatagcaaaatcattaaattattatgtgcaattttatcagacaggaaacaaagattttttagaaattgcaaaaaaggatcttgtaaatcttcaagaagtagccgcaatgagaggtgaacctgatgtttggtgggttattcgattattacttctcattatagatggatttaaagaatcctcattatggtatgtattaggaaattattttaatacggaagataaacttccgttaaagtatatacaatcattagtttataaaaatggcagtataacagaattgtttcttactcaaagaaactctttaccaaaggttttgaataataagcaggggagtattgttagcattcctacaagtagtggaaaaacaagaattggtgaaattgcgattttaaactgtctattaaatgaacctaaagcgaaaattctttttatagccccttatagatcactagcttacgaaatagaaaattcgtttgatgagatttttagcaatcttgatgtttcagtctcacatctatatggtggaagtttatttagtaagcttgatgaaagaattatagacgaatcatccgtaattgtagcaacaccagaaaaggccaaagcactctttagaagcaatgaggatattttatcatgtatcaaacttgtaattatagatgaaggacatttattgggaactgataaaagactcatagttaatgaaatgttttatgaggaattaaagtatcatgtaaaagctaatggtggaagattcttgttattatctgccgttttacccaatgcagaagatctatctgaatggctaacggattctactgataatgtttacaaagagaattggcgaccttctgatgaaagaatcggaataatggaatggaatggagtttctgtgaatttaaattggaaaagcactgatgcagaaagaaattcatttaatcctaattttattatgcgacaaaagttgcctaagaagcctaaagaaaggataatgcattactttcctgaaaataagaaccaagccatagcttctactgcatataaactaaggaagtttggtcctgttttaatattcgttggaatcaagaaatctgtttttgccattgcaagagagtatgaaaaatgtattcagcctgaagaacagaagtttagatttagaaacaaggccaattggagagcctttaaactggcttgcatagaatcttatggtgaagatacggaatgggttaagtttgctaaacaaggaattttctgtcataatgcagatttgatctcagatgtgcgaattcccttagaaagattaatgagaagtgagaagccaagagttattatagcgacttcaacattaggacaaggagttaatcttggagtttctactgtaattttctcaactttgtatcaatcaggtaatcctattacgaaaagagatttttggaatattgctggtagagcggggcgtgcttttgtagatcatgaaggcaaaattttagttgctcatgatataaccaaaaaagacgagaataaaataaattgggaaagaaaaatgatttctgcatatcttaataagagtaatatagatagagcagagagtggttgtttggaactaataaggacacttaaaacagtggctcaacttaacggaatagcatttgataacttaattaatttacttgctgaaaatcgtattaatgaaattgatgagtctttagatgaagttaatgatcttcttgatttgattgatgacggattattatcattgcataattcgaataattttgaaggaaacacattggaatggattgatagttattttactaaatccttagcctatatacaagctcaatattatgaagatattactggcgatgaagttctcgattttataaaggctagaattaaaggtataacaaaaaaggtagggatagaaaaaagtatttgggaaagtattgtatcttctggtattccaatcaattcagatttgcaaatagatgagaagcttagcgagattattagtattgttcaaagctatatagtaagtgataaaacattagaagaacgcatttcacttcttgaaaatatagaagacgtcattagagatgtgaatatatataaagaaaaatttgaagatagtgttgatataaaagagatacgaaaaaagtggttaagtggaatatccatgtcagatatcgttcaacatgaaaatgcagttaatatagtaactcaacattattctttcaatatgccttgggttctcaatggtatttcaaagaaaatgaagaaacagaatttaattgaagaagcggatactatcgaagaattggctattcttgtagaattaggattacctaacataaaatcagttaaaatctatcaagcaggaattcgctcaaggatttctgcctatgaaattgccaacttatatgatgatgatctttgggaaaaaagcattagaacatataaacaagatttaatagaccatgctgattactataaaaaccaagtatcagaaaatgcagcattatggatcgatttattagtaagattttcgaagagaaaatttataaaaattaaaaaagttcctaacttcagatatggaaaagtacataaaagaacaaaaaggttaatggcaagaataattaatgataagcaatatttagttagtccgaattttagtgttataaatgaaataggtgaatcagatattgacttttctaaagtcagtaatattaatggaatttactttgattatgacgaagatgataaactttggaaaataacttgcatgaatccttatgtggtatttacgtaattactatatacttttgggaagagatgagaataagtatttagacattattagttgttaatttatcgctataaggcttattcttgaagcattaaacaaccaattacaaactaaaataagttttgattaacttgtaactattaacaacattgactatctttgtcgtagagagatatttgaaattatgcagagcaatgcaatgtgtagctggacttccactactatatcgttacttgcatctttataaaaacacttttaatcgctgatttataaaagattaaaacgaactacactcttttacacgtcgaaacttgcgtttgtaaaaacgaaagctccgtttatagtttatacttaacccaaaagtacttatctattagagaaaaagaagttttgccctagtatacaagaacttatctactaataattcaaacaacaaacagtatggcaaagtacataatggaggagatgcccgacttacagaatacggggaagagaatcacatatccgaagtttgcacgggtagacaatgcaagcataaaagaacttgcccaacgagtgggtgacgtcagtggtttcagcccaggagatatagaaggtatattgctccaaacctccatcgaaatggcacacataatggcggaaggacgctcggttaagatagacggaatcggcacattcacagcgtcgctggccctgtacaaagataaagaacgggaaggagctgaagaaggaagtgaacatcgtaatgcacagagtatttatgtaggaaatgtaaatttccgagtagacaaaatcatgctgagaagaattaatgaaagatgccgactggaaagagcctcttggaaaaagcaacgttcctcacagaagttcacaccggagcaacgtctcaaactggcattgaaatatctcgacgagcattcgttccttacggttcatgaatatcggaaactaacaggactcttacaaacggcagcaaccatagaattaaaacaatggggagatcaacccaattccggaatcggaatcgctggaagaggtgcacacagaatctatataaaaaagaaacaagaagaagaataatgagttaaagattatgtctcaaaaggtgcggaaagcatgagagatggtagcataaaaaagatctctcataaaatgctaaactgataatcaacaatttacaagcaaatcatgagagatgagagataatattgtttttcttctagtagagattcctaagcgaggttataaactcttgctatgatgtcccgcaaaacgcataaaaacttgggacaatcctccctcctgcccttgcaactgaacaaagttaaactcacgttgcatcggcattccttttatttcaactaccttcagagtgccgacaacaagttccttatgtaccgaacggatggaaacaattcccatacaatccgtatgctccagaaaaagcttgatactttccgtactgccaagatacattaaaacattcagagaagagagcttcagattatactgcagcagcgcacgctcaaatacatctaatgtaccggaacctctttcgcgcaagaccaaagggatatttggaagttcttccggaaggatttcgtcggcaaccgccaatttactccgcgtatgaaccacagccacgagttcatcttgcaggaatgcagtgtacttcaaattcggtaaacggaagataccctctaccaatcccagatcaatacgatgttcctgcaacgccacctccactccacgggaattcccatttatcaaagaaagattgatttgtggaaactttgttatgaagttggccaataaaggaggaaggacatattgcgcaatcgtagtgctggcacccagttttaattctccgatatattcgtcatgcaacaagtgcatctcgtattccaattgcttataatcatccaaaatcttttcactatgcttcagtaacagctctccggcctcagtcaaggagattttacttccctgacgatcgaaaagacgggtttggtaacaagtctccaactcctgaatatgcttggtgatagcaggctggctgacaaacaactcttgcgaagccttcgtaaaacttaggttcttcgctacactctgaaaaacttttaaacgaaaatcggacacagcaacttagtattagcgattataactcctccgcccttattcccaatgaatgcatcacaggaaaagccaacatatcccatttgtagtttaccggtatttccggttcattcatacggaactgcataacttccttgcctttcagtccctgtagaacatcagtcactttcttcccatattcctcgttgaaagaaacaacaatcatccgcttcacatccaccgaatcggagacaacggaaagcaaatccataaacaggtcttctctcgacaccatgccctccgacgggacaccggcaaaagagaactcgccatacggactttggaaagcaactccgttcagctcctcctgcaagtcggagggctggcaatgttgcaagtgtctcgattctttatcatatacaaaaagaaattgcacctcgttctttccttcgttgattcctgcatccagagtcagataggaagtaaacaacgaaaggtctatctcttgtaaagaacgttgcaatgtcttctcgaaatagttttttatatccgttattacaaaattcagaaaagcggcatctatcagcactactgtttcggacagttttatttggggtttatcattcatatataccttaattatatcattacagcggataaagatactacaatactttcatttatccacttgattatcttgcaaattcgtcagtctgcactaaacaaaaaaagtcattttgtcctttaactccttaatattcatgctattttgtcatatttttctacttggcaaatcttttgcgcccttttaagtgttattagaaacatgaaataagaaaggagaacaacaatatgaattttaacaattttaccatcaaatctcaagaagcggtgcaggaggctgtgaacctggtacaaagtcggggacaacaggctattgaacctgtccacatcatgcagggagtgatgaaagtaggcgaaaacgtcactaatttcattttccaaaaattgggcatgaacggacaacaggttgctcttgttgtagacagacaaatcgattcacttccgaaagtatccggtggcgagccatacctgagtcgtgaatccaacgaggttttacagaaagcgacacagtattccaaagaaatgggtgacgaattcgtctcactggaacatatcatactcgcattgctgactatcaagagtactgtttctaccatcctgaaggacgcaggtatgacggaaaaggaactgcgtaacgccatcagtgaattgagaaaaggagaaaaggttacgtcccaatcaagtgaagacacctatcagtcactcgaaaagtatgccatcaacttgaatgaagctgcccgtagcggtaagttggaccctgtcatcggacgtgacgaggagatccgccgcgtacttcagatattgagccgtcgcactaaaaacaatccgattctgattggagaaccgggtaccggtaagacagccattgtagaaggattggcgcatcgtattcttcgtggagacgtgcccgaaaatctgaaaaacaaacaggtgtattcattggatatgggagcattggttgccggtgcaaaatacaaaggtgagtttgaggaacggttgaagtccgtagtcaatgaggtgaagaaatccgaaggtgatatcatcttgtttattgacgagattcacacgctggtaggcgccggaaaaggggaaggtgcaatggacgctgccaatatcctaaaaccggccttagcacgtggcgagttgcggtctatcggtgctacgactctcgacgaataccagaaatatttcgagaaggataaggctttggaacgccgtttccaaatcgtgcaggtggatgagccggataacttgagcacaatctctatcctgcgtggactgaaagaacgctacgagaaccatcatcatgtccgtatcaaagatgatgcgatcattgcagccgtagaactaagtagccgctacatcaccgatcgtttcttgccggacaaagctatcgacctgatggacgaagctgccgctaaattacgcatggaggtggattccgttccggaagagctggatgagatttcccgtaaaatcaaacaattggagattgagcgtgaagccatcaaacgtgagaatgacaagcctaagttggaaatcatcggtaaggagcttgccgaactgaaagagcaggaaaagtctttcaaggcaaaatggcagagcgaaaagacgttgatggacaagatccaacagaataaggtggagattgagaatctgaagtttgaggctgaaaaggcggaacgggaaggcgactacggaaaagttgcggaaatacgttacggtaaactccaagctttggacaaagaaatagaagagactcagcaaaagctccgcgaaatgcaaggtgataccgccatgattaaagaggaagtagacgctgaagacattgcagacgtagtttctcgttggacgggtattccggtcagcaaaatgatgcagagcgagaaagacaaactgttgcatcttgaagaagagcttcacgaacgggttatcgggcaggatgaagcgatagaagctgttgcggacgctgtacgtcgtagccgcgccggattgcaagacccgaaacgcccgatcggctcatttatctttctcggaacgaccggtgtgggtaaaacagagcttgcaaaggcattggctgaatttctgtttgatgacgaaacgatgatgacccgtatcgatatgagtgagtatcaggaaaagcatagtgtttcccgtttggtcggagcgcctccgggatatgtaggatacgatgaaggcggtcaactgacagaagctatccgacgaaaaccttattctgtcgttctgttcgatgaaatagagaaagctcatccggatgtattcaacattctgttgcaagtattggatgacggacggctgacagacaacaaaggaagggtggtcaacttcaagaacactatcatcatcatgacttcaaatatgggtagttcctatatacagagccagatggagaagctgaatggtgcaaacaaagaagaggtagtcgaagaaacgaaaaaggaagtgatgaatatgctgaaaaagaccattcgtccggaattcttgaatcgtatcgacgaaacaatcatgttcttgccgttaacagaaaaggaaatcaagcagattgtactcttacagatcaagagcgtacagaagatgttagccgaaaacggagtggaacttgagatgaccgaagctgctttggacttcttatctaaagtaggatatgatcccgaattcggagcacgtccggtaaagagggctattcaacgctacctactgaacgacttgtccaaaaaactactttctcaggaagtagaccgaagcaaagcaattattgtagacgctagcggtgacggattagtattcaggaactaaaggtttcattaaattaaaatgaggatgtgtcataaataatctgcgataatttgcgttcatcgcggtatgacacactctcattttttatttctctgaatatattatcctacgaacttccggttgacagttcggatggctcatcaccaatacataagtcccatatttaggaaccagcatagaaattgagggcaactcaaacttggacttccccctcagctctccctgtgaatcgtataaaaataccatcgtaccaactaataagccggttatgcacaagattcctttttgattgtccaaacggacatttacttctttatttgttattgtctccatctcccctaacatcaatttaaaactatgaaggcaaagatacataaaaagaagtattatttacaatataaacagaagatatttattttaatcaaagattacccaattaatactaatatatttttgaaatatccacattccaaactaaagggactatccatctgattgtgtaaatagaaaactacgggatttttctcgtagtttttttatttatatattaactttgtaaaaatcagattttatggacattcctaaagaatttttaagtaaagag

SEQ ID NO: 11840 - DNA, 248 bp, Unknown
  gut microbiota DNA sequence
atatatcccttgtctgcacatagttttcctttgatgttttccagaaacttaccttgcttcaacggttctcggtcatccacgtttccaggcgtgaacatgaaattgaggatctctcctttatcattgattatcagatgcagcttgaatccgaagaaccatcccattgaacatcttccacgttcggcaagcccttcaaatgtcttatgaataaggattctttggttacgacatatacgtaaggaagtgga

SEQ ID NO: 11841 - DNA, 5083 bp, Unknown
  gut microbiota DNA sequence
ttgtaactttagtttctgaaaatatagtggaaatcgcttgtaacatgaaatccgccaatatccccatcgagtccatcatgcagtttaccaaactctccagagaggaatttgaaaaattataatgcctggatagacttttactccagtcgacaatttagcttgcttctgatttatgcgtactatcaaataaatgttaattggcctcttacttttaggttggcatagattaaaactagcttttacaatttcattaatgaatacctgtcctgccatagccttgttctttgaattggttctttaatttggttcttaaattccgttctttgaggactgaatatgagacaatatgtactctataaacaaactgacaagcctcttaggaatacccaaacaaatattaggtagtttgggacaaatcacgtaaatttgtgcctcgaattagaaataacagtataaatcactataaataaaaactttatcactatggagtacaatttcagagaaattgaaaagaagtggcagaaaaggtgggtggaagagaaaacctaccaagttacggaagatgattcgaaacaaaaattttatgtactaaatatgtttccttatccatcaggagccggactacacgtaggacatccgttgggatacattgcttcggatatttatgcccgttacaaacgactgcaaggcttcaatgtactcaacccgatgggatatgacgcatacggtctacccgcagaacaatatgccatccagaccggacaacatcccgctatcactactgtcaacaatatcaatcgctaccgcgaacagttggacaagatcggtttctcttttgactggagccgtgaaatccgtacctgcgatccggaatattatcattggacacaatgggctttccaaaaaatgtttaatagctactattgcaacgatgaacaaaaagcacgtccaatcgaagaactggagaaagcttttgcaagtcaaggaactgcaggattgaacgctgcttgcagcgaagaacttagctttaccgctgaagaatggaatgccaagagtgaaaaggaacagcaggaaatcctgatgaactatcgcattgcttatttgggtgaaacgatggtaaactggtgtgccgagctaggaaccgtattggctaacgatgaagtagtagacggagtcagcgaacgtggcggttatcctgtcattcagaaaaagatgcgccaatggtgtctgcgtgtatccgcatacgcacaacgcctgctggacgggttggacactatcgactggactgattcactgaaagaaactcaaaagaactggataggccgttcggaaggcgctgaaatacaattcaaagtaaaagacagcgatcttgaatttactatctttactacccgtgcagatacgatgttcggcgttacctttatggtattggctccggaaagcgaactggtagcacaagtcactactcccgaacagaaagcagaagtagatgcctacctcgaccgcaccaagaaacgtacggagcgcgaacgtatcgccgaccgtagcgttaccggtgtattcagtggagcatatgccatcaatccgtttaccggtgaagcagtacctatttggatcagtgattacgtattggcaggatatggaacaggagccatcatggctgtacctgctcacgatagccgcgactatgcttttgccaaacatttcggattggaaatccgtccgttggtagaaggttgtgacgttagcgaagaaagtttcgatgcaaaagaaggtatcgtttgcaactctccgcgtccggacgtaaccccttactgtgacctttctttgaacggattgactatcaaggaagccattgcaacaaccaagaaatatgtgaaagatcataacttgggacgtgtgaaagtgaactatcgtttgcgtgacgctatcttctcacgccagcgttattggggagaaccgttccctgtctattataaagacggaatgccctatatgattgacgaaagctgtctgccattggagcttccggaagtagctaaattcctgcctaccgaaacaggcgaacctccattggggcacgctaccaaatgggcgtgggatactgtaaacaaatgtatcacagaaaacgagaagattgacaatgttaccatttttccgttagaattgaatacaatgcccggatttgcaggttcttccgcttactatctccgctatatggatccacgtaaccacaaagcattggttgacccgaaaacagaccagtactggaagaacgtagacctttacgtaggtggtaccgaacatgctaccggacatttgatttactctcgtttctggaataaattcctgcatgatataaacatttccgctgtagaagaaccgttcctgaaattagtaaatcaaggcatgattcaaggacgaagcaactttgtataccgtatcaaagacaccaatacatttgtttctctgaatctgaaagatcaatatgacgtcactccgatccatgtcgatgtaaatatcgtatccaacgacattctcgatctggatgcattcaaggcatggcgtcctgaatatgcaacggcagagtttattttggaagacggaaaatacatttgcggatgggcagttgaaaagatgagcaaatccatgttcaatgtagtcaatccagatatgattgtagacaaatacggtgcggatacacttcgtatgtatgaaatgttcttaggtccggtggaacaatccaaaccttgggataccaacggaatagacggggtacatcgctttatccgtaaattctggtcattgttctacagtcgtacagacgaatatctggtaaaggatgaacctgcaacgaaagaggaactgaagagtttgcacaaactgattaagaaagtaacgggagacattgaacagttctcttacaatacttctatcagtgcattcatgatttgtataaatgaacttttcaatctgaaatgcagcaagaaagaaatattagaacagcttgttgtcgttcttgctccttttgctccccacgtttgcgaggagttgtgggatgtactcggacacaaaacttccgtatgtgatgccgaatggcctacatacaacgaagaatatctgaaagaggacacaatcaactataccatctctttcaacggaaaggcacgtttcaatatggaatttgcagcagatgaaacatcggacgctattcaggcggctgtattggctgacgaacgttcgcaaaaatggatcgaaggcaagacaccgaaaaagattatcgttgttccgaagaagattgtaaacgtcgtactttaatttgtctcaccacagattacacaaatttacacagatgaattacgaataaatctgtgataatctgcggtaatctgtggtgaaactatcatataaatctacttttatgtataaactggaaaaggcggaattaatgagggaagtgaaagattatatctacattactctcggattgataagttattctttgggatgggcggcattcttactaccctaccagataacgaccggtggaactaccggtatcggagctattatttattatgcgaccggatttccgatccaatggtcatattttattatcaatgcagttttgatgacatttgccatccgtatgctaggtccccgattcagtataaaaactacgtacgccatctttatgctgacattcctgctttggcttttccaattaatagtcaacaattatatagtggcaccggatatgacaccggacggcaaaccgttattgcttggacccggacaagatttcatggcttgtattatcggagcagccatgtgcggtgtgggcttgggcatcactttcaattataacggaagtaccggtggaacggatatcattgcagccatcgtcaacaaatacaaagatgtatcactcggaagaatgatcatgatctgtgacgtagttatcatcagttcctgctactttatattccatgactggcgtcgtgttatctttggttttgtcacactgttcattattggtgtcgtattagactggattatcaacagtgcccgtcaatcggttcaatttcttatcttctcaaagaaatacgatgaaatagccgaccatatcataaaagataccaatcgtggagtaacggtgctcgacggtaccggatggtatagcaaaggcaatgtaaaagtattggtggtactcgccaaaaaacgccagtcattagacatcttccgcatggtgaaacgtatcgacccgaatgcatttatctcacaaagttccgttatcggagtatacggagaaggattcgacaagttgaaataatcagttgattgttattgaataactctattgaaataaaaaagaatgatgaaacgcaaacttgtatttgccactaacaatgcccataaactggaagaagtagccgctattttgggagaccaaatagaattgttaagcctgaatgatatcgattgccacacagatattcccgaaacagccgatacattggaaggaaatgcgttgctgaaatcttcctttatctacaacaactacggtttgaactgctttgcggacgacaccggtctggaagtggaagcattggatggagctcctggagtctattccgcacgttatgcaggcggagaaggacatgacgcgcaagccaatatgcttaaactgctccacgagttagaaggaaaggaaaatcgcaaagcacagttccgtactgctatctcgttgatattggacggtaagaattatcttttcgaaggaataataaaaggcgagataatcaaagagaaacggggtgaatcaggctttggctatgaccctgtctttcaaccggaaggttatgacaagacttttgccgaactaggaaatgatataaaaaacaaaatcagtcaccgtgcattagccatacaaaagctctgtgagttcttacaacgctaataatccatattccaacagtatataaagcacaataattcactctgcttgctcattagttatatacttcatacatcacgaaaaagaagtttatagggatattcctaaaataataaaatttaaggc

SEQ ID NO: 11842 - DNA, 18417 bp, Unknown
  gut microbiota DNA sequence
atctgcaaccatcccacaccactatcctacaccctattaatatactaatattcaacaacataaagtgagactagtgtaggatggcagatgatcttcaattttaaatccacgaggagaaatactctttctgatatattaaagacatgaacaggtctcaatcagattttatactcttctatctttctatacaacgtagtaagtccaattttcagcaaacgggcagtttccgttttatttcccttagtgtattccaaaacacgggcaatatgtcttcgttccattgccgccagttcaaagccctccgcactatcgtccgaacattcgtaatgagtattttgaatttccaaaggtaaatcgcaaatatccaaccgcccaccttcgcagacaatcaggctacgctcgataacatttcgcaattcgcggatatttcctttccaagactgtttctccaaagcctccagaaaagcgggagtcatctcactaatggaatacgaaagtttctcggaaaagctcttggcaaaagctgctgcaagaatactgatatcccctgcccgctcacgaagtgcagggagatgcacctgaaatacagaaagacgatagaacaaatcttcacgaaaacatccctctttgatttcttcctgcaggttgcggttcgttgcagcaatgatacgcacattcaccctggtaggctttgtgtcacctatttttatatactcgccggtttcaagaatacgcagtaacttggcttgcagttcaaaagccatttcccctatttcatccagaaaaatcgttccgttatgagcttcctcaaaaagccctttcttatctttcaaagcaccggtaaatgagcccgccttgtgcccgaacatctcactctctaataattccttactaaaagaggagcagttgaccgctacgaaattctgtttactccgcttactattataatggatagcctgagcaaaaacctcttttcctgtcccggtctctccggtaagtaataccggaacatccgtgacagacaccttctgtgccaaagagatagcctctttcagcactttcgattctcctaaaatagaatcgaacgaatacatctgcccgactttcttctccagtttttccaaccggacattcattcttgctttctccgcagcacgactaatcaaaggaatgatcttattattatcatctcccttcgttatataatcgaatgcaccattcttgatcgcctgcaccccgtcaggaatattgccatgtgcggtgagaagaatcacttccacattaggagcctgcttcttgatattcagcactaaatccaccccattcccatcaggaagaaaaacatcacacagaaccacatcgggcgattggacttcaagttgtttgacagcagctttacaatcgccagcctgacatacttcgtacccttcaagttccagcatacgtgccaaaaggctacgaatctggatttcatcgtcaacaataagaatcttactcatacaatttacttacatttaatggaagaataaaaaacagggtgtgcaaatataacttttttcgatgagtctatgaacatttcttatatatagttcgttatttccataggaaaatatttacactataaaattatgaagattatcattatcggaggcgttgcaggaggagctaccactgctgcccgaatcagacgagtagacgagacagcagaaattatccttttggaaaaaggaaagcatatatcgtacgccaattgcgggctgccttattatataggaggagtgattgaagaacgggaaaaattatttgtacagactcccgaagcattctcgacacgcttccgtgttgatgtccgcacggaaaacgaagtgatttttattgaccggaagaaaaagacagtcaccgtacgtcagagtagcgaggatacgtatgaagagagctacgacaaactgctgatatcaaccggagcttctcccgtacggccgccattaccgggaatcgaccttccgggtattttcacgctaagaaatgtcacagatacagaccgtatcaaagaatatatcaacagccattctccccgaaaagcggtagtggtaggagccggatttatcggtctcgaaatggccgagaacctgcacgcacaaggggcgaaagtctcgattgtggaaatggggaatcaggtaatggctcctatcgacttctcgatggcttcgctcgtgcatcaacacctgatggacaaaggagtgaacctgtatttggaacaagccgtagcttctttcgaacgggaaggaaaaggactgaaggttactttcaagaacggacagtcgatttctgccgatattgtcattctatctatcggagtacggccggaaaccagtctggcccgggctgccgagctaacgatcggccctgccggcggtattgccgtgaacgactatttacagacatccgacgaagccatttatgctatcggtgacgctatcgaatatcgccatccaatcaccggaaagccctggctcaactaccttgcaggccctgccaaccgtcaaggacgcatcgttgcagacaatatactgggagctaaaattccatacgaaggttccatcggcacttccatcgccaaagtctttgatatgacggtggcttccaccggcttgcccggcaaacggctacgcttggaaggtatcgattatatgtcgtctaccattcatcccgcttctcatgccggatactacccggacgctatgccgatgagtataaagattacgttcgacaaacaaacgggacggctgtacggaggacagattgtcggctatgacggagtggacaagcgaattgacgagcttgcgcttgtcatcaaacatcaaggtacggtatacgacctgatgaaagtagaacaggcatacgctcctccattctcctccgccaaagatcctgtagcaatagccggatatgtagcggaagatatgattacgggtaaaacgaatcctgtctactggagggagctgagagacatcgagatggagaataaattcttactggatgtccgtacacaggacgagtttgcattaggatcattaccgggagcggtcaatatcccgttggatgaactccgggaccggatgtcggaactgccgaaagaccgtatgatttatacgttctgcgccgtcggcctgcgcggttatctcgcttaccggatattgacgcaacacggatttgacaaagtacgtaacctttcaggcggattgaagacttaccgtgcagccacagcccccatcgttatacaccaggagaatgaagaccaaacagacgaatccccttcaccgcaagagaagacactttcgagcgaaccgtcagccgcaccggcaattcccgtagcagctgcaaaaacaatccgtgtggacgcgtgcgggctgcaatgtcccggtccaatactgaaaatgaaaaagacgatggacggactggcttccggcgagcgggtagagattacggctaccgatccgggattcccgcgtgatgctgccgcatggtgcagctcgaccggcaatcagctcatttccaaagaggcatccggaggaaaatctgttgttattatagaaaaaggagaaccaaaagcgtgcaatattgttacttcttgtgaggacaaaggaaaaacttttatcatgttcagtgatgatttagataaagctttagctacctttgtacttgccaacggtgcggcagccacaggacagaaagttacaatcttcttcactttctggggattgaacgttatcaagaaactgcataagccggaaaccgagaaagatatttttggaaaaatgtttggcatgatgttgccttccagctcgaagaaactgaaactttcaaagatgagcatgggaggaataggcggaaaaatgatgcggtatatcatgaataagaaaggtattgattctttggaatcactgcgccaacaagctctggagaacggggtggaatttattgcctgccagatgtcgatggatgtgatgggagtgaaacaagaagaacttctggacgaagtgactatcggcggtgtagcgacttatatggaacgggccgacaatgccaacgttaatctgtttatttaacggaacgaaataataaatatatgcaatgagaaatatgaaaacaatatgtgccatacgcgatgtattcagagctatgaccaattttgaggctagctttgagcaagtctaccagataacgctgaacgaggccatgattttgtgcgctctcaagtgctcttcggaaagaatgacggcaacaaacctgtcgaaacaaacagatttgagcccttcccatacatcaaaaatgctccggatactggaagaaaaaggactgatcgtcagaactttgggaagcgaggatcggcggcaaatgtactttaccctgtctgctgcaggaagagaacgggtttgtgacatggaaatacagaaggtggaaatccccgaattactgaaacctctgttcaaagacgcagaatcttaaacggttctctacaaaactataaagagagttcaaaacgcggattaacatgaattaatccgcgttttattattcattatgacacactctcttctttattacagacacagaaagaaaaatgttaattttccggcaaaataattcttcgtgcgaacctttttatttctttgttgttgtttgtaacaaaagccccaaggtaccagggcctgatttttatataacctaaacattataaagatatgaagaaattaattcctattttattggcggtctttgcactcgcatcctgcgaaaaagacccggacatgggtaagctggataacaactatctggtatacactaactacgacaagaaagctgacttcaaagttcctacattctatctggcagatcaaattctggtaatcaacgacagtaaagaaccggaatatctcgaaggagaaggcgctgaacaaattctggctgcttacacggaaaacatggaagccagaggctatacagccgctgataccaaagaaaatgctgatcttggtatccaagtaagctacatcgaaagtacttattatttcaccagctacaatcaacccgaatggtggtggggctatcccggctattggggacccggttactggggcggaaactggggtggcggatggtactatccgtacgctgtgacttacagttatagcaccaactcattcctgacggaaatggtggacttgaacgccgaccaaggtgaaaaagccaaactccctgttgtatggaccagttatctgaccggatttgaaacaggttcgagcgctgtcaaccgtactcttgcagtggaagctgtcaatcagtcattcactcagtcaccttatcttactaacaaataaacaactacaactgttatgaaaacaagaaaaaatatatacttcaaggtagtagccttggcggctattgccatcgccttcgccatgccggctaaggcacagctatcagacaacggatatgctaatatcgactggcagtttaatgttcccctcggcaatcattttgccgacaagtccagtggttggggtatgaactttgaaggtggttatttcgtgactcctaatatcggtttaggtcttttcctaaactaccatacgaaccacgaatatgtaggccgtgaaaccttccaactgggagccggtgaggtaactaccgaccagcaacacaccatgttccaattgcctttcggtgctgctgcccgttaccaatggaatcgcggtggatccgtacaaccatacgtcagcgctaaactaggtgccgagtatgctaaaatccgttccaacttcaatatgctcgaagcaagagaaaacagttggggcttctacgcttctcctgaaatcggtatcaacgtatttccttgggtatacggaccgggactacacttcgctctctactacagctatggtaccaacaaggctgatgtactgcattacagtgtagacggactgaacaacttcggtttccgactgggtgtatcattctaaggctaaactctatcagaattacgttaataaaaagaatgcctctctgcttccacgagcagaggggcattccattttatagcttgccggaaaaggagggattactttttcttcatcgcatcataaatcgcttcctgtatcctttcacgaatgtgcaattgattcaatttacggttggtcgcgtccggataaacccggttactcaaaaagacatagaccaactcattcacagggtccacccaagcacaggtcccggtaaacccagtatgaccatacacttcggcaggcacaccgggagcacagttccctttcttcgaatcagtcatatccggtttgtcgaatcccaaaccgcgtcggcttatctttgaaacttctgtagtaaacagttgacaggtttccttactcagataacgctgcccgtccaactcccctccattcaataacatctgatagatacgggcaacctcacgggctgtggaaaaaagtccggcattcccacccaatccaccaaagaaagcagaagcctcatcatgaacaaagccttgcaaagtctcttttcgcaagaaacgatctttattggaaggcacaatctccgatttggcaaagcggcgtaaaggcaaataacccgtgcgctccaaccccatcggtccgtaaaattcacgttgcagataggcttccatcggcatttccgccaactgttccaccagcattcccaacagaataaatccgatgtcactatatacatagcgtttctgtctcaatggagtttccgcaattttctcttctatcactttcctgaatgaacggttcagccatatactatcacagatttgaacggtataatccccggtcccgacagacgagatatattcttttttaaacttaaaatccggattcgcccatgtagtcgtaccaatccgtaacagatgtttcgcatccctacgcgcactgaataatcgtccgtcgtaactatccttgtctatcacttcctgatagaacggtatccaagatggcaaaccggactggtgaagcaggatttcctgaatagtgatatctttcttgtctgtacgttgcaggaacggtaaataatccgaaatcttatcggtaaggctgaaacgtcctttatcgtaaagtttcataatagccagcagagttcccgtagttttggataaagaggccaaatcgtaaatatccgtagattcaacacgaggactgccctttcccgcatacgtaccgaacgctttatcatacatgatatgcccgtttctcaaaacaactatctggcaaccgggataggctccctgctgaatgccgtccagtgcaatggcgtcaatctttttcagaaggatggacgaaagaccatgctcctccgggatgaaatgtaaaggcgttctcggtgtaatggtcactcccgcccctgtgggaaacaatccgcctatacttgccgacaaccttccgtccgccgtggctttggcatataagatatcagccacctgccgctgcacgtcaccatgatggctatgccccaatatcacggctgatgcgcgggacaccgcacgttgaatctgcaacatcattttgccgggtgtaaagaacagatagatagccgggcttttaggaacaaacttggcaaagaaaggctgataagcccccaatcgttgttcactgaccgctaccacaatccgtttataagcagccaacgaatcacgcaacttctgattttcctgttcagtctgattggcacgaagacggaaacggaccaatgaagtataacgggacatctgactcgccagcgcattcgtctcacccggttttccaacttcgagcaatgcaatcttctgttccttgtccgcgtgcaacggtaaaatatggttcttattgttcagcacagtaatcgccgcccaattcaaccgacggattaaatcacgtgtctgaggagtgttaatacgctgttccaaaccggatacttgcacaaacggctttttctttaatcccagtgcatatttataagtcagcaccttacggcatttactctcaatatcctcccggctcaactcccctttttcaatggcttccaatacggcggatatctccgctttcagattacggggagccagcaccatatcatttcccgctttcaatgcttgcaaactgacacttccattccccgacacccctttcatggcaagcgcatctgtaaatatcagccctctaaaagccaattcgtccgtcagcaaatcatacactacattgcgagacaatgacgatgggagtccgcccaccggttctatgatgggcacttgcaaatggccgaccatcataccgcccaatcctgcccggatcgctcttttaaaaggataaagttctacactgtccaaccgctcgcgagtgaaaggaagcacaggtaacgccttatgcgaatcaatatccgtatctccatgaccgggaaaatgcttgcatacagacagtactcctccttcttccaggccggatgcgtaagcgataaccttatctgccacctgtatcggattttctccgaaagaacgggtattaatcaccggattcttcggattgatattcacatccgccaccggagcaaaattaacctgagccccaatctgtttgcactggcgggctacttcacgcccatacgcatgaatcaaccgattgtcctgaatacagcccagcaccatatttctcgggaaaacaggtgtgccgcgcaaacgcattgccagcccccattctccatcgaaagtaatcataacaggtactttggcttgccgctgcgcccgattcgtcaagttgacctggttctgcagttttccaccggaaaaaagaagtccccccactttataagtatcaacggcttcacgcagcaattccagatttcgtttggtatccacaggagcgatggtatagataaataactgcccgactttttctttgaaggaaagcctatccattaccgagtctacccaatggcggcagtccttatcctgaagagccttatataccaactgcggttcaacggcagcagcattttgagccgaacccgttaccggtccggctgaaataagaaataaaaacgctaagattgagaaaagtttcttcatttatgttccaaagtcaaatcaagacggcctacacgcacaccactcttccccgtatgcatgacagccacttcttctccatccatgttcaaatatgttttcgggcctttcataaaggtgtgcgaatgcccgcccaaaatcacatcgatattacgtgtattcgccaccaggcgttcgtccatctgaattcccaaatgcgacagacataccacaacatcacatcctttttctttcagcaaagcagccacttcattcgataccccgaccgggtcctcataaactactccctcacatttattagcctgaatcagtccttccggttccgctcccagaccgaagacacctattttcaaaccatatttctctaaaataacgtatggctttacaatatccttcaataccgtagcttccaaattataattggcacagactaccggaaactttgccatcttgaaaatacgggccatgttatccacatcgaaatcaaactcatgattgccgatagtcatcgcgtcatagcccatttcgttcatcaacttaatttccacttccccctggaacatattataatagggagtcccctgcgaaatatccccgcaatcgaacaacaatacattgtcgtgctctttgcggaactgttcaaggaaagtagcccgacggacaaatcctccttcattataattgcggtcacctttctgattgaccggttcaatacgactatgcacatcgctagtctgcaaaagtataagttctttagtatcctgcgcaaatagggaaaaggcaaagcttactaccaagcacagcagaaatgatatctgaattcttctcatatccaacatttttaggttctccttttttattttatagaaatacgtccatccagtctggaggtaatcagcttaccttcggcagtctgcttccgcacatattcaagaaacaggccgcgcaaagtagcgttctccggacatacacgtttctccgcttgcagaagagcgtccatccgcccgtttccatccgccagataatcgatggtagctaccgtataagattggtcatccttcaccggttgtccgccaatggttacattcagcagttcgccttccttactgatttccatacgaatgccgctcactccttctccatgcaaggaagcgatagccttaaaaagacgtttcatgtccgtccccttcattgtcaacacacaaagcgaattctcgaaaggaaggatttcgaagatttcgccaacggtgatatctcccttcggtaaaatattgcgcaatcctcccatatttaccaatcccatatcggcaggtttacccaatacccgaaccgccgcctgctgcaacacacttgccacaagattggaaaggaggctttccggattccctttatccattatcatttcactggtgccaatgacttcatacatcatcgcatctactttgtccttatagggcttcaatatctcagcagctcttttgtcgggattcgcatcccagaccgaatcgatcgtaatcatactgccttttactccaaccacttcgtagttagccgtggtttcccgtgccgagcgacaggacgtaaagaggaaacctcccgccaacacggctacaatcagatactttacataagtctgtttcatgttcgctatttttagatatgctacaaatatacgaaaacatttggctatctgacaaataattcgttactttgcaccgctttcgcgcaatcgctgtcaagagaagagatacttggtatgttgcgttgtaacgatgaaacaatttaataataacaacaatggatttaattaaaattgcagaagaagcatttgctaccggaaaacagcacccgagcttcaaagcaggagacactgtaacagtagcatatcgtattatcgaaggtaacaaagaacgtgtacagttgtaccgtggtgttgttatcaaaatcgccggtcatggagacaaaaagcgttttactgtacgtaaaatgtcaggaactataggcgtagaaagaattttcccaatcgaatcaccggctatcgatagcatcgaagtgaacaaggtaggtaaagttcgtcgcgctaaattgtactacctgcgtgctcttaccggtaagaaagctagaatcaaagaaaaaagagctaactaatcctagttacttttcgattcgaaataaaaaagggaacttccattgcaggaagttcccttttttattgtcatttctccctctgatcttccactctgaaacataaagccccgagagtcataaactcccgaggcttcattacctttactacaataatgatatattattctttcagatccttcaattcccaagccaatgcactggcacccagtacggcggcatcagaatccttcagttcggaaacgagcaatttcgtcttacctttatagatattcaggatattcctatcgattgattcctgaatcggtttcatgatatagtcaccggacttagccaaaccgccgaacaatacaattgcttcgggactggagaatgcgatagcgtccgccaaagcttcacccaaaatatttccggtaaattcgaagatttcctgtgccagtttatcgccttgaacggctgcgtcatatacatcctttgaagtaatgttttctgcaggaatattacggagcagacttgcatccgtgcgggcagccaaaaattcgcgagcagtacgggctacaccggtagccgaacaataagtttccagacaacctttacggccacaaccacaaagacgaccatcgcgacgagcgataacatgtcccaactcaccggcaaaaccatcatgaccatacaccatctgaccgttgataacgataccgctacctacacctgtacctagtgtaatcatgataaagtctttcatgccacgggcggcgccgtatgtcatttcaccgatagcggcagcattagcatcgtttgtcagggctgtaggaatgcccagtctttcttcaaacatagcagccaacggaagaatacctttccaaggcaaattcggagcgaactcgatagttcccgtatagtagttaccattcggagcacccacaccgatacctctgattttatccacaccgccattggcgataatcaatggaagaagatttttgcacacttcatctgcatattcttctaccgtaggataaccggatgttttgatagaactgcttgctataatagttccgcgtgcgtctacaattccaaagacggtatttgttccgcctatgtcaatacctactacgtagggtttctccatgtttgaattcatgatacttttatttaaaagggttagttaatcattaagtttactgcacacaaattacgtaaagaagattgagtctacaaaatgtttttcaaaaaaagttcaacctctttgcaacttttcttatctcgctaccgtctaatagaagaaattcataagaaaactgaaacaaaataaaggaaactgtgatacaactgacaaatatcaataagacctataataacggagcacctcttcatgtgctcaagggtatcgacctccacatcgggcaaggtgaatttgtttccatcatgggagcgtcagggtcaggaaaatcgactttacttaacatattaggtattcttgataattacgataccggagattattatctgaacaacgtactcatcaaaaatctaagcgaaaccaaagcctccgaataccggaaccgcatgatcggatttatcttccaatcattcaatctgatatcgttcaaagacgcagtagagaatgtagcacttcctttattctatcaaggagtaagccgtaaaaagcgcaatgcccttgctttggaatacctcgaccgtctggggttgaaggattgggcgcatcatatgccgaacgagatgagcggcggacagaaacagcgtgtagccatcgcccgcgcactcatcacccgaccgcagattattctggcggacgagcccacaggagcattggacagtaagacctccgtagaagtgatgcaaatactgaaagacttgcaccggacggggatgaccatcgtagtcgtcacacacgaaagcggagttgccaaccagaccgacaagataatacacattaaggacggtatcattgaacgaatcgaagacaacattgcccatgacgcttctcctttcggtaaaaacggattcatgaaataaaaaccaatcagacatgatagacatctggcaagaaatatacagcaccattaagcgcaacaagctaaggactttcctcacagggttcgctgtggcatggggaatattcatgcttatcgtcctcttaggggccggcaacggactgattcatgctttcgaagagtcttcttcggaacgtgcactgaacagtattaaaatctatccgggatggacttccaagtcttacgacggactcaaagagggacggaaaattcagctggacaacaaggacttacggatcaccgacactcattttccggattatgtaattaaggccggagcttccatctggcaaggtaccgtcaccatcagtttcggctcggaatatgccagtgtcgggttggcaggcgtctttcccaatcatatagaaatagaaaccataaagctctttaaaggacgtttcattaatgagacggatattaaagaaagacggaaagtaatcgtcctgcataaaaaaacggctgagattctttttcataagacacataccgaacctatcgggcagtttgtcaatataggaaatgttacctatcgggtagtgggactttgcaacgacaaaggagatagtggtgaaaaacctgccctcatacctttctctaccctgcaaacgatctataatcaaggagacaagctgagctatctgaccatcgctacgaagaatctggagacgattgaagcgaataataattttgaaaaagagtatcggaaagctttgggagccaaccaccgtttcgatcctaccgacaacagcgccttatggatatggaatcagttcaccaattatctgcaacaacaaaaaggtatggccattctacgtaccggaatttgggtgatcggcattttcactcttttaagcggcattgtaggagtatccaatatcatgctgatcaccgttaaagaacgtacacgcgaattcggtatccgcaaagcgttgggagccagaccgggctcgatcctttggctgattattgtagaaagtgtaatcatcactactttattcggctacataggtatggtggcgggcatcggagtgaccgaatggatgaatgccactttcggcaatcaagtcatggataccggcggatggacaacaaccgtcttcctgaatccgaccgtcgatataaaaatagctattcaagctacacttacattaataatcgccggaacgttagccggattgttccctgcccgcaaggctgtcagcatccgtccgattgaagcacttagagcagattaagattatgaaaatagacatggacacctgtgaggaaatcctcattaccatcacaagaaataaaacaagaagcctgctgaccgcattcggcgtgttctggggaatcttcatgctcgtagcccttatcggaggcggacaaggattggaagagatgatgaagaaaaactttgaaggatttgccaccaactccggtttccttgccgcgcaaagaacgggcgaggcttacaaaggttttcgcaaaggaagatggtgggatctggaagcaacagatatcaaccgcctccggtcacaagtcaaagaagcggaagtgattactccttccgcagcccgctggggctccaaagccgtatacgaagataaaaaatacgattgcagtgtgaaaggactgtatccggactatctccatatcgaatcacaggagatagcatacggcaggtttatcaatgatgtagatataaaagaagcacgcaaagtatgcgttatcgggaaaagaatctacgagagtcttttcaagccggacgaagatccgtgtggcaaatacatacgtgtggatggaatttattaccaagtcatcggaatgtctgcttccgaaggaaacatgagcatacaaggacggtcttcggaggcggtcatccttccttttactaccatgcaacagacttacaatttgggagggcagattgacgtgatctgtttcaccgtgaaacatggagtcaaggtatccgacatacacccccgaatggaacagatcattaaagctgcgcattatatcgctcccaacgacaaacaggcacttatgtatctgaatgccgaagcgatgttttctatgatcgataacttgtttaccggtatccatatactcatctggatggtaggattgggaactttgctggcgggtgctatcggcgtgtccaatatcatgatggtcaccgtaaaagagcgtaccactgaaatcggtatccgccgggcaatcggagcacgtccgaaagatatcctgcaacagattctgtctgaaagcatagtgctgaccgcccttgcaggaatgtgcggaatctcctttgccgtcatagtgctgcaactaacagaaatggcagctaactcaaatggaggtgatatccgtttccaagttaccttcggactggcagtcggaacgtgtatcttactgattgcgttgggtatgctagccggactggcacccgcttaccgggctatggctatcaaaccgattgaagcgatccgggaggagtagaagttgagaattagaaattaaacatatatatccaagatgaaaaagtatctgaaaatcgcattattggtagtcgttgctatcattcttgtcggaacatttgtgttcctttatcagaaatccaaacctaaggtaatcacttacgaaacagttagaccggaagtgactgacctccaaaaaacaacagtagctaccggaaaggtggaaccgagagacgaaatcttaatcaagccgcagatttcgggtattatcgacgaagtgtacaaagaagccggacaagctgtgaagaaaggggaagttatcgccaaagtaaaagtaatccctgaactcggtcaactgaattctgcggaaagtcgtgtgcgcctggcagagattaatgcaacacaggcagaaacggattttgcccgcgtaaagaagttgtacgaagatcagctgattagccgggaagaatatgagaaaagtgaagtagctttgaaacaggctcgcgaagaaagacagacggctaaagataatctggaaatcgtaaaagaagggattaccaaaaacagtgcctctttcagcagtaccctgattcgttccactatcgacggactgattctggatatacctgtcaaggctggaaactccgttatcatgagcaacactttcaacgacggaaccactatcgccacattagccaatatgaacgacatgattttccgtggtaatattgatgaaacggaagtgggacgtatccatgaacagatgccgatcaaactgacaatcggagctttgcagaatctgactttcaacgccattctggaatatatctctccgaaaggggtagaaaccaatggtgccaaccaatttgaaatcaaggctgcaattaccattccggattccgtactgatccgttccggatattcggctaatgcggaaatcgtattacaaagagccaatcaggtattggcagtacccgaaagcactgttgaatttagtggtgactctacatttgtgtacatcatgacagattcagtgcccgaacaaaagttccagcgtacacaggtgactgccggtatgagtgatgggatcaagatagaaatcaagaaaggggtaaccattcaggacaaaatacgtggtgcagagaaaaaagataaataattgaatccgatgaaaataattcgtaaaaccatatcagcctttctgcttgccggagtcggaatcatctccatccaagcacagaacaacccttcgcaagcgtggacgctgcggcaatgtatcgactatgccattgagcataatatagaaatccgtcaatcggccaataatgtcgaagcaggcaaagtgagcgtaaacaccactaaatgggcacgccttccgaatttgagtggtagtgccagtcaaaactggagttgggggcgtaccgcttctccgatagacaactcgtatagtgacatcaacagcgccaataccagtttcagcttgggaacaaacgtacctatatttaccggtttgcaattgcccaaccaatattcacttgccaaactggatttaaaagctgctatagaagatttgaataaagccaaagaagacattgcaatcaatgtcacttccgcttatttgcaggttttattcaaccaagaattaagtaaggttgctcataatcaggtagatttaagcaaagaccagttaaagcgcatccaagggctccacggagtgggtaaggcgtcctcttctgaagtggccgaagcacaagcccgtgttgcacaggatgaaatgactgctgtacaatcagacaatacatacaagttgtcattattagacctcacccaacttttggaattacctacgcctgaaggattcgtgctcgaaggtcctaaggaagaactagagttcgaatctctcactccgccggatgacatatatacacaggcacttgcttacaaaccaagcattaaggctgcagaatatcgtttgcaaggtagtcttaatagtattcgtattgcccaaagtgcgttttatccacaactctctttcagcgccggtttgggtagcaattattatactgtgagcggaagatcagaaaacagcttcggcagtcagataaagaacaacttgaataagtatgtaggattcaatttgagcgttccgatctttaatcgtttttctacacgaaaccgagtacgcaccgctcgtttacaacaaatagacttatctttgagattggataacgcaaagaaagtactctacaaagagattcagcaggcttggtataatgctctagctgctgaaagcaagtacaactccagtgaagtggcagtgaaagctaacgaggagtctttccgcttgatgagtgagaaattcaataacggcaaagctacctttgtagaatataatgaagccaaacttaatctgacgaaagctctttcggataagttgcaagcaaaatacgactatctgttccggactaaaattctggatttctacaaaggacaagtcattgaataaaaagaaatatatttgagtttagtatagtagttccttaaaacatatccgttggttcattcgttattatagaaagaactaacggatatgaagtgttttatc

SEQ ID NO: 11843 - DNA, 10857 bp, Unknown
  gut microbiota DNA sequence
ccaaaacccttgtaactcaattctatcactatatctttccgcatttcacttttttgtagtaactttgcagcataaaaagacgaaaagatgcaaatccgatagtttttcaacctattccgatagctttcaaacccgtcaggacatggttacgtcctatatttgcgaggtaaatcaacaatctaataatctatttaagatgaaaaagcagttaaccctatttctctgtctgttgctattcatacctatgtatggatatgcggaagatgaagtaaatcatcaaattgtacagcaaactaccaaagtaaaaggcactgttacggatgaacaaggtgaaccgttaatcggagccagtatcgccgtcaaaggaacttcccagggagtgattaccgacttcaacggtcaattcagtatcgacgcttccagaaacgctacattaatagtaagttatgtgggctatcgttcggaagaagtacaggtaaaaggacaatctaatcttaaaatcgtcttgaaagaagacagcaaaatcatcgatgaagtagttgttaccgcactgggtatcaaacgggaacggaaagcgcttggttattccatcggtgaggtgaaaggcgaagagcttgaaaaagcgaaagaaaccaatgtcatcaactcgctggcaggaaagattccgggactggttatcagccagactgccggcggtccttccggttcgtccagagtgatcgtccgcggtagcacggagatgaccggcaacaatcagccgctctatgtagtagacggtgtgcctttggacaacagtaactacggaagtgccggacaatacggaggttatgacctcggcgacggtatctccagcatcaacccggacgatattgaaagcatgtccgtattgaaaggcccggcagcatctgccttgtacggtagccgcgcttctcacggtgtaatccttatcactaccaagaaggcaagtaccaaaaagaaatttgcagtggagctgaacagtaccactactttcgaaaaacaattgacgaagtgggacgatgtacagtatgtctacggacagggaaccggcggacgtatcaacggtacagacgaccaatattcttccaacaagaactggggaccgaagattgatccgggactgaacctgacgtatttcgacggagtcacccgcccgtatgtggtcattcccaataatatcgacggtttcttcagaaccggtatgaccaccaccaacaccatcgttgtcagcaccgtgaaagatgacacgggtatccgcgccacttatacggacatgcgcaacaaagacattctccccaacacgaagatgagccgtaatacgttgaacctgcgtgccaacacgaccatcaacaagaaagtagacctcgacttcaaggtgacttacacccgtgaagacgtaaagaaccgtcccgcactgtctgaccaccgtgccaaccctgccaagaacctgatgtctctggcaacgacctacgaccagaaatggctgcgcgacaactacaaagatgccgacggcaactactacgactggaacggacgggacgtatggaacctcaacccttactgggtgctcaacgaaatgaccaatgaatcgggaaaagataagttcatgggttcggcactggtacgctacaacgtcaacgaacacctcaagattcaggtgaccggtggtgcggacatcaactttatgaactttcaggagtatgctgcccctacatcaccgggattcgaacagggacagttacaaatcagcgatttcagaaacagaatgtataacgtagaagcactagccatctacaacaacagttataagaaattcgactatggagtaaccataggcggcaacctctacaaagtggacaacaaaacccagattgtgactgccaaagaaatggtgatgcgtgacgtgattgctctgcaaagcttcacaagcaaagagatcaccgaaggaacctatcgcaagcagattaactccctctatggttctatcaacctggcttacggcaacttcgtctacctcgacgccacactgcgcggtgaccactcttccactctgccatcgggaaacaatacttatctatacccatcggtatcaggaagtttcctgttctcggaattcttcaagatcaatccgacgctattgccttacggtaaagtgagagtttcatgggcacaggtaggtagcgacacagatccttaccaattgggactgtcctacgaactgtctcccaaaaactattcagggtacgcactgtctcaaatcgccaatacgacgattccgaacaaagacctgaaaccgaccaagaccaactctgccgaagtgggactggaactgaaattcctgaaaaaccgcatcggactggatttcacttactacacccaaaaaagtagtaatcagattatgcgcctcaacaccacaggaacttccggctacaactccatgctgattaatgcaggagaaatagagaacaaaggagtggaaatcgcactgaacacacgccccatacagacgaaagatttctcatgggacttgaatatcaacttctcaaagaatagtaataaggtaaaaagattagcttcaggtattaaagaatttgaattggaatcggcacgttggattaacgtaaaggtagctgccgtagaaggggagaactatggttccatcctcggtaaagacttccttagaaatgatgccggacagattatcgtagatgcttctacgggacttccgaaagtgacggaagacttacgagtgctgggcaacgccacctggaaatggacaggaggtatcaccaccaacctgacttaccgcgacatctccctgtctgccatcttcgatattaaggtaggcgccgatgtctattccatgtccgcccgttcttcttacatgaccggaaaagacaaagccactcttgcaggacgcgacggctggtatgaatcggaagagcaacgactgcaagccggagtgaaagaaagtaattgggaagcgacaggcggttatgtagtagagggcgtggtagaaatgccggacggaagtttcgcggaaaacaagaagtttgtcgaccccgaagtatattggaaacatatagccgatcagactccggttccgtttatctacgacaactcttacgtaaaggtgcgcgaaattacgttggcttaccgcctgcccaaaagatggatcagtaaagtgtttgatgccgtatccgtatcgttcgtggcacgtaacccgttcatcatctacaagaacgtaccgaacatcgacccggactccaactacaacaacggctcgggtatgggactggaatatggctcgctgccatccagaagaagctatggtttcaatgttaacgtaaaattctaatagtaagcaatcatgaaaacaatctataaaatcgccttcggtatattatgtatatgcggtctgctgctgggagcctgcaccgactttgaggaactgaatacagacccttccaagtcgtcctctaccgacccgaaccagcaactgtctatgattcagttgcaaacatggggacattggcaaatgtgccagccctatccattctatctggctgcttttgcacaatatatgcagggcgactggaacaccaccaactatggcggacagtatcgcaaaaatgatgcggaaatgggaaacacatggaacctgatgtacccggcactcatcaagaacattgtcgacattctggacaaaaccaaggataacgaacgggaagtcaacattcactccgttgcccgcatttataaagtatatcttttctccatactgacggatatgtacggcgactgcccttacttcgaagcgggtaaaggctttatcaccggtaacgtaaaacctgcctacgacaaacaggaactgatatacaaggatttcctgaaagaactcggcgaagcggcagatgctctcaccgccagtggtgacaaagtcacaggagatattatctttcaagggaatatcgacaaatggaaacgttttgccaactccctgcacctgcgctatgcaatgcgcatcgtaaacgcagatccggaactggcaaaagcagaagccatcaaagctgtcggtcaggaagccggcctaatgcaatcggccgctgacgatgccctgattgcttacaccgatattcaggactgggcatccaacgaattccgcagaaacggactcgcccaactatggagagggcgcgaagcatatcctacggcttatctctgcagcacattctggaaacaactggacgctacttccgacccgcggcagtttgtattcggacgctgctatgacgaaagttcggcaaacaatccattcggacgtgtggatctgacggaggaaatgcagaatacggaagctgccaagtttcagccttgcaacccgggttacttctggtacagcaacggtacatggccggagggctattggagcaaactgactaataaatggcaggacaaagctacccgtccgcagctcaacaacattttcctgaaaggcgatatgcctggagtgattatgacatacgcggaagcggaattattactggcggaagcaaaagcccgctgggcaggagacatcacaacaggtgccgacgcttccactcattatgagaacggagtacgcgccgccatccatttcctggagaaattcggcgccaagacttttgacgatcaggtcatcgatacctatttacaggctaattcactacctgccagcggattggatgcacagcttaccgctatcaacacccaattatggattctgcacttcaacaatatccccgaaggatatgccaactggagaagaacagacattccggtgttgcttccttctccccactacggggcagtgacgattgattcgcagactacaccgctgcgtctctgctacccgctctttgaaagttcgtacaatccggagggttatcaatctgccatccaggctatgggaggcaaagacgactggaattcaccggtatggtgggacaaataaacctaagataatcaacactaaaagaaaaaacgattatgaagaaaataatatttatatgcacgttgctggtatctctgtttgccatgagtggttgcagcgacgatatagacactccggtactgaccactgacgaatatccgcgcatattaggccgctggccagacaaacaggaggatggcacgttgggtaaattcagtattccattgaatcaggtgctttccatcaatgtacaatacactcctgccgaactatgcgaggggacatggtatctggatggaagggaaattcataaaggagtaggattgacgtacattccttcgaccatcggcactttccacctcgaactgattgtaaagactccgactaaggaaaccacccgtgaagctattatccaagtaaccgaagcaacagagtaaaccattaaaacaagaattgtatgaaaaaaagacttataatctatctggcctgtctgtttgcatgcctgatagcctcctgttccgaaaaagatgaagtaatcagcaacggaggagaaccgcaaaactatgttccttttgccatcaacaaaggggtgaatatcagtaactggctgtcgcaggtagacgccatccccgccaacggcttctcacaagccgaagcacaaaagctggcaggatacggtttcgaccacatccgtctgccaatagacgaaaaactgttcttcacggaagacggtcagaagataccggaagcattcacactgttgcacaatgccataggatggtgccgggatgccggaatgaaagtgattgtagacctgcacgtattgcgcgatcacaacttcaatacaacggtcactacatcgggcgacccgattgagagtttctacgacacatttgaagatatgaaatgggcaggatggtttgccaatggctccggcgtgacggtgaacaacgtggacaatcccagcaaaagcggtataaacaccagcaacagggtgttctctgtggtacgaaaatcaggagtggacacttggtcgaacgccaagaaaaaggatttttccattattcctgtcgggtcaggcaaaatgcagttcaagtacctgcgtgccaaaatatacaaaagcaccaaaagcactattaccgttgtattgagtgacgagaacaatacgaacgacggttactacggatataccaatactacggcaaatgaatgggaagaaatcgccgtagatgtatccaactataacaaaaactgcggtcgcgtggctctccgtccggaagaaggagaaacgatgtatttcgacgatgtattcttctccgacagtaaaactggtgacaacaagatttaccctgaaagtggaactaccaccgttgtccccaaactctggacagacaaagacgcccagtacaaatatctcgacttatggaaaacgctggcggaagaactgaaccagtatcccaacgatctcgttgcctacgagttattgaatgaaccggtagccccttacgcctcacaatggaactctctttccgcccaactgattcgtgaactccggcaaacggaacccgaacgtaaactcatcatcggctctaaccgctggcagagtgtcaacactttcaacgagctgactattcccggcggtgacccgaatatcatcttgagtttccacttctacaacccgcatcccctcacgcactaccaagccgagtggacggaagaaaaagacctgaatgtacccattcactatccgggcgaactgatagaagaggcggacttcaaccaactatccgaagcgatgcaaaaactggtgactccttatatgggaacgtatgataaaaccacgcttgagtcactcgtattgaaagcggagatgaaagctaccagtctcggcgtacaactctactgcggtgaattcggttgctacaaaaagactccggctgccgacagaatggaatggatacgggacgtagtatctatcttgaaggatcgtcacatctcctactcttattgggaatataaagcaggattcggtttctgcgattcacaaggaaacgtgattgaacaggaggtactggatttgttaactaaataatagtcattcagataacaataatcattcaaattaaaaaagaaatatgcgacaaacattcatcgctatgggaatttgttgtgctatcggcatttccacattagcttgtcaggataaaagcaaagattacaccgatcctacgctgcctgtgtccgaacgtgtctccagcctgatgtctcaaatgacattggaggaaaaagttgcccaaatgtgccaatacgtgggattggaacacatgaagaaagcagaaaaggatatgtccgccgaagacttgaaacacagtcattcgcagggtttctatcccaatctacattcttccgatgtggaagagatgacgaaaaaaggactgattagctcgttcctgcacgtggtaaaggccgaagaagccaactatctgcaatcgctggcacagcaaagccgcctgaagattccactcctgattggcattgacgccattcatggaaacggtttgtatcgtggttcgaccatttaccccactcctatcggacaggcagctacttttgaccctgcactggtagaacggatgtcgcgggagactgctattgaaatgcgtgccagcggtatgcactggacgtttactccgaacgtggaagtggcgcgtgacgctcgctggggacgtgtgggcgaaacattcggcgaagatccctatctggtaggacagatgggggcggctaccgtacgcggattccagacaaaggatttcacgggaaacgataaagtgattgcgtgtgcaaagcatcttgtaggtggcagtcagccagccaacggaatcaacggtgctcctgccgagttatcggaaagaacgttgcaggaggtatttttcccgcctttcaaagattgtctggaagcgggggtatttacagtgatgacggctcataatgagttgaacgggattccttgtcacggaaacaagtatctgatgacggaagtattacgcaatcagtggaagtttgacggttttgttgtcagcgactggatggatattgagcgcatgcacgactatcacaacgtagccgaaacgctgaaagacgcttaccagatcagtgtagatgccggaatgggaatgcacatgcatggaccggaattctacgaagctatcattgagtgtgtgaaagaagggagtattcctgaaaagcagatagatgctgccgtttctaagattctggaagttaaattcaggttaggattgttcgagaatccgtttatcgacctgaaaaagaaagatgaaattgtctttaatgagaaacatcagcaaacggcactggaaggagcgcggaagtctatcgtcctgttgaaaaatgaaggcaatatgctgccattggatgcttcgaaatataagaaagtgtttgttaccggacataatgccaacaatcagtctatcttaggtgactgggcaatggaacagccggaagaacatgtcactaccgtattgaaaggcctgaaagctatcagtcccgaaacgaattataatttccttgatctcggctggaatgtacgtttgctatcggacaatcaaataaaggaagcagtgcaacaggcacgcagctccgatctggcgattctggtggtaggagaaaactcaatgcgttatcattggaacgagaagacgtgtggagagaacagtgaccgttacgagctttctttgccgggacgtcaacaggaactggtggaagctgtagctgctacgggggttccgacagtcgttatccttgtcaacggccgtccgctgactaccgaatggatagatgaaaatatgccgtgtatcatcgaagcatgggagccgggagtagccggggggcaggctttggcggaaattctttacggaaaagtgaacccaagcggtaaactgccgattacgattccaagaagcaccggacagattcagtgtatgtacaatcataaatttaccaaccattggtttccgtatgcaacaggaaattcattacctttgtacgagttcggttacggcttgagttatacgacgtataaatatgagaacctcaaactgtctgaagcaactatcactcctgacaaaagcgtgaaagtaactgtagatgtcacgaataccggaaaaatggatggcgaagaaacggttcagctctatatccgcgacgaatacagttctgctacccgccctgtaaaggagttgaaggactttgcccgcatacctttgaaagcaggagaaacgaaagaggtttcatttactctcactcccgaaatgctgtcctactatgacgctaatatgcactatggagtagaaaaagggactttcaagattatggtgggagcttcttcaagagataccgatctgcaaagcattatacttacagtgaaataaaatagatatgaagaaattactatgtctcgccctgttattgtctgccggaagtgtttataccggcagcgtttcggcaagcaaccaacctgccggtaagaaatccggcaacaactcaaaggatatatacaaaaagacctggattgacttcaacaagaacggtgtaaaggatgtatatgaagatccttccgcgcctatcgaagcccgtattgcggatttgctttcgcaaatgacactggaggagaagacctgtcagatggctactctctacggttcgggacgggtactgaaagatgcatggcctaccgacggatggtcgacagaaatctggaaagacggtatcggaaatatcgatgagcaggccaacgggctgggtaagttcggttctgaaatctcctatccgtatgccaacagtgtgaagaatcgccacaccgttcagcgctggtttgtggaacagacacgactgggtattccggtcgattttaccaatgagggaatacgcggattgtgccacgaccgggctaccatgtttcccgctcaatgcgggcaaggtgccacgtggaacaaaaaactaatccgggaaattgcgaaagtcactgctgatgaggcgaaagcactcggatataccaatatttatgctccgattctggacatcgcacaagatcctcgctggggacgtgtagttgaaagttatggagaagatccttatctggtaggcgaattgggtaagcaaatgattcttggtctgcaaagtgaaggaatcgttgccactccgaagcattttgccgtttatagtattccggtcggtggacgcgatggaggtacacgtaccgatccgcacgtggctccgcgtgagatgaaaactctgtatctggaaccattccgtaaaggtattcaggaggcgggtgcattgggcgtcatgagttcttacaatgactatgacggggagcctgtttccggaagttatcatttcctcacggaaattctgcgtcagcaatggggatttaagggatatgtagtttcggatagtgaagcggtggaatttctacacactaaacatcgtatcactccgactgaagaagaaatggctgcacaagtggtaaatgccggattgaatatccgcacgaacttcactccgccacaggattttattcttccattgcgtcgtgctattagtgagggaaaagtctctctgcatacgctcgatcaacgtgttggtgagattctccgtgtcaagtttatgatggggctttttgataatccgtatcccggtgatgaccgtcgcccggaagtggtagtgcataatgccgcccatcaggatgtatctatgagagcagctttagagtccatcgtgcttttgaagaatgaaaaagagatgcttccgctatccaagagttttagcaaaatagctgttatcggtcc

SEQ ID NO: 11844 - DNA, 11011 bp, Unknown
  gut microbiota DNA sequence
agggaacacaaccggacattactaaaaaacggtactccgattcacatcgcagcaccgtcacaacacaaacacaaaataaaacacgacaaaactactatgcaatcttcctgttatgccggggaggcatatcttgcttgacttatctatattcgcatacccataagaagctttatcaggtgatttgcattattaaaacaaacagttatatgttttgttcataaaaaacagactcttctacttattttttctctttataatcctttaaaaagccctccatcagccatttagccaatgcctgtcggttagaatttatcactaatcggcgttgatcgaaagtattttgaatattgcccaactccacaaatacagaaacgggagtggtacgggagagcacatacagattacggccactcacagtgccggaaaagccccggttgggctgatgcttatcatatttcgattcaaatgtatctttcatattattcgccaaccgtttgctatgcgctttcttgttcgaatgatagaaaaagacatcagtttgctttcccttgcttcgactatccacatggataaagatagccctgcaataggcataatttttacggtctttctgatataaagcgttgatcttattgcaacgctgctgaagacgttgtacctgattcaatggaatcggatcccccatacaagtttcgcgcttactgttggacagatacgattcatcacgaattccatccttagcgtcctgaatgataatacgcacatcagcaccttcctgcatcagaacacgcgccagacgaagagcaatatcatatgcatattcgtcttcgtgaagctcatgccttcctgcccgtccgatagctccgggatcgggaccgccatgtccgctgaccacatagaaacaagcaccggcaagacgattggaagtaaccttgacatttgccaattccttaccaaacaaaggctcgttaatagtagttcccaaatttgtgttttttgatttctctttgggaggaataatataactcacccctactttaagtacattctttttccccagtttctttttattcagctctataaaatcatccatatattttcggggagaacgattatgtctcaatagaaaagcagagataccctcacccgccttcggggtcgctttctgctgcgcccaaagtgctgttcctgagaaaagaaaagctaagaataaaagaatatagagtttatttttcatatctgcacaattatctccttcatgtgactatcatttcactcataaacagggcaaaaatacaattattttccctacttttgcgtcattaaaacattttttggaataaatcactaaaacccgataacattatggcaaaacaattcaagcccgaaaccctgtgcgtacaggcagggtggacgcctaaaaagggcgaaccacgcgtattgcccatctatcaaagtacaactttcaaatatgatactagcgaacaaatggcccgccttttcgatttggaagatagcggttacttttatacacgactgcaaaatccgacaaatgacgctgttgccgccaagattgccgctctcgaaggtggtgtagccgccatgttgacttccagtggtcaggcagccaacttttatgctattttcaatatttgccaggccggagatcattttgtttgttcttccgctatttacggcggtactttcaacctgttcggcgtgacaatgaaaaaactaggcatagacgttactttcgtcaatccggacgccagcgaagaagaaatttccgcagccttccagccaaatacaaaagcattgttcggtgaaactatttccaatccttctctcgaagtgctggatattgagaaattcgcccgtatcgctcacaatcacggagtacctttgattgtggataatactttccctacccccatcaactgtcgcccgttcgagtggggtgccgacatcgttgttcactccacaaccaaatatatggacggacacgctaccagcgtaggcggttgtgtaattgacagcggtaacttcgactgggacgctcatgcagataaatttccgggcctttgtacccctgacgaatcctaccacggactgacttacaccaaagcatttggcaaaggcgcttatataaccaaagctaccgcacaactgatgcgtgacttgggcagcatccaaagcccgcaaaattcattcttattgaatctgggactcgaaacactacacctccgtatgccacagcattgccgcaatgcacagaaagtagccgaatacctttccaagaacgagaaagtggcttgggtcaattactgtggcctgccggataacaaatattacgctttggcacaaaaatatatgccgaacggttcttgtggagtaatctccttcggcctgaaagggggacgcgatgtttccatcaagtttatggattcactggaattcattgctatcgtcactcacgttgccgatgcacgtagttgcgtgcttcatcctgcaagccacacacatcgtcagttgtcggacgagcagttgatggaagcaggtgtacggcctgacctaattcgtctgtccgtaggaatcgaaaacgcagatgatatcatcgcggatattgaacaggcattgaacgcataagcatacctaacaacctaaaaatgagtgagtgtcagaattaaaaccagcaattgccgactttaattattctgacacctgcttttttttgttacatctgtcgtagtatctgttacatatttgttcctccatacccctcttcttttttacttttgtcaccagtcaactaataaataacactttgaatcaagacatgagaaacattgtaaagaaaaccactctggtaagtagtttagtcctcacactatcagcaaactccatgtatgcccaatctctcgaatggatcagcagtacggaaggtaacacctgacaaaaatcgaaagccaagctacaaacgaatgccgcacaaactcccatattggatgtcagcggttcggaagaagggactgttttcaaagcttgggtaacttgcttcaacgaattaggatgggatgcactcaatatgcttccccgtaaggaacatcacaaacttttctctcccgaaggagagctgaggttcacaatggggcgcttttccatgaatgccaacgactatgcacggcagaaggtatcatccgtttcaacacagaatatctcgctcctaccctaaagaagcaacattcggaaattaaattatacttaggaacaatcaacaccaaccgctacgatgttatcgatcaggtcctttctgatccacgtatgccggaaacgatacaaggcgtcggtttccaatgggaaggcggacagatcttaccgaaactccgtgccaaatatccgcaatataaatatgtacaaacagaaagtgaatgcggatggggctctttcgattggaaagcagccgagcataccttcggattgatgaatcactatctgggtaatggttgcgaagaatatactttttggaacgctatattgtatgatggtggtttcagcggatggggatggaaacaaaacgcgttaatccatgtagattcaaaagcaggaacggcaacctatgctcctgagtattatgcagtacaacattacaaccattacataacgcccggttcaaaaatcttagcttataaaaccggcaaagaagacaaaactccggtacttgtcgttatgactcctcaaaagaaacaagtggctatagccggaaacttcaacgaaaaagcgaaagatataaccgttaatttagggaccgctatttaaatatcactttacaacctcattcactgaatactttcgtagaaaaataggaaaagagaataaaaaaatattcactgcaatgagattccctctcatcacagtgaatatacttaagaatttagaataacaacctccttacatccggcctcctcccaacgcctgatataaagtaatcataccctggatttcggtaaagcgattggcaacttgagacaattgtgcattaagcaacgtttgttgtgcagtcaatacctccagataagtggtgttgccatgcttcatcaaaagacttatactcttggaggccgtctgtaaggaagctacttgcttatcatagaaagcagccttctcacgagccgtctgatactgtaccaatgcttcgttcacctccacgcccgcattcagcaaagtctgttcaaaactaaggcgtgcttcttcctgttgcgctttcgcaatcttgagttgtgcgatattcagtcctttattaaacaaaggctgagtcagggatgctaaagcagaagcaaggaattgtcccggattgataatcatgctaccggcactgtttgtccacccggcactaccactcaaagtgatagagggatagaaagcagcacgagctgcattcgttgtgtagaaagcctgagccagtgaaaattccgcactacgaacatcggggcgattggcaagcatttgcaaaggaacacctactgagaagttctccggcaactgctgatttcccagttttccacgctgaatctcgtgaggagtttccgccaataacaacgccaacgagttctctgcctgattgatctgctccttcagatcaagcacagtcgtacatatattataataggtagcctctgtctgcgccaacccggcttcagtcaccataccggcatttttcatggcacgggtagtcctcacactttccttccaagccgcttcggtagcaacagcaatctcatattgcgaatcaagcattagcaatgtataataggcatttgccatagcagccaccaattgtgttttcacagcctgttcatactccttactctgttcgtaggcagctttcgcacgacgtttggctgtcgttacctttccaaagatatccaactcccacgaagccgtgacaggcagagaataggtctgtgtggctttcgcacggcctaaactgctgacagccccttcgggcgccaaaaacagggtaggcagataagacaatttggacgtcaagagtgaagcttccgcttctttcacacgcaggtgagccgtctgcatatctgtattccgcaccaaagccgaatcgatcaaagtctgcaaatatgggtcggtaaaaacctccctccacgagaggttaccgaagtttgccgtatcgacggcagcgactggctcactaccataaagtccctccggaacttccgacaccggtttgtatttattgtaaataccgcaactgctcagtaccagtgttgctgcggataatatgataatttttctcatactttacttttctatttgagttatttatcttcgttaaacacactgcgttccgccaagcttctttccttctccaattctacttgttggtccgcctcctcatacatcggcttacggattttctcctgcaagaactcaaatgcaatgtaaaataccgggactacaaacaataatgccaatgtacccacagccatacctcctacgacacctgtacccaatgatgagttaccgttagcgcctgcaccggaggagaacatcaacggcaacataccgaaaatcatcgtaagaactgtcatcaagatagggcgcaaacgagcttgcgccgcactgtaggccgactcgataattcccatccctttacgacgccgttcgattgcgtactctgtaatcagaatagccgtcttcgctaacaaaccgatcaacataatcacacccgtctggagataaatattgttctccaaaccgaaaatcttggcaaagaggaaagatcccatcaagccgaacggtacggaaaagataacggcaaacggtatcaggaagctttcatacaaacaagctagaataaggaagatcaaaacaatgcaaataccatacacaaaaagcgtttttgcaccgccactgctggcctcttcacgcgccattcctccatactcgtatccgtatcccataggcaaggtctgttcggcaacctcattaatggctttctggacctcaccggatgagtatccggcagccggattcacgttggctgtaatactgctatacaggttgaagcgattggcaacttccgctcccattactttcttgatcgtcacaaactggctgacaggagccatttcggtaccattacggacatacatattcttgagtgcgtgctcatccaagcgatactccggtgaagcctgcatcataacacgatataccttaccgaactggttatagttggatatgtaagcaccaccacagtaactacccagtgcatccaatatcgtagagggcgaaatacctgcccgtttacacttcgccggatctacttctaccgacagttggggaaagttcattgcgtaggaagtatatgccattgccacttccggacgctgattcaacgcaccgaggaacttcatcgcattgttatagaatgtagtcatatccccaccagtcttatcctgaaggttcagttcgatagagttacccataccgtagcccggaatcatacccggctggaagcagaaaatctgtgcttctttaatcatatagaattgtccgttcaggcgtgtcatcaccgcatcagccgtgtgttcgctacccttacgttcgctccagtccttcagacggataataaccgtaccgtacgaaacaccctgtccggcaatcagtccgtaaccggcgacagtagtatattgttttacctccggagtgctctttatcacagcttctactttatcgattactttgttggtctcttccagcgtactacccggtgccacactgacattcaccatcataactccctgatcttcctgaggaaccagaccggttttggttgtcgacatcagataaacgagcaaagctatacagcaaaccaaagaagtccacaccatccaacggtggtggataaagaacatcactcctttcttatatttacccagcatagcattgtaagaagcattataagcggcacgcacacgtccgttgatacttttcgcgctcttagtgcccgaagccggacgcatcatcatagcgcacaatgccggacaaagagtcaaggcgcaaatacaggacaagccaacggaagttgccatagtgataccgaactgcgtatagaaaataccggaagtaccgcccataaaagtaacagggataaataccgccataaatacacacgtacaagagattaccgccatcgtcacatcacttaacgcatctttggtggcaagataaggagatgtgtagccggaatcaaactttgcctgcactgcctctaccactacaatagcgtcatcaactaccgtaccgatggcaagcaccaaagcgaaaagcgtaagaatgttgatactgaatccggctgccgtcagacaggcgaacgtaccgaccaaagagacaatgatggaaatagacggtatcagtgtgcttttgaaatcctgcaagaagaagtaaaccacaaggataaccaagatgatagcgatgaccaatgtctccaccacattgtgaatagaagcgaacaggaagtcgttagaactcatcatcgaaagaaattccgtacccgcaggcaggtctttcgacatttcattcagtttgtccgttatggcttcgttcaccgaagtagcgtttgctccagccacctggaaggccataaacgtcacgcccggatgtccgtttgtcttaccatgaaagctgtaagacaacgctcccaattccaccttggccacatctttcaagcgaagtgtagagccatcatcctctgcacgcaacacagtgttctgaaattcttccacactcttcagacgaccgcgatatttcatagtgaactggaaaacatttttagaatccgcacctaaagaaccggtaggagcctcaaggttctgctcacccagtattgccgtcacatccgacggaaccaatccgtattgtgccatcaattccggtttcagccagatacgcatactataagtatctcccaactccatcacgtcaccgactccctctatacgtttaatttccggaataacgttaatatccagataattggcaaggaaagtttcatcgtaacggtcgtccgtacttaccaatgaattaatctgcaggaagctggtctgccgtttactcgtcgttacaccgatcttggtaacttcagcaggcaacagcccttgagccttcgatacacggttttgcacgttgaccgcagccatatccggatctgttccctgcttgaaatagacttggatagtggcagtaccggaattggtcgcattagaagtgatatacatcatattttcaacaccattgatactctcctccaatggcataatcacactattcatcaccgcatcagcgtctgcccccgtataagtggcggacaccatcaccgtaggcggtgctatatcgggatattgctccaccggcaaggtgaaaagcgaaataaatccgacaatcataatcaacacggaaatggacatagccatcaccggtcgctttataaatacatttcctttcattttttgtatcttacagctttattttacttgcgttccctctctaagcagtccggcgccttgtgacacaatctcgtccccgactttcaacccgtccagaacgatatactcgcgtccgtcattgatggcagctacagtaatcaacgttgaagtcgcttttccatccacaactttatatacggaaatcttatcctgcattgccaccgtagcttcctgaggaataacaataacacctttgtaggaattgggaactaggacactgcccgaagcgccactgtgtaaaatacccgaagcattagggaacaccgcacgaacacctaccgttcctgtctgacggttgatcacaccgctgatagactccacacgtcctttctcgccatacactgaaccgtcaatcagttttaattctacttccggcatattcttcaatgcttcgtccatgtttttatactggttaatcaaagaaagcaattcattttcggtcagagaaaagtaaacgtacatatccgaattgtcggaaaccgtagtcaaagcctgtggaatgctcggtcctaccaatgctccgacacggtaaggcaacatagctatcacaccgtcgctgggactcttcactaccgtatatgaaaggttattgcgggcgtttacttcctgtgctttcgcctgtgccagctgtgctttggccgacagaagagaattctttgccgtgctcagatcgaatgcggaaaccacattctccttatgcagttcctctttgctttcataagtaagctgtgccgtagcaagagcagcttcagcagacttcacatttgccaccgccgtctgcaatgcggcctcgtagggcacctggtcgataatgaacaatgtctgtccgttttttacacgttgtccttccgtcacacatacttttgtcagcgttccgctcacctgcggataaatatcaatatcctggcgtccgcgaattgtcgccgaatatgtgctcagaatcatacggtccgccggagcgacggtcataacttcatatcctgtttccatttgtgcaggtggagcttgcttacatcccgtagcagcaaccagacagcagagcaataacagcccttgcttaactttactaatctttctactcattatgttacctattaaatttttgaacgcggcaaagataggctctttttagtatagaaaactggtcatactgttttgagttttgttcattttcggaatataaaagctaatatttagtaaaaaagtcctatttttgtccgcgaaaagagaaatgtgtatgaaagaaactccagcctttgctatactccgcgaaccttttattgccggaaccgacgaaaatctgtctccggtcatgcatcatttatggaagttggaaggaggtgccatttacttttgccgtaagggatgggcacacgccacaatcgatttgaaggattatgaaattgtaaaaaacacacaggtagtacttcttcccggtaccattatctgcatcaatggttgtagcagcgacttcaccgcttcgtttttcgaatttccaaaagagatgttcatggaagcctgcatgcggtttgagcctatatttttccggttcatcaaagaacagccttgctacgttctcccccaagaaaataccggagccatcaacggattgatacgagccacaacagcgatatataacgaccgtgaaaaccgtttccggaaccagatagccagaaaccatctccagtctttcatgttcgacatttatgataaatgctaccgctatttcggtaagcataaaatagaaggtggtacccgacaggatgaaatcttcaaaagtttcgtatcgcttgtacacgagcattgtgcctctcaacgggaagtcagcttctatgccgacaaactgtgcatttctaccaaatatctgactggtatctgcaaagctgtcactggtgattctgctaaaaagatcattgacgactttgctattctgaagattaaagtgttgcttcaatcaaccgaactgacagtgcaggaaattgccgaccgactccattttcccgatcagtcgtatttaggaaggtacttcaaacggcacgaggggatgtcgccgaaagagtatcagagtaagtattctatctaatcaagtaaaataatcttttattattagattattaggcacggattacgcggttcttttattaactaaaaccgtgtaatccgtgcctccatttattttattaatttgtatttatcgcacaacacagattgttaacagatctgtaatactatcttaatctgccttgcattcctttgcaccgtgaaacaaaaacacgggtgtgaataactttattgcatttaataaattaaaagaagcaaggtaaaagattatgaaaagaaacaaatggctgctttctctgtcaattgggctcttgtgctgtggctctgcatacgcacagacaacagtgaaaggaaaaataacgagtgaaggtggggaaccgttaatc

SEQ ID NO: 11845 - DNA, 15124 bp, Unknown
  gut microbiota DNA sequence
caggctccgtgctcccattttaccttagtagtcttttcttccttaccactgcttgttgctttccatcttttatacccctcctgtttcctgcttgaggaaatcatcttataaaccagaaaagcggtgataacaatgatcgttattaaaattccgtccattttgtatatgcatataaaaaagagagaagagaggatgagttatttactaaaataaatttaggtatttataccttagaatttattttctaggaaaatacctgtgcttatgaagcgactacacctctttgatgctaaattctgccctcatcctctcttatacaaagataactaaaatctttcgataaaacaaccggaacgaagaaaactatcggttgaacaactcaaacgtgaacttacagcctattcccccgaatttccagttttcgctgctcacaaaaactcccacgtcaaaaatatgcgtaccgatgccatatcccacttccagataaggttgaaggtgcggcatagagagggcactgatataaatacgttcattctgcacataacgggtgtacttcatcagatgccggagaataaggaacggagcttcgtaggtgaaatgcccccgtacataacggcgggaggagttataccaacgtgagtcaagcacctgaaacactccaccgatttcatcattccagcccaccggaaggttatggcgggagaaattgacaaagtccacaaaatacaactcatcctgattggtgaatgctccgaatccgaaacgataataaatgttacgcatcaatcccatccggatttgatgttgaaggtcgaattctattctttcatattcgcccgtactcttgaatacgcctttgattccccgttcataatcaaccgagaaagtaggatacaatgaacgcagatttatcttccgtttcccgttcatataataatagagtcccggtgtccattccacccggacacgaggggcgaaacttatataagtattcttgaatttgtccataaactccggaggaggcatcggataatcaccggttatcacaaaacgtgaaggttctacggcagttctcttatgggcagagaaaccgacactgacatccaatccattgacaacctcgactgtatggcggaaattgaaatacaagtccttgaaataatcaagatgaatcaagttgaaattgaatatactgtccggcatggctttcagttcatccagcaccttactgctataaattcggttaccattccccacattcaagcggacaaatccccgtttctgcggccaatactcaaaatctgcgttcaatgaccaataaaactccttgcgtgtgaaattatatccgagtttaggaacaatacggagcagtttatctcccctaaaaagacggttataacgaaaatcctgccgatatgacaagccattgcttccactataactgaacaatagaggattaatgaatggagaaaaacgtacacttccgatattagccaggttgaatttatagtcctctaccatcaagtcacccatcgttccccagaaagcctgacttttggatggcttatgcgttgtcgccgtgtcacgcctgagcaggtaatcacggtagagtttcttctcactctcactcaatggaataggacgcatgacagcaaaggtcgaagcatctgtcttgtaagcattcgtatcacactgcaaggagaatgattccgacaagttatactttttcttttctttcttgcgtactttcttttctttcagttcaatcgatttataattcaaagaagcggtataattgccatctaccctatttccgagaaacttgaaaagtgcctccacattgtaacggaccggcaaaaattcatctttcttacccacctctcccatcttaatccaacatgtaaatgttatcagctccgaccgtcccgaaaaacgtatttcccggacactccagacattactgctgacaatcatatagccgccgaccaactgatcgctttttgtccgagggataaagcgtatccggtaatcgagattattgggatctcccatcacactatctatctgatatttataatatttctgtccgttcttggcaagcggcgacagtaaccgttcatcattcagcagcgaagacgaatagatattgacactgaaatattcaagcaaacccggcagtcctctgtttccccgcacagtaccttgataagcttttactttttgatcgtaaatattaggagccgtataatgaagatcactgtaagtttcgagcaaatattcgcgtacacctttctgcagacggaacatagagggcacatagcgaagaataaaattctttttctggatatccatcttaccttttatatataggctggcacgataatcactgacgatcgtttcatacagaggggcaaaggtcatgacacgctctatgatggaatcggcggagatctcctgacgcgtatacggattcattacataatcgtgagccgttccttttgaagtaaaaaagaacaaccccaatatgcatactatcaatattttatatctcaatcgtcgtatctccttcattaacggagacaaatataaaaaagaatatcgaaaagcaagaagagttagacactaaaaagagttatcaaaagaaaaccttcacatggcataaatacataactgtacggaaataaacagatttgtgtccgaacagctcatattttctatactccctcttgctttttactgattaatttcgtatctttagtggtttccatcctttcagatatagatggtcaccttgcataatgactaatgtcacgttataagcagactaatgtcacgttacaatgtgacattggtcaccatgtaaggggaccactactcgggtgcataaactattatagttttctgcactgcaatttcaaattccctgcacagaataaccttaaagactacgaatcatcaccggacgaatcaaactaaaggagtacaatcctaagaagggggtatacgtccaaaaacatatctattttcaaaaataccccctttaaaataggggtgctttcagaaaaaacatatatttttgcaccatcaaccgataaaaagaagaccatttatgtctaaaatgagattttttgcattacaagaactttccaaccggaaacctttggaagtgactgccccttccaacaaactctctgattattatggcagccatgtgttcgatcgcaaaaagatgcaggagtatcttcccaaagaagcctataaagctgtcatcgatgccatcgaaaaaggtacacctatcagccgcgaagtggcagacctcgttgccaacggcatgaacagctgggcaaagtcactcaacgtcacacactacacgcactggttccaacctttgacggacggaacagccgaaaagcatgacggctttatcgaattcggagaagacggtggagtaattgaacgtttttcgggaaaattgctgatccaacaagaacccgatgcttcctctttccctaacggtggtatccgcaatactttcgaggcacgcggttacacagcatgggatgtttcttcacctgcgttcgtagtagatacgactctctgtatcccgaccatcttcatctcttatacaggagaggcgctggactacaagactccgctactgaaagcactagccgctgtagataaagctgcaacggaagtctgccagttattcgacaagaatattacacgtgtatatacgaatctgggatgggaacaggaatatttccttgtggactcttccttatataatgcacgccccgatctttgcctgacaggacggactctgatgggacattcttccgccaaagaccaacagctggaagaccattacttcggttctattcctccacgtgtcactgcctttatgaaggaactcgaaattgaatgccataaactggggattcccgccaaaacccgtcacaacgaagtagctcccaatcaattcgagttggctcctatcttcgaaaactgtaatctggcgaacgaccacaaccagctcgtcatggatttgatgaaacgaatcgcccgcaaacatcacttcaacgtacttctacacgaaaaaccttataacggggtcaatggttccggcaagcataacaactggtctctttgtaccgacacaggtatcaacctgtttgctccgggaaagaatccgaaagggaatatgttattcctgactttcctcgtcaacgtattgatgatggtctataagaaccagaacctgctgcgcgcctccatcatgagtgccagcaacagccaccgtctgggggccaacgaagctcctcccgccatcctgtcctgctttttgggttcgcaactctccgccactctcgatgaaattgtccgccaagtaggaaacgataaaatgacaccggaagaaaagactacactgaaactgggtatcggacgtattcctgagattttgctcgatacaaccgaccgcaaccgtacttctcctttcgctttcaccggaaaccgcttcgaattccgcgccgcaggttcgtcttccaactgcgctgccgcaatgatagcgatcaacgctgccatggcaaatcaattgaacgagttccgtgcatcggtagagaaactgatggaagaaggagttggaaaagatgaagccattttccggttgctgaaagaaacaatcatcgcttccgaaccaatccgtttcgaaggcgacggttactccgaagaatggaaacaggaagccgcgcgacgcggactgaccaatatttgccacgttccggaagcattgatgcattacgtcgacaatcagtctaaatcggtgcttatcggcgaacgcatctttaacgaaaccgaattgaacagccgtctagaggtggaactggaaaaatatactatgaaggttcagattgaaggccgcgtattgggtgaccttgctatcaaccacattgtaccgaccgcggttgcctatcagaaccgtttgcttgaaaaccttcgcggactgaaagaaatattcccggctgaagaatacgaagtattgagtgccgaccgcaaagaactgatccgtgagatttcacaccgggtgacttccattaaagtattggttcgcgaaatgactgaggcacgaaaagttgccaaccatatggacaactacaaagatagagcctttgcatacgaagaaaaggtacgcccatatcttgaccagattcgcgaccacatcgatcacttggagatggaagtggacgatgaaatatggccattgcctaaatacagggaactgttatttaccaaataaaacgtccgtaagattgcacgaaagctctcacttttgtgcaatctttttatagattcgtttattttttcattttttatttctacttttgtgctgtataacacagttttgtagcactcatggtaaaaatgaatatgtcagacatcgatatttcggaaccgttatccgatatgttagctcctctaaacaatgaacaaaaggagtttctgatgaataattatacgattcaaacctacaaaaaaaatgaaaccatttactgtgaaggagaaacgccatcgcatctaatgtgtcttatcaatggtaaagtcaaaatcttcaaagatggtgtaggaggtagaagtcagattattcgtatgattaagccacacgaatattttgcatatcgtgcttattttgccaaagaggattttgttactgccgcagcagctttcgaaccttctgttgtttgcttgattcccatgggtgccatcatggctttagttgcccaaaacaatgacttggccatgttctttatccgccagctttccattgatctcggcatttctgacgaacgaaccgtcagcctgacacaaaaacacattcgaggacgtttagccgaatctctgatcttcttgaaagaaagttatggactggaagaagacggctctaccctaagtatttacttatcacgtgaggatctggcaaatctgtcgaatatgaccacttcgaatgccatccgcacactgtcacaattcgctacggaacggctgattacaatcgatggaagaaagatcaaaatcatcgaagaagaaaagttaaagaaaataagcaagattgggtaaaagtgttcctacaccaatcactccaccctaaaagtgaacatacatatagaaaatataattgcagacataaaacgtagcaacaaacaggctttcaaaaagctatttgatgactaccaccctattctttgtgttttctccaaccattatatcgaagacaaagaagtttgcaaagatattgcacaagatgtatttccagccgttcgatctagctcctatcccggaaaatgaatcgaaagtgatagaaataaaagtagaagacggcaagctgactcccatcacccgtcagttcttcatcgaccacattttcgacttccgcaaatggaaaaaatggcggagcaatacaaaaggaaagtgatgttctacaaagtgaatgcagacaaagaaaaggatttatgcaatcactttggtgtacaggcattgcctactttattcttcatacctgcaggcggcaaaccgattattgaagtcggagctactccggagaagtacgtacaaatcatcgaagaacaactactgaaatagaaagataaaataattgcaagtacttttagtacgaatacttcataatgactgccccctaaaagttttttattcaacttttagggggcagttcaaataagttttaagttccgtcttttcctctaatgcaacaaactatcaaatctttcctatcgaagaaagataacgctccgcctcaatagcagccttgcagccacttcccgcagcagtaatagcctggcggtaatgcggatcggcaacatctcctgcagcaaatactcccggcactttcgtacgtgggctatctccatccgtaataatgtaacctacttcatccgtatcgatatagtctttgaatatatccgagttcggtttatgaccgatagccaggaagaaaccatcgataggcaggctgtaacgttcttcatcaggttcgccccaacgttttacaaggttcaccccttctactccgttatcaccatacaaaccaacagcgttgtgttcaaaaagcacttcaatcttctcgtgattcatcacacgctcctgcataatctttgatgcacgcaggaaaggtttgcggacaatcagatatactttagatgccagaccggcaagataaacagcctcttcacaagctgtatcaccaccgccgacaacagccacgattttcttacgataaaagaaaccgtcacaagtggcacaagcgctgacacccattccggcatatttcttttcatcctccaaccccagatatttagcagtagctccagtagcgataatcaatgcttccgtttctatttctttctcaccgtcaatcgtaatcttataaggcgctttgcttaagtctgccgcagtcgcaatgccaaaacggacatcggctccaaaacggctggcctgagcacgtagatcttccatcaattgcggaccgctgattccttccggataaccgggaaagttctctacgtccgtagtcgttgtcaactgaccgccgggttgcaacccttcataaagcaccggacataagtttgcacgtcctgcataaatcgctgccgtgtatccggcaggtcctgaaccaataatcaggcatttaactttttctatttctgccattttattatacctttatcgttttatttaatcaaaaacattttatctcaaatctataatttccgcactcggatattgctttctgtcaaaagtgaaaagagtatccgcatacttctgtccggtctgataccccgtaacggtaatcgcgttacgtgtcggatgcgcacgttgctgaagcaatatatataaaggctcgtatccctctttcgtcacataaagagtaatgcgttccaaatcctgtgccttgtctttggccgtcaacaccacttcccaaatggctttgccacgaaaagttttcattgttcccagcttataagagaatcccttctgatacatataaagaaatgtataaggattgatttgctgcaactcttcctgagtcgggttgctaacattcacttcatcattcttcgctacataactccactgcgttttcccatcaaaccaggttacaatatcggttgttttcaatacgaatttctctcctttcaattggatcgttccatgctcgacaccttctatcagaccatccgttataacctttaccgtaaaatcagccttcactcctcctgctttccgaaaagcctcagcagttttatccagaatactcttagcctgcgactgctgttgttgagcaatcacaggcaatgacagtaaagctattaaaacactaaaaatgtactttttcatttgatttataaacgaactgttactgcaaattgttcaaacgcatttcaaggtcattatcatcaatacacaagacgtcacgcgccttgctgccttgcgtagggcccacgatacctgctttctccaactgatccataatacggcctgcacgattgtatccgatagcaaatttacgttggattaacgaagtagaaccttgctgatgaataacgactaatcgggcggcatcttcaaacaaaggatcaagacgccccatatcaatatcccctacctcattaccaccatcctcactcacatattcaggcaaaaagaacggagtaggataaccttgctgacgggcaatgaacttcgttatttcttccacttccggcgtgtcaataaaagcgcactgcacacgtaccggatcagctccctgtaagaaaagcatatctcccttaccaatcaaccggttcgcgcccggacggtcaaggatagtacgtgagtccatcatagcagatacacggaaagcgatacgtgccgggaaattggccttaatcgtacccgtaataatattcgtagtcggacgctgtgtagcgataatcatgtgaatgccgacagcacgtgccaactgtgcgattcgcgcaatcggaagttccacttccttacctgccgtcatgatcaaatcaccgaactcgtcaatcacaactacgatatacggcataaacttatgtcccttttccggattcaggcggcgattgataaacttttcgttatactctctgatattacgcacatgagccatcttcagaaggtcgtaacgagtatccatttccacacaaaccgaattcaaagtttgtaccactttagttacatccgtaataatcggttcacctccatccggaagtttagccagaaaatgattctcaattaccgagtagatactaaattccactttcttcggatcgaccagcacaaacttcagttcggcaggatgtttcttatataataaggaagtgataatcgcattcagccccacagacttaccctgaccggtcgcacctgccaccaacacgtgcggcattttacaaaggtcgaacataaagacttcattcgtaatagtcttacccaatacgataggcaaatcatatttagactcctgaaacttcttacttccgatcacactttgaccggaaacaattttcggattcttgttcggcacttcaataccgatagttcccttacccggtatcggagcaataatacgaataccatcggcagataggctcaatgcaatgtcatcttccaatccgcgaatcttggagatacgaactccctgttccggagtaatctcgtacagcgtcaccgtaggaccaaccgtcgctttaatggtgctaatctcaattccgaaactacgtaatgtattgataatacgatctttattcgcattctgttcgtccatatcaatcgtaggatcatcattctcaaaatgtttcatcaagtcgatcgtaggaaagcgatagttttccaaatccttagtcgggttgtaaggttccagttcagggccctggtattcctcttctgtaactgccggttccacttcaaatccgggttcttcttcatcttcggtatccttatgtatcgacgaaaccgaatcagaaacagtcggctcaaataccatcgttactccttcactctcatctgccggagaagaaggctcatccggttctgcgtgctctgtaggaaactcttcctcttcttcggactgaacatccaccacagccgccggaggaggagtctgcttataagtccgtttcaaattgaattctacttcctgaggttgagaagtagtaaattccggattatcttcgcctgccggaatcgtctcaacttcttctttctttttacgtttcaggaaactcaaagcaaaaagtttgcgcaaccagataatcgtgcgcgcactgatatatataaagaagcagatagctgttatcaacagaatcatccacacaccgggcacacctacctgagaaatcagccaacggctgacattgtatccgtgcattccccccagatagatgaaagaatcctgataatgctccataaaagcaaatccaaagaaaacggagaaccagaccaacaacaaggtacatccgataaaccatttccacagtcgtacgacacgtacacgcatcaacttcaatcctgccacagccaaaaagacaaggataaagaaagaagaaattccaaaacagtcgttgatcagataactggccaactgtgctccgcgtgaaccagcatagttcttcacatgattatcaacgaccgacaaatctgccggatttccactgtcgataatactctggtcggccgctcccgtaaaaaagaaagaggaaaaagccaaaagtaaataaacagaaaagataaccaacatcagtccaatcacaaaatggacagtctcattcttgaatattgcaataattttgctaggggaagagggagtacgttccgtctccttatctaatttcttctttgccatgagtctttttattctttttataaaaccgggatcataatctaagctgcaaaaataataaaaaaataacgagcgctacgctcattcaatcctttttcttacctttgcgtttcaaatcaatgctgattatggaaaaagaaagccaaacgatatttgataagaatgtaatagagttcgtaacggtagccgctgaattttgcgcattcctcgaacgtgccgaacgcatgaagcgtagcgatttcgttgacacatcccttaaaatacttcccctactctatctcaaagcatctatgctccccaaatgtgagactatcggagaggaagtgctcgaaacgtatgtaacggaggaaatctatgagattctacgtatcaaccttgcggaattgatgggtgacaaggatgactatctggatgtattcgtacaagatatggtttatagcgaccagccgatcaagaagtccatttcggaagatctggcggatatctatcaggatatcaaagactttatctttgttttccaattggggttgaacgaaacgatgaacgattcattggctatctgccaggaaaacttcggaatgttatggggacagaaattggtcaacacgttacgcgcattgcacgacgtaaagtacagccaacaggacgaagaggacaatgaagaaggattttacgaaccaagtgacgacggtaactgttgcgaagacgatgagtgccattgccacgataacgattgccactgtcacgaaaacggctgtcattgtcaccaatgatgaataaataaaaatgattgtaagaagaactataaataaagatgaagtaaaggagctcccaaaaacggtttttccgggacggatttatgtcatccaatcggaaacggaaacggaaaaagcagtggcttatctgcaatcccggtctgtgataggtattgacagcgaaacgcgcccttcctttacaaagggacaatcacataaagtggcactccttcagatttcgtcggaagaatgttgtttcctgtttcgcctcaacatgaccggactgacccgaccgttagtcgatttattagagaatccggacgtgataaaagtcggtctctcactaaaggatgactttatgatgttgcacaaacgtgctcctttcaaccagcaaaattgcatcgaattgcaggattacgtacgccagttcggcatccaggataaaagtctgcaaaagatttatgcaatcctgttcaaggagaagatttccaagtcacaacgcttgtctaattgggaagctgatgtgctgagcgacggccaaaagcaatatgccgctaccgacgcatgggcctgcctcaacatatacaacttattgcaggaactgaagcaaacgggcaattatgaaattgctcccgaagagaagaaagaagaacatttaattgaatcagataaataaaatatcatgcataaagtatacctcaaacccggcaaagaagagtctctcaaaagatttcacccctggattttctcaggtgctatctcccgttttgacggagagcctgaagaaggtgaagtagtagaagtatacacctcaaaaaaagaatttatagccgaaggacacttccaaatcggaagtatcgctgtacgtgtgctttcttttcaacaggaacctatcaatcacgatttctggaagcgtaagctggaaatagcatacgatatgcgccgcagtatcggtatcgccacgaatccggccaataatacctatcgtctggtacacggtgaaggagacaatcttcccggattggttatcgatgtctatgccaagactgccgttatgcaggcacattcggcaggaatgcacgtagaccgtatggttattgccgaagctttgtccgaagtgatgggagatcagattgaaaatatctattataaatcagaaacaacccttccttttaaagcagaccttttcccagagaacggttttctgaaaggaggaagcaacgataatatcgcacaagaatatggcttgaaattccatgtagactggctgaaaggtcagaagaccggtttttttgtagaccaacgtgagaaccgttctttattggaacggtacgccaaaggccgttcggtacttaatatgttctgttataccggtggcttctcgttctacgccatgcgtggaggtgccaaactcgttcattctgttgacagttccgctaaagcgatcgacctgacaaataagaatgtcgaattgaattttcccggcgatctccgtcatgaagcttttgccgaagacgctttcaagtatcttgaccgtatgggcgatcagtatgatttaatcattcttgatcctcctgctttcgccaaacataaagatgcgttacgaaatgcactgcaaggttatcggaaactgaatgccaaagctttcgagaaaatcaagccgggcggcattctgtttactttctcctgctcgcaagtagtcagcaaggataatttccgtacagccgtgtttacagccgcagctatgtcaggacgtagtgtacgcattttgcatcaactgacccaacctgccgaccatccggtaaacatttatcatcctgaaggagaatatctgaaagggctggtactctatgtagaataaccgaatccatgtaatctgtggtgaaacagcaagcaatagcagaaaaaagaaagcttcaaagttaattagagttaataaacagaagttttatagcaaaacattatgttgtataacataaaaccacttatctttgcactgtgtttttcatggtattagatttaaggttaacaaagattggctgtctgggatagatagcctttttttatgcccatatataaagaggaaagattagcattctgattatcaaataattaattaaaggtagtagaacggataaatagccgaaataaacaaaaatagcgggtaacctctattcttatgtaggctgttatgtaggcaaaaaattggtctacatgagtacacgtaaaacctaattaaaatgtattcaatcaacattaaaggaaaagtgacctcaaaagacaaaaaactggtgaaacaggaaatgatcttcttccaaacaggctacaacagagtttctaaagtgctaaatatcaccggtcccatcaaagactgggacaatgcgtcacaatcatttatttccaaatcaagcgatgctatcaaaaagaacaagatgttgcttgatctgaaattaaagtatcagaagattgcggaagaatgggaagaggaaggacgtaaatggagtccggccgaattggcacttagtcttgataaaaagaaagggaaggaaatgaaagaggaagaccgttctctgtccgtttcccagatgattgattatttgattaaaaaattctctgaaaagaaaaatgacaagattgcgaaaagcctggcgagtgtaaaggactataaaatcataaagaaggctttggaagaattcacacaatagaaatacaataaaccatcatccgtgttttatttcagtgacataacaaaacagttcctcttggattttgttctatatacacaaaaaaagggattgccaatggtaataaagcaggcttgaaccagaagttgcgtaaactgagagccatagccaactatgccaaagggctgaatatgcacggtgctgatccggaaatattcgactgtgtagaggataagatgaaatggcacaagtttgaaccgagaactgtttccaagagagtgatacagttaattgagaatgtggatagaagcttgcttacacctaaagaggaattttgcttggatttatttcttttcagttattacgcaggaggtatggtcaatgtggatgtctgccatttgacgtacaatatgattcaaggaaaccaggttatctatgaacggatgaaattcccgaaaattggaaaacccttgttgatagagaaatcaaaacaaattattgagaaacatgaaggtcaaggcattgacaactatgtattccccgtattcacaaaaaaacataccacggaggccaaaatgcgtaatagagtcattcaaatctctaatagagtcagcaagacgttgactaaagtttgcaatatcctggatataaaagagaatataacttggtattccgcacgagatacatttatctcccgtatggtagatgccggttgttctccagctgttacggcagaaaaatgagttcacgctgttcttttgggt

SEQ ID NO: 11846 - DNA, 30267 bp, Unknown
  gut microbiota DNA sequence
agaaagaggaacatttactgaatatccctaaacagaaacaacataataagaaaggcgtgtcggttatcaccaacacgcctttctttatttttcggctgtatatccagtcttagtttcttggtaaagcttctttcactaccattgaacgacctacatattctgcaccgttcaattgcttgatagcgttgttagcttctgtatcatccggcatttcgataaacgcaaagccttttgatcttctagtttcacggtctgtgattaactttactgaagcaactgttccatactcttccattacatttctcaggtctgattccttaacattatagctaagatttccaatgtacaaattcataaaaatacaaatataaaaaattaataattcaataagaaagttttgggaagagctaaattagagatggatatgctcaaataaatgagaagattcatgtaaaataatcaaatcgcaataaacctctttattgttgttgatgcaaagaaaagcattatttagggatatcgcactatgttagcccctttttcttctcataaaacatcttttttatgaaaataggccaatacttaacgttcaatatccctaaaaaagccttatacctttataatctcactatccgcaatgaaaatacttatgtaccaaatctaacatttcctgtggttttccttccaaatccgcacgtaatgtcttgtcgccataactgcgaagcttacggatgataccatcaatcattgccggactgaatacattatattgttcaaaaatgactctttgttgttgcaggcaatcggcagaagcctcacagctatccggcagttgcgctaatgatttcagcttatcttcattctctttctgatggatattcacatttacatacgttttttgggcaatctccaatgcgtttccgatttcaaacccatgacggcaggcaacggccaagcctgccaacagttgatatagatccgccgatccgtccggagaacgcatttctaccgtctgcttctggctagtgtcgaaatgactttcagcttctaacgggtttgccaatgtacacatatctgtttttgcagcccaccctagaggtacacgcactaatacagaacggttgcgatctccccaacaaacattggtaggtgcttcctgatgaggaacaagacggaaatacgaagttggattggtgtttccgaaagcagtgattgaaggagcaagcaccatcattcctgcaattgccttgcgtgccgtttccgacaaaacgccatctaccagcatttggttctttccgtccttcattatacgcatatggatatgtaaccccgaaccggcttttcctgccgtaattttaggagcgaatgttacattatatccatacttatatcctaaattgcggatcacccatttagctatcatcaattggtctgccgcctgtgatacgggaacaggcaagaattctatttcattttgttcataaatatagccatccaaagtaaagttacccacttcggaatgtccgtactttatttgcccgcctgtctgtgcgatataagacatacattgggtacggaactcattaaatttcgcataagggcctgattcatgataaccgcgctgatcggtcgcttgaaacatacccgtatccggtgctattacataatattcaagttcgcccatagcttgaaattccattccggtgacttccgtaaagatcttacttgctttgtacagggtatgttccggcgcactttcaagcggttctccatctttattaaagaaagaacaaagcatggacaaagtcggtatttctgcaaacggatcaacaaatgctgtgcaaaaacgaggaatcacgtaaaggtcactactgcccgcctctataaaagagaaaagactggaaccgtctacccgttctccacaagtgagaatagcttccagataagcttgattattaataacaaagttcagtgttttcaaacgaccgtctcccgccggatacataaaattgaccatgcggatatctttttctcgaataaatgaaacaatatcggctttagtaaattcagaagtcggcttctggaagaatgccaccaattggtttgcattcattgataattcttgattcataatcggttgtttttcgttgttatatgattaaaacggtttgctgaatgccaaagataaggaaaaattcactaaattcgtgccgaactaacgaaaaagtaactcatggaggtatttacaaacagctggaatagtcggaaatatcagattggctatgctctaagcggaggatttattaaaggatttgcccatttgggagtaatgcaggctcttttggagcatgatgtcaaaccggatattatctccggagtaagtgccggagcactcgcaggagtattctacgcggatggtaatgaacctcataaagttctcgattatttctccggacataaatttcaggacttaacaaaattggttattcccaagaaagggctattcgacctttgtgagtttattgattttctccgaacaaacttaaaggctaagaatctggaggatttacaaatccctttgattatcaccgcaaccgatctcgaccacggacgtatggttcatttccatcgtggcaccatagcggagcgggtagccgcttcctgctgcatgcctgtcatgttcgctcctgtcaacatagaaggtactaattatgtagatggcgggctgatgatgaatcttccggtttctactcttcgcaggatttgtgataaagtagtggctatcaatgtaagtcctatcatggcacaagattataaaatgaatattgtaagtatcgctatgcgttcattccattttatgttccgtgcaaatacttttcccgaaagagaaaaatgcgatttattgatcgagccttataatttatacggatacagcaatacggaactagaaaaagcagaagaaatctttgaacaaggatatagtactgccaacgaggtactcaaccaattattggaagaaaaagggaatatatggagataatccatatttttcctccaaataacaataaatataaaaatctactcgatatgaatgacgaaaagaaaataattatctatcaagtgttcacacgcctgtttggaaataataacaatcactgtgtttacaatggggatatcagtaccaacggttgtggaaaaatggcggatttcacactgaaagcactaggagaaataaaaaaactaggtagcacacatatatggtatacaggcattatcgaacatgccacacaaacagattatcgccgttacaacatcgcgcctgaccaccctgccgttgtgaaaggcaaggccggatcaccctatgctatcaaagattattacgatgttgaccccgacttggcaaatgatgtgccgggacgcatgaaagaatttgagaatctggtgaaccgtactcatcgtgcagggctaaaagtgattatagactttgtgcccaaccacgtagcccgtcaataccattcggatacacagcccgacggaacgacagagctgggagccaacgatgattcaagtttggctttcagtccgtacaacaatttttattatattcctcaggctgaacttcgcgctcagtttgacatgaaaaacggcgctgcagagccttaccatgaatttccggccaaagcaaccggaaataatcgttttgacgctactcctaatatcaatgactggtatgagacaattaaactgaattacggagtggattatcaaaacggtggtacctgtcatttctccccgactccggatacatggataaagatgctggatatacttcttttttgggcatcaaaaaacattgatggcttccgttgcgatatggcggaaatggtccccgtagagttttgggaatgggctattccacaagtgaaagaagcttatcccgaaattatttttatcgcagaagtctacaatccgaatgaataccgcaactatctgtttcgtggaaaatttgattatttgtatgataaagtaggattatatgatactttaagaaatgtagcctgcggatatgaatctgctaccgccattacacattgctggcaaagtctgaacgggattgagaaaagaatgcttaatttccttgagaatcatgacgaacaacgcatcgcttctgatttctttgccggtaatccgcgtaaaggcatcccggcactcattgtttccgcctgtatgaatacaaatcccatgatgatttactttgggcaggagtttggagaaatgggtatggataatgaaggattcagcggaagagacgggcgaaccaccatctttgactactggagtgtagagactatccgtcgttggcgcaacggaggtaagtttgatggaaaaatgctcaccgaagatcataaatacctatatgatatctatcagaaggtacttacactttgtaatgaagaaccggcaatcacgcaaggagtattctttgatttgatgtatgctaacattaacggatggcgtttcaatgagcataagcaatatactttcatgagaaaatataaaaatgaactgttgtttttcgttatcaatttcgatagtcaattagtagacgtcgcaatcaatattccttcacatgctttcgatttcttgcaaattcctcaaatggaaagttatcaagcggttgacctgatgacgggagctaaagaagagatctgtttgttaccatataaaccaacagagattgcagtgggagcttacaacggaaaaattctaaaaatcacgtattaggctatacactctcattttatgcacatcattcaaacaaatattcaaaaaggctgttttaagtagacaattaataatcctctaaactcaaagcttatgaaaaaatttaatatttggacagtcgcgttacttttgataatatccgtatccacttttgccaatactcctcccggtaatattcagtcaactttcaaaaagatgtatccaaaggctaatgatatagcttggtcacaagatgatggatattattgtgccaattttgtaatgaacgaattcactaaaaacgtatggtttaatgctcaagggcaatgggctatgacgcagactgacctcgtcagcctcgaccgtttatcgcctgccgtttataatgctttcgtatccggatcttacgcaagctgggtggtagataatgtaacgatggtcgaattcccaaaatggcaagccattatagtgattaaagtaggccaggataatgtcgacattaaatatcagttattctatactccacagggcgttttgttgaaaacacgcaacgtaagttatttacatgatattttcggtccaagtacattttttcttaactaaaaaagagtgcatatagaaaaaagcccctgcagatgtaatgatttgcaggggcttctattttgtgtgaaaagagttatttcttctttctaagcactacagcagtacgtgcaggtatatagagttttaaccactctttcttttcttttttgtacaacggatcagcattcgtaaaatgaacgatagaatcatcggtcaagccatttcctccaaacgagacattatccgtattcagtataacctcgtatgcgcccggagtcaccagaaaaccataatcggtgaacgactgtttcggattaaaattgaagacgaatatcaaatccttacgaccatatgccaatacctgatcaccatcattatgccagatttcctgaacaggtgttgcctggaagttttttacactcttgattactttcagcatttccgcatcaaagtctcccatataatgataagtaagatccttattatctaccaaattccattggcgacgggcatatttgcaagaccatccattaccttcgcgcgggaagtcaatccattccggatgaccgaactcattacccataaagtttaaatatcctccattgattgtagaggctgtcagtagacggatcattttgtgtaaggcaatacccctattgactacataattttcatcccctttctgcatatgccaatacatatcagcatcaatcaaacggaaaataattgtcttatctcccaccaatgcctggtcatgactctccgcatacgatatagttttctcatcctggcgacgattggtgacttcccagaacatactggaaggtttccagtcctcatcaatcttttctttaatcgtcttaatccagtaatccggaatattcatagccatgcgataatcaaatccgtaaccaccgtcctctactttcgcagccaatcccggcataccggaaacttcttctgcaattgtgatagctttcggattaacttgatgaatcaccttgttagccaacgtcagataacaaatcgcattatcatcttgatgtccgttgaaataatctccataattacagaacgcctctcccaaaccatgactataatataacatagacgttactccatcaaaacggaatccgtcaaatttatactcttccagccagaacttacagttagacaataggaaatgaatcacttcattcttaccataatcaaaacaaagagaatcccaagccggatgttcgcgacgcccacccggatagaaatactggttcggatcaccagcaaaattacctaaaccttccacctcattctttacagcatgagaatgaacgatatccataattacagcaattcccatctcatgtgccgcatcaatcaaggctttcaattcgtcaggagtaccaaaacgggaagaagcagcaaagaagctagatacatgataaccgaaactcccatagtatggatgttcttgaatagccataatctgaatgcaattgtatccttcctttgcgacacgcggaagtatcttttcacgaaattcattatagcttccaactttctcttcctgttgtgccatgccgatatggcattcgtaaatcaacaaaggattagtggtaggcttaaatgccttcttcctaaatttataggggttctccggagcccacacttgcgcactgaatatctttgtctgttcatcctgaaccacccgtgtagcccaagctggaatacgttcaccttgaccaccatcccaatatatattcagtttgtacaagtctccatgatgaatagcatctgccggaagattgatttcccaaattccattcttcagcttcttcaacttgtaagcagctttttcttcccaattattgaatgtacctaccatataaatatgtgtagcattcggcgcccattcacgaaaagtccatcctttggcagtacggtgcaatccgaagtaaagatatcccgatgcaaagtccgaaagagtttgctttcctttattggttaattcggcctccttgttcagcacatattgatgacgacctgtgattgcatcagcaaaaggctccagccatgggtcatttttgataagattaagtgtcttttccatatcagaattgaatttagattatgcttttacttttactattactttcttcacaccctccggagtaatgccgggggcatgtccgtcttgaggaaagaaaatagcaaacattcccggcttcacagtgatataagtttcagctaatccttcaaaaaaagtaatatctttttctgcattataaggcgcatctgccggaatacagtcttttgcagcagtatatcccatgatttccgttcctgacaatggaatctgaatatcaataaaatcacgatgtgtctccagcttggcttcttccttcgttttaggcttggtttgtgctatatttaccaacaaatcttttcctttcaactccgtcttacctatttccatagtctgaaaatcatgagattttaaaaactcaatagcttgtgcaaacaacggattcaaagacgcatatttctccagattttctaaagtatctactaccatatcaagttcaattttaaagtttatattttagggattattcaaaatcatcaatagtgtaattaataaaatcggcaaaccgtttaaattgccggaatgccttgtctatttgctccaacacatcagattgagtaaaaaaactatcagagacattataagaacagatgtattctttgcacttcaaatagtcaatatgtttgaaatctttcggaaagcctttaggagcggttttcaagaaatcctcccctatcaccggaaaatatttcttaaattccggatcttctgcaatagcaacaaattcttcaatattatcataaatagattgccgaacagcttttaagacatttgaaggtagacagagacttcctccggcaagcatagaaccattcggttgcaaatgcacataatatccgcaatgatttgatttcttgcctttcgcattaatatatcctccaaaatgtattttatagggtgttttatctgcagaaaagcgggtatcccggtaaatacgataagtacagtctttgggctgaattccccgaatcgtttcgtcaaacagagatatacgggcaatcactattgccagaaagttatcaaactcagcacgagccaattcatattccgccttatgctcattaaaccactcgcgattattattcgcggaaagatcttttaaaaactgaaagataacaggtatgttcatctttatcattttctattattatcctacaaacgtacaaattttatttcatataaactacaaaaggacacaaaaggagataaaaaaagcatcggcttaataaaccgatgctctaacacatttatcaaaaaaacagactcttctgtctctgatgtactttagctttcacaagtggagtacaatctctttaattaatcttatatctaatactatgaaaaacacataaatataacagtacaaatgagatttttgttcagtacagtcctgcatatttcagttaattatagttataaaaccggtagagaaagataactataaaaaagggctacccagacaatgtctatcggtaacccttcctagttctttatatgatagtctaatttacttcatagcagctttcacttgaggaagcattttcttaacgtttgcattctccggagatattttagcagcttcttccagataatctaccgcttctttgaatctggcatcagctttctctttttccgcagcatatttatccgcatcagagtttgccaaaggagcagctttctttaaaatattagctccatcattgtaacacaaaacacccaaactatacaacgcattcgttttgtatgtcttatgattcaaaggaattacttttttaaagttttcttctgcttcttctgtcttacctgctttctgagcggcaagccctgctttcaaaaagtgaagaccataatttttcaccattaccttattgttaggagccaccttcaagccttcttctaatgtagccacatattcgtcagttttcttcaacgcatccaaagccgcagccttacgagcatatgcattccctatattgaacttcttttgaattgctatatcaaaataagtaacagcttcggcatatttctttatctcatcggcagccataccacaataataagctgttgcagaatcttgattattagtttgcttcaagtattcactaaacttagcatacgctacgggataatttttagcattgaatgcgtcatttccttcttttttaatttggttagggtcggtctgtgcaaaaatgttagtaacagtaatacaaaatgcaaataaaaaaataaatttcttcataactttatgtgttttttagttgtttatcgttcaaaagtaaaccttataatagaaaaacacaaccctatttaagttttttgagttttttgaaacctatataacgttcgttattcttcgtaaaaagggcattcctctatttaattatcctaccatatatagaagacacccaatatttgtattctataaatagctgattcataatcaaaaagaaaaacacaaataaaaaaacagccaaaaatttttgatattccacaaaaagcactacctttgcatccgcaaataaggatggttccgtagctcagctggatagagcaacgcccttctaaggcgtgggtcctgcgttcgaatcgcagcggaatcacagttaacatccggtaacagttaaatgttatcggatttttcttttaaatagctgatattaaacatcttacagtccgaccggtatctccaacaaataccagacaacaaacaataatgtccaggcaaacaagatagccagtgaatatctccaagtatatttaagcaaagctccatacgtaattcgcttgtcatattgccgcatataagtcaataccaaaggcatataaaacaagaaaggagtgattgcattggtcgagctatcccctatgcgaaaagcacattgtacaatgtccggagtaatccccatttgcgcaaacatcggaataaatatgaaagacataaaagtccatttagaagtagcagataccataataagattgacagttgctgtaaacaggataaacaataccaaagcagccaatggagcaggttcaaaagaagaaagcaattccgctcccatgatggcaaggcacttatccagatgtgaatactcgaaacatgcaaacatctgtgctgcaaaaaaagcaattacaaaatagacaccaagaagtttcatgggttgcgttaacccttctatgacgtcattatccgtacgataacgaccggagctgaagccgtacgccattcctgtgataccggcccccaatgagagaagaaacaaaatacctgcaataaaaggtgaatgcattaaaccaccgtttaccccacgtagaatcccgtaagaagaaaaagtaagccacaaaataagagccacataaatagctgccacaacaatggagatcataatagcacgccgttctttgcgggacagaggccggtaagcttctacctttatccctccttcataattccctaacttaggaataagccatttctcagtcacccaataaacaatagcagtaataaccaccgtagaagcactcataaagaaataattgcaaagaggttcggtgttcccttgatatccagtctgcgccaaagcagcctcttgtgtagtatgagctaataacgggtccatcgtacttaatacaatattggcactatatccacacgcaacggaaacataagccgttacaattccggcaatcggatggagacctacccattggaacaacatagccgcaataggcaacaaaattatatacccaccgtcaccaatggcattcgataataaccccagaacaattacccaaagaataattctctttttctctttcctgttccccacccccaaacggatacacgcattaataaacccggaatgttgggcaaccccaagtccgaacatcgcgatgattaccatccccaaaggagcaaatcctgtaaaattcttaattgcgttgcgcaaccaccagcgaataccttccggactcaacaaactttgcacacgaatgtcttcaccggtttgcggcaatatcacctttaacccatagatatcgcatatccatgaaagaaaaaccactgccatcgtcaacagcataaacatcgtagcaggatggggcatacgccattttgtcttcatcgcttttcaggatttattcttcgtcagctttccttagttattcatcatcaggctccagattatccagatcaataatgcgcaattccaatgcacgcacagccaatcgggtagcattcacccccacccgctctccattcgggaaaagacgtccgataaggtcattctgccgtttttccaatgatttcacgccgaagggcatacctttcagatttgcaatcatctccttcgtatatcctaatgccaaatgacggagaaaacgctcgtcatattcatcaatatcataactgataaccgcctcctgacgttttgcatcattagcgacagacttcttaaaacggtctacaatcttttctagaatcggataattgaacactagcttctttccatccattacagcctgtacatccgttttagtaagcagctctcctgtcttgagaataattccatcggcaccggcattcaacacatccacccataatttctcattcaagatctcaccggtgaagatcagcacacgaacccccttataacgtttgaatatattccgacaaatatctactccgatagtggtagagccccccagccccagatccagcaaaaccaaatcaggaagttgggcttccatcaagggccagaattcattctctgtcatggcggtaccgatcacttccgcattcggtatttcgtgacggaatatctcctccgtgcctttcaactccaattttacatcctctacaataattactctaaatttctgttcttccatttccttatatctaaacttttatgtgttttccttattttatctacgcggtacagtaaaataaaccgtaaatcctccatctgcagcaggttcggcattaatacgacatcccctgcgtcctgcaaattcatcatgatcgcggataatctgtttacataccaaatattccgtaccacgcaactcccctttttcaccggcagtcatacgtgccagattcggataaaacaacaggttcagttcctccagactcttctcgcgtcttgtatccgtaaaaagaaagcgaatatattcatcatcctgccgtgcctgcaaacgcaacagaccgtcttcgtgaaccgccaacgcttcgtcaatcaggttttccaataggaagcgcaactgattcagatctcctatcacttttgcgtccaccgttcctatctccagttctatcctctccgtccggttcttcattgactttctgaagtattttccagcagtatccaaaagttcctgtacaggaatcaccacccgccggaaagtagcctcttccaactgacgggaagcgcacgaacttagaatcgtaaagattcctttataatattcaatcaattcggtcattgtctccacagcctcacgttcttccttctctgaaatattctgcatattgagcctaccgacaatttgtttgatcttattcggataataaattgtttcatgtttaatcgtagacaggcaattatccaataccatattttgtacatgcaacatactgtcttcccaaagagcacgtcgtgcctcttcatgcgccgactcaatatcccgatatttcgtagccaatttcaccaccgcattaaatatcacaatcgccacatagcgtgccaccaattcaaacaacaaacgatctgtttcctgctccgacccttccctgcgttccagataaagcacacccacacactggtgttctcctcccgcttccaccttcaatggaatagccagataatgccgtcgttcaagatattcaccggaatcaaaacattgctgtaccatctccggcatctcctgaccgggacatgaagcgtattccagcctatgcgtcgtttcattatacgctgcaatacccatccggtcaatcgtaagcaattcatttacagacccgaatgcttcatccactatgcgttgcgggatttcctttagcgtactctcctctcgttggagtgcttctgcatcctcttgctcctgtggtctgaccaaagaggctgcaaacactttttgatttatctcgagcacctgttcaagattcagtcggttctgcagccgcttgcgcatatacagaaaatagtacccgaccaacaaaaccaccaacaggacaaaacataaaatgatccccaccgtcttgttcgtattcgaacgttccaactgcttgcaatatgcctccaacgtctgatcttctccttgcaacttatacaaatccgtaaatgccgaattattataactgtacgcatccagttgtttcatagccagaaaagcgactgccgcttcgttccttatgtccagaatcacatgataatccgagtcaaacaactcattccaccaactaatctcggcaggtatcccctcaccaaccaatttcatataacgatgcggatgttccgcccgtgcatatttctcataatgctcgttcaataacatcatagccgaatcgatatactgcaaagctagttcatattcttcatccacattagcaaaatatgcagcatttgcatagtccgacgcagcatccagcaaatcctcatataccgaatccgtaaccacaactatcgaatctccttcctgcaacatgggggaaatagaatcatgcacacacgacaccatccctaccggaagcaacaggcaaagcaatacaccgactatcttacgtatccctaaaggcaaacgaaaatagaaacgactccccttacccaattcactttccacattgaaagcacacacacggaacaaatcattcgtcttcttatatttctcaatgattcccttacagttcattaatccgaagccactccccttgttttctttcagttcctccagatcctccgcattcttcatcccgattacgcgcgaatcatacaccttctcaccaatgatacgctccacatcctccgttgaaatacctcgtccgttatcttctacggaaatctccacataagtatccgtcatacgtgcgtataccttgatgttcccaccttccggagtatatttacgcgcattctccgccagcgtattaatcataaacagagtcaatgcacggtcggccttcaccgtgacaacggtcggttcaatctccaaagtctgttttttcatctcaaaggcacgccgtcctttccctaccagttcaaataactcattgaggctgaatatctcaatattcaagctgagcgttccttgcttcattttaatccagagagccagaatatcattatattcattgatcgtagtaaccaattcgtcgatatactgatatttctctttcttgatcttttcatcatcgatatatccccgttccgtcaacttatgtacctcattcagaatacggtcaatatacggattgataccatttacgatagccatacaggctttttttatcaagttctggcgtttatttccggcaatatgctgctcatagatataccgctgtttttccaattgcatccgctcgtcactcaatgcttccaccatctgctcattgtcagccgcccaaataatataaggctccaatacgtggaccaaagccttctcgtcgcggctcagccgatatccagagcacaacgtcgccttaccttcctccgatatttccaatttcatacgtccctttccaaacaactgatctatcccctgctgaatcaaagggacattcattgggatggatgaagtaatatcccggcagagtcctaaaatctgctgcaaacgttccacatccaaccggtttcttattttagaacgcttattaaagaaccaccagaaaatcaccaccaataccaatccggcaatcaccagagaaaggacaagcgtcatctggcgcgaaccggcttccaatgacacataacgactttccagttccttgtcctggcgggtaaaattcaaaatatccagataaatattccgattataatcagaagcatatttcattccgagccctgcatacgatacactcaattgttcccgaatccttgaaatccattcaggaacggtcttcacattttcctgcgcaatccaaggcactcccgtataggtagtatcgccttctgcaaacgtatgcagcttatccagtgtatccgcttcatgatgataataaagtatatgatggcgattcacacaatccaatgctttcgtaagtgtatccagcgcttccgaatatcgtccgtgcgcattcagatattttccgatagaaacatacgctccggcaatctgatacaagtcgttatattggcggaatctctcaagcgcgagttgtgccatgcgcaaaggtaaaagagaatctaccggcaaagcaaactgctccagcatatgtcctctccttgtctggaaaaactcgaaactatcggaagaagccatcaagttggcaagaccttgcaaaccatttccttcgaaataaggatgattgctctgaacagccgcccgccaagtataatacaaatgatcaaactcacgtagttttctctcctccggtgtctttgcttcaaccaaagaagcggcccccttaagataatgatagtaaagcaattgattagtatccgccaatgcttcctcttccggaatatgactgagcgacgcaatcgcttcctgtcgttgctgaaggtaatagtaataaatggcggaaacaataaagaactccgtaaaagcatagtccagccgaagcttttcgtgcctgtcggcaaacaaatcactttcctcacgaatacgtttcatacgtctcaacgcactgttcctgtaatcataaaattctttattcattgccgtcctctgacagattttcatcagtccgatatcggcaatcaaaagctcaagttcgtttttagtcagtttatagacctctttatgagacgcttcggcacggtcaaaatccatattcataaaagcccagaatcccagattatttaaagcttccgctttccccgacttataaaagttcaccttactataagcctgttcggcatatttataagaagaatccagatttcggtaacgataagcatacgctgttccattaagcgaatcaatcaaacgcacctctttagtcggcaccatatcagtgcacgagaagaacaaagaaagaattatcagaatagataacggataataaataatcgataatgagctatgctgtgcctcattacctattcttcggacattattatttaaagaaatccttttcataatccatcgtcaactatccattaattacgcaaatctacaaatatttccgataagttggagagaaaatgattttttatacaataagtccttctaaataataagagaaattcctacctttgcaggcaaattaacaaataggtaaaacatctattacaaaatgagcgaaaaagcaccctttatggtattctcgggaacaaactcgagatatcttgcagaaaaaatctgcgcaagcctgaattgtcctctgggaaatatgaacattacccattttgccgatggcgaatttgctgtttcatatgaggaatcaattcgtggcgcccatgtattcttggttcaatccacattcccaaactcagacaacttaatggaacttctcctgatggttgacgcggcaaaacgtgcatcagcaaagagcattgtagccgtaattccctatttcggatgggctcgtcaggatagaaaagacaaacctcgtgtatctatcggagctaaactagtagccgacctgctttccgttgcaggtatcgaccgactgattactatggacctgcacgcagaccagattcagggattcttcgatattccggtagaccacttgtatgcgtcagccgtattcctcccctacatccagtcattgaaattggaggatctggtgattgctacaccggacgtaggaggttcaaaacgtgccagcactttctccaaatatctcggtgtaccgttggtactctgcaacaagtcgcgtgagaaagccaatgaagttgcttccatgcagattatcggtgatgtgaaagataaaaatgtagtattgatcgacgatatcgtagacacagccggaacaatcaccaaagctgccaacattatgctggaagccggcgcaaagtctgtacgtgctattgccagccactgcgtaatgtccgatcccgcttcattccgtgtacaggaatccggtctgacagaaatggtatttaccgacagcattccttacgctaagaagtgtgcgaaagtaaaacagttaagtatcgccgatatgtttgctgagacaatcaaacgagttatgaacaacgagtcaatcagctcacagtatatcatctagtcgaaacttcattttcaactaaataaaaaataatcgcaggtaaagtaaagaactaaacctgcgattatttttatttgataacgctgccttcattgcgcagccaactttcaacttccaactctcaattctcaactttattgaagtcttccgaatttgtatgttccctttctgattatcttcccgtctttatccgtttccacaaaaggaccattcttctttccttgtttgaagaaaccatcgaaacggttaccgtctttatcaatctgaaccccttggccttcttccaatccatcaacgaagccacctttatattgcatacccgcaacagtctttaaagtcccctcaccattcggacggttatctttccaatccccctcgtacacatcaccattactccatttatagatacccttaccctcacgtctgttatttttccagtcaccttcgtacacagcaccattcgaccaggtaaaagttcctttcccatcttgcataccatccttgaagttacctacatacttatcaccgttagcatgatagtaaattccctcacccgtacgttcacccaagagataagaaccctcgtaacgatctcccgtatggaaaaaataagtaccctttccatgctggatatcatctgcccagtcaccctcatatttatctccgttagtatattcaaatactccttttccatgacggacatcatctttccagtctccttcatatttacatccgtcatcccagttcatagtacccttaccgtttttcttgtcattcttccaatgaccggtatatttagcgccattcgcccaagtatacgtaccttcaccctcacgcttatcattcacccaaccacctacgtacaagtcaccgttgtgataatacattgtccctttgccatgctggtagtcctgataccacataccgtcataacggttgttattcataaaataataaataccttttccgtgctgttggtcctgataccattgtccttcgtacttttctccgtcaggaaacatatagatgccatacccttcacgtttccccttcacatattcaccctcgtagacatccccatttttaaagaccgtctttcctttcccgtttggtttgcgtcctttcatttctcctgtatagacactgccatccttaaaagtatagttgccaatctttatttctgtagagaatgtatcctttatctttccgaagaatccgccctttttcccttcattttcttgtgccattaccccctcttgtgccaggagagccaataaaagtgtagtatatagatatttcttcatttattttagttgttactcatttttagaattacgatttggacaaagatacgacttctctcccaaaaagccccttaccggaaagcaaattatgacaactttttacctgcaatgacctcttttaatgtctctttgcataaataacgctgcgctaaatcctgtatttccgcaggagtaatctcgtttacggcttgcaaagaacgtgcgaagtaatcatccttcaaaccggaagtagctataaatatccacgcatccgagagagagaaaggcgattcataactgcggcacatttctcccaacatatagttgcgcactatcctcaactcttctgcagatacaggatccaggtgcaaccggtctatttcgtgatatacttcctgtattaacggctccacatattcattatccgtctccgtcgaaacaatcagcaagccgctatccggataaaatactactcctgccgatatgccataagtataccctttatcttcgcgaatgttggacatcagacggctaccgaaataacctccgaacaatgtcatcagcacacgcagcttcggatagtcgggatgttcgcgagtaatagtggtacatcccattttcactgcgctctgcatagcgtcttcacgttccgtaaaaatcctcttctcaggtatagccgcaaacgggaaactcgacttcggcatctgtaattgatattgcccgaacggaatcccgaaaatatccgttacacggctaatgatatcatccgtcaccttgccggataagaaaatggagcaattgccggaatggtaatgccgctcataaaactcacgaagcacttctggagttatggtatgataatcctcctccatcactattttcccgcacggatgttgttcaccgtaaagagacttcagcaaactacgatgtgcaagaaaatcaaccttagaggtattgaccaaatattgctggatattggtatccagaatagtttgaagctccttttgtggaaacagtggttccttaatcatcgactctaccacttccaacgttttcgctaaatacttattcaatgaataaacagtgatataagcatactccgaagaactggagagttctagccacgaaccataataatccaatttctccgcaatggtggcagccgtatatttcgtcgtaccttcgcgcaacatacggttcgtaaacaaagcttgcaacttctgcgactgctgccagcgacctccggagaaaagcacatccatacgcaccacttcctgttcaccggcattaataacagtcagaggaataccattcggcaacgttgtcctgacgggagtctgtatatggaaatttttcagaggttgtatctcaggctgtatcgtgcgatccataaacattataatctatttttcaaaaattcttctgcacgcgccaagtcctgtggagtatcaattccaatcgtttccacttcactgatccccacttttattttatacccgttttccagccagcgcagttgctccaacgattccgctatctcaagtgatgattgcggtagtgcggttatctccctcagcacttccgtacggtaagcatacaaaccgatatgtttatagtaggtatgtcctttcagccaatccttcttctcggcattacgctgataagggatgatagaacgactgaaatacagggcattccaatttgcattgactaccactttgggagagttcacattctcaagtacggcaaacggctcatcagcagtaaaaggctttaccaatgtagcaatctgtgtagtaggatcttcaaaacaagctttcacggcattcaactgcgaaggctgtataaaaggctcgtccccttgtatattgactaccacatcaaagtcccctccaatcttgacgcaagcctcataacaacggtccgtaccgcttttatgatgaacagaagtcatcaccaccttaccgccgaaagctttcaccgccttctcaattcgttcgtcatcagtagccacatacgcatcatccaaaatgccggctacttgttcatacacacgctgtatcactgtttttccgcccaaaatagccaacggtttcgcagggaaacgggtagaggcataacgggcaggtataattcccagaaatttcatttatttaatagataatgaagaataaagagcggataatgactgctgcacatattccctctcccaatcttccggttttattattttatcatcatacaaaagtatatcaatatccaaacagactttctcttccttcttatcctccggcagacgaccggaagccagttctatgtctttcagtatcctcttcacgagttcctcatccttatccgaaaagaacataatcacttgattggaaaacaaagccggatttttgaagaacaaaggttccgtctccaactcaggtgcccggtagataggagaaaactgttccgccagtttctgcctggcaaaagtcagattctccgttctattgtagttgctccctatgcaaacaatgtatttgtgcatctttttagttgaaaagatcatccagtcccatttcctccacctcgccatccggagtctccgaaccggcacaaggatcgaatccttccggaagtttaaaagtttcctgctgatcgtatcccaaagtcgggtcatcaaatactttcttcatatattttgcccaaataggtaaagcagcggcagctccctgtccgtatgtcatcgatccgaagtggatatcacgttcgtcacctccaacccaacagccggacaccaacgaaggggtaaagcccataaaccaactatccgagttctcatttgtcgtccccgtctttccgcccatatccgcagtaattccataacgtcggacacgtccgcccgttccttcatttataacggcacgcaacatgaccagcattttatatacacttgaagtgctgatcacctcatccatttgtggcgcaaacgtagaaatcacattaccttcactgtcctcgatccgagtcacaaacaaaggagccacccgaatccccctattagcaaaagcagtatatgcactcaccatctctccgacagaaatctcacaaggtcccagacaaagtgaaacaaccgggtcgatggccttgttgcgcactccgaaactatggatcagccgcaccaattcatacggattcagtttgctcatcagataagccgaaatccagttatccgaattagccagtccccattttagagtaaccatctcaccataacgcttcttattggaattacgtggcgaccatggttccccagtttctgtaatcaacgtttgctctacgtggcgcacctggtcgcaaggagaaaaattattctccatagccagtgtatacaagtacggtttgatagtagaccctacctgacggcgtcctaccatcgccatgtcatattggaaatatgtataattaggtccgccaacataagctttcacatgcccgttcataggatccatcgacataaagccggtacgaaggaatgacttataatagcggattgaatccatcggagtcataatcgtgtccttgcttcccatccacgaaaagactgtcatttcctgcggtgtatcgaatgctttccgaatctcctgttcagaattccccgcctctttcatcagccggtaacgctcagtctgtttcatagccttcgtcaacagttcttccacccgtttcgcaggcagcactcttgcgtatggcgcattcttacttcctactttttctttgaaaaacaaaggttgcaaataactcaaatgttcttctaccgcctcctccgcatattgttgcatccgcgagttgagagtcgtataaatcttcagtccgtccgtgtagacattataattcgaaccatccttctttttattcttcgcacaccagccatacagaggattcgtttcccaagaaagggagtcttcatagaatttctgcatttgccaaccacgataattactcttcaccggcttggttgctgtcatcacaccacgcaggtattcacggaaataagtagccaaaccttccttgtggtcaacacggttatacgacaatttcaaaggaagcgcttgcagagaatcacattcggattcagtaatatatcccgctttacgcatctgtccaagcaccacattacgacggccgcgagaacgctcattaaaacgaacaggattatagagtgacggatttttacacataccaaccaaggtagccgcttcctctattttcaagtccttcggttcacggttaaaataagtatgcgcagccgtcttaataccgacagcattattcaggaaatcaaacttattgaggtacatactcagaatttcctctttggtgtaataacgctcgagttttacggcaatcacccactcaatcggtttctggaaaagacgctggagagtatttctcgccacattctccgtaaacaactgcttggcaagctgctgtgataaagtacttcccccacccgcatttttctggaataacaaaccacgtttcacaaatgcacggaacaacgccttagcgtcaatccccgagtgttcggcaaaacgaacatcttctgtcgcaatcaacgcattaataatgttgggtgacaagtccttgtaggctgtatacacacgattttccttactataagaccaagtaccgagcactttctcatcctcagaaaagatctccgtcgcaaatttataacttggattctccagttcctccactggaggcatatagccgatccaacctttcgaaatagaaacaaaaataatgacggcagccactactgcgattgccaataaaatccaaagagcttttattatttttcgaatcatgttttttcttgcttataaaaaatgcacttaattaagttacaaaggtagataaaatccagtagccgaccaaacaaaaacaggcgggatttttattcccgcctgtcattcaccctaactctatctattcagagttaccaattatgaatgagtcgtatagtaactcaccatttatcaatagtctgtaatttccattctcctatcgtacagcgttcactatcaaagttgatcgccactttcactaccggaagcccacacaaagcgaagcgttcaggataattcttcagattgatctgttccatagcttcaccggcagtcttgtcaagcttcaattccatcacatagagcgttgttttcgtacgaagcaccacatccactcgaccacggggggtacggacttcaacatccacaaaagaacccaataagctgaaaataatgtagaacatctgctgatagtgaccttcatacctcgtattgtcacaataaggaatggtaaacaagaaagtctgcagccgacgcaacgcagaatccatatcatcattacggatatcacgggaaagataagctaccatggtattcgttttttcagtaggtgtagacacataataaggcaacagactcctcatcaagccgaccctaacttctttattaggaatatccaatgtgtacagtcccaactcgctatcgtaacccttgatggtgatataaccgctctgatataacagcggagtaatactggacattgtctccgtcggtgcatcaaaatcctccacagctgctgtttttcctccgacttcagaaggttcaacaccgaacttttccaacatctttatcaagtatgtaggagtaccgctaccgaaccagtaagaaccaaatttaccatccgcaaaagcattcaacagactgaacggattatagatgtcgggagacggataagtgaaatgataaccgtcataattccccttcaacttcagcaagacctcttcaggggaaatattcaatttcgcagccaatctctccatatcctctttcatttgcgttagcatctcatcctccgttattccgcaaattgcagcgtatggctcatccatgctgatattcttgatattattcaattcactaaagatactcaactgagagaacttggtgataccagtcagaaacacatacttcagataaggatcacaagctttcaaaggactatagaagttacgcatgatattacgtaatacgcctagattttccttttcgtgtaccacatcaagcaaaggagcatcatattcatctataagaactacaacctttttccctgtcttttcataagcacacttgataagacgggttaatcgcagattagcatcaccggcagttgtatcgagaccgaaggtccgctcatagtctgaaagcataaagtcaagcaaacgctccaaacgctcctgatccacatgcttcgccatactcatatcaaaatgaagaaccggatattctatccactctttctccaacctctccatagccaacccttgaaacaggtccttacgaccagagaaataactatgcaaagtagaagtaagcaaagatttaccaaaacggcgaggacgactcagaaacacatatttcgcaaaataagtcatgcgataaacgtattccgtcttatcgatataaagataattcttctcacgaatttcagaaaaagtctgtatccctatggggtataatctttgcaaagcttccatatcaatcatatttttcacaaagctacaaaaaatatccgttcaaaaagaaagcaggcagaaaactttttcccgcctgctccttttactttatatgaacagctccacaggtacaaaaggtacagtaaatacaccccgcatttttccacacacgtacgcacgtacctaactaatgcgcgcacgtgtgcgtgtgtatagagagcccccaaaaagtgtacctgctgtacccgccataaccaccgcacctgataaactcatcatacccgccacacccatcgtcaaacaaacacagtgctatataagtcctaaagcagtgctttacgacctctaaagctatgctttagccttcgtaaagcactgttctaacaaatatatcaactatcttcacagacagttgatatatctcacatacaaatcatattagcttcatgctaatatgagggtataagtcaggaacataccactgtactcttcccgaccttttgtcaacgtcaaaccttgacgtatagttctgttatccgtactctttccccatacctgatattaaattcgatttatatagggagctttgcgacttattcatattgccaaatgtcatccatagtaattggcacataggctccatctttcatttctataatgacagagggctcatgcacaataagagtatgccacattccggcaggtacttgtacgccataaataccacttgcaggattcaattcatgccgagcacattcaacacctttttcatcataaaaaagttccgttatatgacctctaagcagaatgacagtctcaattgttttagtatgacgatgaataggaacatgcgttcccggtaacaaggcattgagcatacgctgcgaagtgtcaccttcaccattacgcaaatcaagattaatacgcctccgctcatttgttcccgcctgagctaacagttcatcaagcagtttatcatttatttccataattatttatcattaacttttgcacgtagatattcttcgtgtaggtgataatattttctcttgaacaagacatagacgatacaaagtaataccaacactacaactaaatacaaatacttattcattggcaaataaatagcccccaaagagattattaattgcataaccatatagacggtcgacactaccacatgcttaatatgcaattcattggccatcaattgataaacatgtttacgatgaggtttgcctatattttcatgcaataatatccgatggagaatagtgagtacactatcaacgccatataccattagcagcagaatagcccaatagtttccgctttttaatatataagaacctaaaaagtaaagcaaaataaacgcaatggatacactgcccacatcacctgcaaaacattttgccttagtgcggaagttaaagaagcagaatatcaacacgctaagcaaagccacaataatgaaattccggtcgacaaactcctcccgcgaattgagaataagcaacggaacaagcacagccaacgagtaaccgccggtaataccatttattccatccataaagttatacgcattgataatgccggtgcatactatgagcgcaatgataaccacccaccaatactcgggcagcaaaataccccactggtagaacatgagtgtcatggcgacaaagtgcacaatcaagcgaaatttattggataccgaatgaatatcatccgcaaaactgataccacccaacatagtgagtcctaacaggaaccaaggacatgtaaaaccatagaaggcagcataaagccaggctccaaacaagaaaataatacctccgccacgcaacacaatagtactgtgcgatgaacgcaagttgggtttgtctataatgttaaacttgtcggcaatcttaaaatagacccattcaagaacaagcaataatactgctattaacagatatacaaccatacttattttgtatttgtaaatgatttaatggtttgtgtaagtccttcttcggcacgtatgggcattttatctatacccagtgccttttttattttagcattgctaaccacatagtcttcagttagctttgtcaaacgctccgagtttagtggcaggtgcaacccatctcccaccttcgccataccattcatcagccctttgggcagataccaaatacgtgctttcttacccaaagccttgcagataactgtaataagtccgttggtcgataacgcttcatcgtcacacatattataaatgccagattccacttccttaacaagcagcccttttatgacaaaacaaaggttgtcaatagaggtaaagcagcggtgattttcaaaagcccccaaaggccagggtactccttttttcaccactccatagagcagattgagattccccttgtttccgggaccatgtatcatacagggacgcaggatatacacttgcttatctgcggccggatgagataggatatattcttcagctttgatcttcgattcaccataaggtcctactggattgggaacaacatcttcagtcagaatatcaccagggacaaagtcagcagccgctttcaccgatgaaaagaaaatgaacttcccggccgatgatttaagaaaccagtcatacatcttttgagtgagccccgtatttaccttaaaatacacttccggcccaaaagttttcttcaaatcatgtgccttgccggcaagatggataacggcatctacttgtggaatcttattttcgtcaagatcatcccaggaaaaggtcttgaccacaccctccttttcaggcgctacgatatcaaggccgtaaatttcattactttgccccaaagcttttaccaaattcccccctacaaagccgtgaattccggttataagtatcttcataatattttatttaccaaatcaacgtattgttttgttaccttttcttttgtgtaatagcgctgtatcacatcatatccgttacgccccattttctgaagctcttcacgcgacaccgatgccagccattgtgccatttcatctaccttcttatcaaagtccttctcagtaataagctttgcacaattataatccttagtgaagtttacgataggtgttttgtctccagaacatataagcaacggtctttcacaagccataatggtatacactttagacggaaatcccatcatttccatttcgggtgccataaagatgaactgcacgtcactgtatgccaatatactcggcatcagatggcgaggttgataatcgagtacatgcaacttgtccagtcccttctctgctttctgttgttccaagtatgatcgttgtacccccatacctatcacaaagtactcaacattcaaatcctttgttttgtcgaccaatgccaccagcggacgccagtcttgcgcatgtcctatattcccggcataaagcaatttcaaagaatcggttttaggaaagatattctcgtcaagaggttctacattagtcgggttatagaggtcagtatctacgaagttgggaatgatgtgtagcttattcggatcttcaaaacgactcacaatcgtattatagaaaacatcgtcaatggtagtgattgcagcagacttgttgtaaatgcaacgttcgactttctttaaacaagcgattatcggtcctgttttcttctttaggatatcgggataaatttcctgtacattatatataactttgcagccttttaatttaccgaggatgagattaagcattcctatgctgagaggtggcgagggcgacactattacactaacattgcgtatgcacaaaccaaggagaaacgaaatgatgtgccaataaacaaaaccaagaatacgcaatgcagtgctcttgaacttcttttgtggcacatgcattacctttataccatgaaaatcactttccttataaattccggggattttccactttagcggttgctttgccagttgttcctctactacattaaagtgcggtgttgtagaaagcactactacctcataaccttctttttgaaatctaagtgcgatatcgttataaagatatgcagtggaaacaccatctgggctgaagataagactgtgaattaagactttcttgctcatttatcaacgtttatattaaatcgttccttaaaatatgtccgcatctcttgcggtgtagggttctttcctatataatattccatctcctcaatcttggcatctataagatacctgtaccaatatgcctgcaatgtagcccaaataaaaccgggcttgccatcaagaaaaccaccaaagcagatgtagcgaacgaagaaatacatgaatgcacgcaagaatttgggcagtttataatacttccctttctccctgttacggctctccaatccattccctcccaatacaatgtcgttccaataaccttcataagcagccacaatctcacggttggcatagttgttgtgcttttgagtccattcagtgagtccattcaaattttcatcaataaa

SEQ ID NO: 11847 - DNA, 25114 bp, Unknown
  gut microbiota DNA sequence
agttgccttaaattttattattttaggaatatccctgtttatgcgataccgtgagcactcactgaactatcgattttcttaatcaatccttgaagtactgcacccggtccacattcagtgaaatccgtagcaccgtcagctatcatatttttaactgattgagtccagcgtacagaagcagtcagctgtgcaaccagattctttttgatttctgcaggatcagtgtggggaagtgcatctacattttggtataccggacatttaggagtgtgaacttccgtagctttaatggcagcttccaattctattttagcaggatccattaacggagaatgaaaggcaccacctactttcaatggaagagcgcgtttggctccggcagttttcatcagttcacaagccttttcgatgcccgaaatagacccggagataacgatttgtcccggacaattatagttggcaggtacacaaacttcgccttctgcatttacagatgcgcagatttcttctactttttcatccgacagtgcgatgatagcggccatagtggacggagtagcctcacaggctttttgcatagccattgcacgtgcataaaccaatttaagtccatcttcaaaagtcagagcaccggcagctaccaaagctgagaattcaccaagtgagtgaccagctgtcatttccggtttgaagtcatcgcccatgcaaagagcggatatgacagagtggaggaatacggcaggttgagtaacttttgtctggcggaggtcttcgtctgtgccgttgaacatgatatctgtaatgcgatatccgaggatatcatttgctttttcaaacaattcttttgctaaagctgagttttcatacaggtccttacccattcctacgaattgagcgccttgaccgggaaatacaaatgctttcatatttttattatttaattggtttttaattgcgggtgcaaagttacggaattttatgatacaaccgcacaaattgtacacatttgtgcaacggagtccggaaaatgccataacggaccgttgccatgaccgatgtgtaactcttttccggcaagaatggcttgggtaacataggctttggcgtggcggatagattcgtgtaagggatatccttttgccagataagtggcaattgcggaagagagggtacaccctgttccgtgcagattattactttctatttttttctccttatatatataggaagcagattcggaggtatataggaagtcggacattagatcaccttccagatgtccgccttttactaatatactgatatgataatgttccgtcagtagtttggcggcttcctgcatttcctgaatgttatggatggggttaccgataagtacggctgtttcgtcaagatttggagtagctaaagtgacgagcggtaacagttctttctttatttcttctatggcctcgtccgtcattagtttttgtcgactggtggataccatcacaggatcgtaaacgatatattgcggagtatattttcggatacagtcagaaatgacacggacgatctgaatgtcatttatcatacctatttttagcgcaacaggttggagatcctccataacagcttctatttgtccgcgaacgatttcgggggacatagcctgtacagtgtgcactcctaatgtattctgtacggtaattgcggtaatggccgaagccgcatatcctcctaatgctgagattgcttttatatccgcttgaatacctgcacctcccgaacaatcggaaccggcaatggataaaatgacaggatgatgtttcattttagtttttttaatatttaggttgcaaagataggataaaaaacgataaggtacaaaaggacatatcgtttaaaatacaataagtaccggtattttaatctatcggtacaaatgcgaaaagtgctgataataaagtgcgaatatagttttcgtactttatacaattactcttcctacgaatagctaaaatacatattgtaaattgtaagataacgccaactgtacatattgtatggtatatgatatgtatatatatgaaaaacaatgttttatagcatatctgttatttttgttgggactgcatttctcttctatatttgcatcgtcttaaagaaatatatatgcataatatacataaaaatacccctttggccaacaatcatatatcagtggattgtgttgtgattggttttgacggagaacaactgaaagtgttgcttgtgaaacgtgcgggtgaagataatggtgaagtatatcacgatatgaaacttcccggaagtcttatatatatggatgaagatctggacgaagctgcacaacgtgtcttgtacgaattgacaggacttaaaaatgtaaatctgatgcagtttaaggcattcggctctaaaaacagaaccagtaaccccaaagatgtgcgctggttggaacgggctatgcaatcgagggtagagcgtattgtgactatagcttatctgtctatggtcaagatagaccgtacattggacaagaacctggatgatcaccaggcttgttggattgctttgaaagatgtgaaaacattagcttttgatcataatctgattattaaggaagcaatgacttatattcgtcagttcgtagaatttaatccttccatgttgttcgaactgcttccgcgtaaatttacagctgcacaattgagaattctttttgagttggtatatgacaaaactgtggatgtacgtaacttccataaaaaaatagccatgatggaatatgtagttcctttggaagaaaagcaacaaggcgtggctcaccgggctgcacgttattataaatttgacaagaagatatataataaagtaagacggtaagactttattcaagtattaggtataatattaagtattaggcgttgaatgttatagtattaattgtcgggcattgagcgttaaatcgtaaatcgtttaatcgtaaataaaattatgtttctattaggttatgacataggtagctcgtccgtaaaagcgagtttggtaaatgctgaaacaggcaaatgtgtatcatcggcattctttccgaaaacagaggcggacattatcgcagtaaatcccggatgggcggaacaagacccggagagttggtgggggaatttaaggttggctacacaagctattatgaccgaatccggagtgagtgctgctgaaattaaagctatcggcatctcgtatcagatgcatggattggtatgcgttgataaggatcagcatgtgttgcgtcccgctattatttggtgtgattcccgtgctgtgccatacggacagaaagcgtttgaaacgatcggagaggagagatgtctttctcatttgttgaactcgccgggaaactttacagcttccaagttggcatggattaaagaaaacgagcctgccatctatgagcagatttacaagataatgctgccgggtgattatattgccatgaagttgagtggagagatttgcacaaccgtttccggactttcggaaggtatgttttgggatttcaagaacaaccgggtggctgacttcctaatggattattacggattcgactcttctttgattgcagatattaaactgacctttgcagagcagggacgcgtcaatgtgatagcagctaaggagttgggtttgaaagaaggaacaccgattacttaccgcgccggtgaccaacctaataacgctctttctttaaatgtattcaatccgggagagatagcttctacagcgggaacgtcgggagtggtttacggagtgaacggtgaagtaaattatgatccgcaatcgcgcgtcaatacctttgctcatgtcaatcatgcaatagaccaaacacgtttgggagtattgctatgcatcaacggaacaggtattcttaattcatgggtaaaacgaaatatagctcccgaaggaatatcttataatgaaatgaatgtgttggcttctaaagctcctatcggcagcgcgggaatcagtattctgccttttggcaacggcgccgagcgtatgctgaacaataaagaaatcggatgtagtatttgcggactggatttcaacgcacatggcaaacatcacattattcgtgcagctcaagaggggattgtgttctccttcaagtatggcattgatataatggagcagatggggattcctgtgaagatgattcatgccggacacgccaatatgttcttgagttctatcttccgtgatacgttggctggagtgaccggagccaccattgagctttacgatacggatggttcggtaggtgctgcgaaaggtgcaggtattggtgcaggtatctataaagataataatgaggcatttgctacgcttgacaaattggatgtgattgagcctaatatggctaaacgccaggaatatgcggacgcgtatgctaaatggaagtatcgtttagaaaaatcaatgagtaaataatctaagtataacatcgtgagtaatgtgctgttcatattggtgcattctcacactaaaaacattattaattatggcaacaaaagagtttttccctggaattgaaaagattaagtttgaaggtaaggatagcaaaaatccgatggcattccgctattatgatgcagagaaagtaatcaatggaaagaagatgaaagattggttgaaattctctatggcatggtggcatacattgtgtgctgaaggcggtgaccagttcggtggcggaacaaaacaattcccttggaatggtaacgcagacgctgttcaagctgcaaaagataaaatggatgcaggtttcgaattcatgcagaaaatcggtatcgaatactactgtttccacgatgtggatttggtttctgaaggtgcaagcattgaagaatatgaggccaatctgaaagaaattgtagcttatgcaaaacaaaaacaagctgaaacaggcatcaaactgttgtggggtactgccaatgtatttggtcatgcacgttatatgaacggtgctgctactaatcctgattttgacgtagtagctcgtgctgctgttcagatcaagaatgcaatcgacgcaactatcgaattgggtggtcagaactatgtattctggggtggtcgtgaaggctatatgtctcttctgaacacagatcagaaacgtgaaaaagaacacttggcacagatgttgactatcgctcgtgactatgctcgtgcccgtggtttcaaaggtactttcctgatcgaaccgaaaccgatggagcccactaaacaccaatatgatgtagatacggaaactgtaatcggcttcttgaaagctcatggcctcgacaaagatttcaaagtgaatattgaagtaaaccatgcaactttggccggtcatacttttgaacacgaattggcagtggcagtagacaacggtatgttgggttctatcgacgctaatcgtggtgattatcagaatggttgggatacagaccaattcccgattgacaactacgaactgacacaggccatgatgcaaattatccgtaatggtggcttgggtaacggtggaacaaacttcgacgctaaaactcgtcgtaactctactgacctggaagatatcttcattgctcacatcgcaggtatggatgctatggctcgtgcattggaaagcgcagcagctctgttgaacgaatctccgtataagaaaatgttggctgaccgttacgcttcattcgatgctggtaaaggtaaggaatttgaagatggcaaattaacgttggaagacgtggttgcttatgctaaagcaaatggtgaaccgaaacagactagtggcaaacaagaactttatgaagcaatcttgaatatgtattgctaattaacccaccacagattacgtgtatttcacagattttttcttctctcttttgaatttatctgtgttcatctgcgtaatctgtggtgatatatctaactactacaacactacttatcactatgattaatacaatgaacgagggtagtaaactctacctgtattcgataacctctgtcgctatcttgggcggactgcttttcggctatgacacggcagttatttccggtgcagagaaaggcttggaagctttttttctttcagcctctgattttcaatacaataaagtaatgcatggaatcacttcttccagtgcattaattggctgtgtactggggggagcgatttccggtatatttgcttcccgtttgggacgtcgtaattccttaaggcttgctgccatactctttttcctttcagcattaggttcctattatccggaattcttattcttcgaatatggaaagccgaacatggatttgctgattgcttttaatttgtatcgtgttttaggtggtatcggagtaggactggcttctgcagtctgcccgatgtatattgctgaaatagccccttccaatattcgtggaacgcttgtatcgtgtaaccagtttgccatcatcttcggtatgctggtagtgtactttgtgaattacctgattatgggtgaccatcagaatcctgttattttgaaagatgcagccggtgtgctgtctgtcagttctgaatctgatatgtggactgtttatgaaggatggcgttatatgttcggttcggaggctttccctgccgctttctttggactgttattgttctttgttccgaaaacacctcgctatcttgttttgatacagcaggatggaaaggcctactcaattctggaaaagatcaatggtaagacaaaagcacaggaaatccttaatgatattaaagctaccgctcacgaaaagacagagaagatatttacttatggagtggcggtaattgtgatcggtattctgctatctgtgttccagcaagctatcggtattaatgccgtgctatattatgctcctcgtatttttgaaaatgcaggtgcggaaggcggcggtatgatgcaaacggttattatgggtattgtaaacattgtctttacactggttgctatcttcactgtagaccgcttcggacgtaaaccattgttgataatcggttctatcggtatggctgttggtgcatttgcagtggcgatgtgtgacagtatggcaataaaggggatccttccggtgctttcagtgattgtgtatgcagcattcttcatgatgtcctggggaccgatttgctgggtattgatcgcggagatcttcccgaacaccatccgaggtaaagcggtggcaatcgctgtggctttccaatggatatttaactatattgtatcttctactttcccggcattgtacgatttcagcccaatgtttgcatatagtttatacggcattatttgtgcggctgctgctatcttcgtttggcgttgggtacccgaaacaaaagggaagacgctggaagatatgagcaaactttggaagaaaaataaataggttagtgtaatttcatcgtgtcattatgactttgctctcttaacatgactctattgagattatgacatcgtgccaatcaatggtatggtgtcataattgtttgtatatgcaataaacagatctgcaatgtgttatgtagacttaaataaaagcattcattttccatagctaaagcactgctttagcttagttaaagcggtgctttccctctcttaaagcggtgctttttcttttttctagctttgaacagtatcttttctataaatagctatacctttgcactatcttttataaaaacacgtattgttatggaacaacatccgataaaaattaataaagtgcagatacgcaatcttcagatagaagattacgcacagttatctcaatcgtttacccgcgtttattcagatggtagcgatgtattttggactcacgcccaaattcagaaattaatcaatattttcccggaaggacagattgttacggttgtcgatgataaaattgtgggttgtgccctgtctattattgtcgattatgataaagtgaagaatgaccatacgtatgcgcaagtgacaggcaaggaaacattcaacacgcataatcctaaaggaaatatcctctacggtattgaagtgtttattcatccgggttatcgtggtttgcgtctggcacgtcgtatgtatgaataccgtaaagaactttgcgaaacattgaatctgaaagctattatgtttggtggacgtatccccaattatcataaatatgctgataagatgcgtccgaaagaatacatcgaacgtgtgcgtcagcgtgaaatctatgatccggttctaacttttcagttgtcaaatgattttcatgtccgtaaagttatgaccaattatcttcctaatgacgaagaatcgaaacattatgcttgtttgttgcaatgggataatatttattatcagccacctacgcaggaatatattaatccgaaaacaacagtccgtgtaggcttggtgcagtggcagatgcgtagttataagacattggatgatttgtttgagcaagtagagtttttcgtggacgcagtatcggattataaaagtgattttgtccttttcccggagtatttcaatgctcctttgatgtcgaagtataatgataaaggagaatctcaggccattcgtgggcttgcgaagtacacagaggaaattcgcgacagatttatcaatctggcaatcagttataatatcaatattattaccggaagtatgccgtatgtcaaagaagacggacttttatacaatgtaggattcctttgtcgtcgggacggtacatacgaaatgtatgaaaaaatgcatgtcactccggatgaaatcaagagttgggggttgagtggcggtaagttgttgcagacatttgataccgattgcgctaaaatcggagttttaatttgttatgatgtagagtttcccgagctatcccgtttgatggcggatcaagggatgcagatattatttgtgcctttcctgaccgatacgcagaatgcttattcccgtgttcgggtatgtgcgcaggcacgcgctattgaaaatgaatgttttgtagttattgcgggaagtgtggggaatcttcctcgtgtacataatatggatattcaatatgcccagtccggtgtcttcactccctgcgactttgctttcccgactgacggaaagagagcggaagcgactcctaataccgagatgattcttgtttcggatgtggatctggatttattgaatgaactgcatacttatggtagcgtacgtaatctgaaagatcgcagaagtgatgtttatgaagtaagactaaaaaaataagacagtggctcaaaattcaccacagattacacggattggcacagattattcctattggattatttctattaagaatgaatcatttaatcttcaatctgtgaaggttcgtgtaatctatggcaaaagagttttgatttattcccgttttaccccttcccggaagtaccgctttcgaggatactgacgatggagaataaggtaaaacagatagctcccagtcctgataagacgcgggcgagaatgaaataatccgaatgtaccgtggcaagttcaaatacaaatgcagccaagaataagcaagccaatgcagtcagtaccggaatcaaaggaatgcggttggctaatttgaattcatgtctccatatttttgccaggaggattactttactggagatactgtaacatactaaaccaagtccaagcatgatatagcctgtagtaccgtttgtatttcctgagtccgcgaaaattacaaaaagcccccaaatgaaggaaatagatcccatcagtaacactaacttcggccattgtgaacgttctttttccgaatatacattacgtatctgtcgggctatagtagctactaacgcaatcaggctggtacaaatacatgcaaggcctaccattacatggcctgccacaaagtaagccggatgaacgtggctgttggctaataaaacaaatacccatatccatgcaaccaaagatatggtgattacaacggcttccatcgtacgttcttcacccaaggaaaaagctcctttcggaacttcatgccctgtgcttttagagtttccgggaataaaagaaaagcgggtggaagaggtggcggcagtggctacgcagcctgtaataaatccgacaccggttattacatgaccggcaacgaatgctgaaggagaatcagctccactgaagatgcatattcctgtgatgattgtcgcaatagctgccagataaccaaggatcggcaatccatattttgcggctcggttataagtatgtatgatttgccggataatggtagccgccgtacagaacagcgcaatacatatcatgcctagtgaaaaaacgacggggcctgccacaacgcgacctcctgcatctccgtaaccgtaaatgaatgctccgtatccgaagcaaaagagtgccatcaccaaagggattgctctgaataaaatactaataccgtaattcataagataagtgcttttaggtttttcagtagaacaaggataggtctgttttgtttaggtcacaggcagtttaaatcgttaactttataggattccgattaaaagtctttgctttttgctcaactaaacaaatgtttttgtaaatttgcacccttaaaaacggggatacccctcaaagtgtaaattgtaaatagtaaaatcgtagatatagctatgggtaagagatttactgagtattcgcagtttgacctttcacaggtgaacaaagatgtgctgaagaaatgggacgaaaaccaggttttcgccaagagtatgacagaacgtgatggctgtccttcgttcgttttttttgaaggacctccctcggctaatggtatgccgggtattcaccatgtaatggcccgtacgattaaggatattttctgccgttacaaaacgatgaaagggtatcaggtaaagcgtaaagccggatgggatacgcatggactgcctgtagaattgggtgtagaaaaggcgttgggtatcacaaaggaggacatcggcaagaaaatctccgtagccgaatataatgctgcttgtcgcaaggatgtgatgaagtttactaaagaatgggaggacttgactcacaagatgggatattgggtggatatgaaacatccctatatcacgtatgacaaccgttatattgaaaccctttggtggctgttaaagcaattatataagaaaggattgttgtataaaggatatactatccagccgtattctccggcagcaggaacgggattgagctctcatgagctgaaccagccgggatgttaccgggatgtgaaggatacgacgatggttgcccaattcaagataaagaacccgaaaccggaaatgaccggatggggaactccttatttccttgcttggaccaccactccatggacattgccttcaaacacggcactctgtgtcggcccgaaatttgattatgtggttgtacagtcatacaatacatataatggagaaccgattacggttgttttggctaaggcgttgttaaatactcactttaatccgaaagctgcggacctgaatctggaagattacaaaccgggagataagctggttccgttcaaggtagtggccgaatataaaggtacggaactggtgggcatggaatatgaacaactcattccttgggtgaaaccgatagaggtttccgaagatggaatgtggaaagtcagcgataaaggcttccgggttattcaaggggattatgtgacgacagaagacggtacgggtatcgtgcacattgcaccgacttttggtgcggatgatgcgaatgtggcacgtgcggcaggtattccgtcattgttcatgataaataagaaaggtgaaacccgcccgatggtagatcttaccggtaagttctatttgttggatgaactggatgaaagattcgtcaaggaatgcgtggatgtagataaatataaggaatatcaaggcgcatgggtgaagaatgcttatgacccgcagtttacggtggacggaaaatatgatgagaaggctgctcaggctgccgaatctttggatattgctctttgcatgatgatgaaggctggtaagcaagctttcaaaatagaaaagcacgtccataactatccgcactgttggcgtacagacaaaccagtactttattatccgttggatagctggtttatccgttctacagcttgcaaggagcgtatgatggagttgaacaagactatcaactggaaaccggagtctaccggaacaggacgcttcggtaaatggctggagaacttgaatgactggaacttaagccgttcgcgttattggggaactccgcttcctatttggcgcacggaagataatacggacgaaaagtgtattgaatccgtagaggaactttataatgaaatagagaaatcggtggctgccggattcatgcagtcgaacccgtataaggataagggatttgttccgggtgaatatacggagcagaactatgacaagattgaccttcaccgcccgtacgtggatgacattattctggtttctaaagacggtaagccgatgaagcgtgaaatggacttgatagatgtttggttcgattctggttcaatgccatacgcacagatccattatccgtttgaaaacaaggaactgttggatagccgtcaggtatatcctgccgatttcattgcagaaggagtggatcagacacgcggatggttcttcacattgcatgcgattgccactatggtattcgacagtgtatcttataaagcggtaatttctaacggattagtgttggataagaacggtaacaagatgtccaaacgtttgggtaatgctgtcgatccgtttagtacaattgagaaatatggttctgacccgttgcgctggtatatgattaccaactcgtctccgtgggataacttgaaattcgatgtagatggaatagaagaagtccgccgtaaattcttcggtactttatataatacctattcgttctttgtgctttatgccaatgttgacggatttgaatataaggaagcggatgtgccgatggcggaacgtccggaaatcgaccgttggattctgtctgtgttgaacacgttgataaaagaggtagatacctgttataatgaatatgagccgacaaaggctggacgtttgatttccgactttgtgaatgataatttgtccaattggtacgttcgtctgaatcgtaaacgtttctggggtggtgaatttacacaagataaactgtctgcataccagacattgtatatatgtcttgagacagtggctaaattgatgtcgccgatagctccgttctatgccgacaggttgtacacagacttgattacagcgacaggacgtgataatgttgtgtctgtccatttggctaaattcccggaataccaggaaaatagcatagataaagaactggaagcccgtatgaaaatggcgcaggatgtaacgtctatggtattggcattacgtcgtaaagtgaatatcaaagtgcgccaacctctgcaatgtatcatggttccggtggtagatgaagaacagaaagcccatatcgaagcggtgaagaacttgataatgaatgaagttaatgtcaaggaagttaaatttgtagatggtgctgctggtgtattggtaaagaaggtgaaatgcgactttaagaaattgggtccgaagtttggaaaacaaatgaaagcagtggctgctgctgttgccggaatgtcgcaggaagctatcgccgagctggaaaagaatggaaaatatgtgctgaacctggatggagcggaagctgttattgaagcagcggatgtggaaatcttcagtgaggatattccgggatggctggttgccaatgaaggtaagctgaccgttgcgcttgaagtaaccgttaccgaagagttgcgccgggagggtattgcccgtgaattggtaaatcgtattcaaaatatacgaaaatcaagcggtttcgagattacagacaaaataaaaataacaatctcgaaaaatacgcaaacagatgatgcggtaaaagaatataatacttatatttgtaaccaagttttaggcacatctttaggacttgtagatgaagtgaaagacggtatagagcttaactttgacgatttttcactgttcgtgaatgtgataaaagactaatactatattgattaaccttttaaaattgtaagattatggcagaaaagactagatactcagatgcggaactcgaagaattccgtgccattattatggagaaactggaattggcccaacgtgactatgaacagttgaagaagagtttgatgggattggacggtaatgataccgatgatacgtctcctacctataaagtgttggaagaaggtgcgaatacgctatccaaagaagaaacaacccgtctggcacagcgtcagttgaagttcatacaaggattgcaggcagctttggtacgtattgagaataagacgtatggtatctgtcgtgaaacaggaaagttgattccggcagaacgtctgcgtgctgttcctcatgctacattaagcattgaagcaaaaaacagcggtaaaaaataatagatagctacacaagctacgagtgacgagctacaagtagctgcgcaaagtttacgcacggcacttgtagctcgttatgtttaatttataatgaacacatgaagaaactattcacgaaagggagaatcgctctgctcgttatcttttccgtattgattattgaccagatcattaaaatctggattaaaactcatatgtattggcatgaaagcatacgtgtgacggattggttttatatctatttcaccgaaaacaatggaatggctttcggtatggagatttttgggaagttgttcctgaccactttccgtattgttgcggtagcgttgatagggtggtatctctacaagataataaaaaaaggattcaaaacaggctatattgtttgtgtggctttgattttgaccggtgctttgggtaatattatagatagtgtcttttatggagtgatcttcaatgaaagcacacattcgcagattgcgagctttatgcccgaaggaggaggatattctacttggttctacggtaaagttgtggatatgttctacttcccgattatagatacgaactggcctgcttggatgccgtttgtgggtggcgagcattttatattctttagtccgatctttaattttgctgatgctgctattagctgtggtatcattgctttattgcttttttatagtaaatatctgaatgagtcatatcattcgttggataaggaagaaaagaaaagtgtgaatcatgaataataagtttcggtttcatctgtgtcttgtctgcatagtggtttttgcggtagccgggtgtaaagtgaaaagacccggtggggtaatccctgaatcagagatggagaatttgttatacgattaccatctggcaaagtctatgggggataaccttccttatagcgagaactataagaaagcgttgtatcttgatgccgtctttcggaaacacggaactacgcaggctgtgtttgattcctctatggtgtggtacacacgtaacacagaagtgttgtcgaaagtttatgagaaggtaaaggtacgtttgaaaaatgagcaggaacttgttggcgatctgatagccaagcgtgataagaaaccgaaaacaaccaaacaaggagacagtattgatgtatggccgtggcagcgtatggtgcgcctcacaggtgagatgatgaacaatcaatatgtgtttaccttgccgactgactctaactataaagatcgggatacgttggtgtgggaagtgcggtatcgttttctggaaccgatgttggccgattctttaagaactgtcactatggcaatgcaggtgatttacgagaaagatacagttagtcattggacaatagtgaccgaacccggtgttcagaaaatccgtctttttgcagatacattgggacagatgaaagagataaaaggcttcatttattatccgttggaaagacaggaaaaagcaggggcattgttggtcgattgctttagcatgacccgttatcattgtacggatacacttgcttttgctgtccgtgattcactgaataagataaaagctttggaagctgattctttgaagaaactctccgatcataaggctgattctttgaagaaagtagtggagaaggagaagggtaaagaagatgttcaacgattgacaccggaagaaatgaaccgccgccgtacgggaacacatcgtgagaagaagccggagcagatcgaagtggaacaacatatccagcaggaaagaatggaacagcgcaaggaacgccagatgaatcaacgtaggcgtcagcagcaaagacgtcaaacacgttagttatgatgaaacgttttgcttctcattatttactgatacccggtgtcggattcgtaaagcaacaggtagtggagataagcgatgaaggagttgctcaaaatatatttccactgaatgaagaagtggagtccgttgaatggctgccagggctaattgttttgttgtctgtatatcagatggaagaaataagaaataccgggatggttgttaaaaacatcccggtatttcaacagaatcttcctgttcttatagttgcgtcttcttgtactttgaacgactttcttgatacatcccggaagagtggagaagtattgtttccttatttgttttatccctttgattttacttccatgcggcctgtcgacggaactcggcacagattactgcggtagcaatggctacattgagcgactcggatgtttcctggccttgtggataattgggaatatacagttttctattgattaacgcttccacttctttccctatgccgtttccttcatttcccatcacaatcaatccattagcggataatggttgttcatacatattttgtccatccaaaaaagtaccgaacacgggtatctctttgccttgtgaacggataaaatccggaagagaagtgtaatgtacccttactcgggcaattccacccatagtggcttgtactgtcttggggttataaacgtctactgtgttctgtgagcaaataatgtcttcaatcccgaaccagtcggccaaacgaataatcgttcccagatttccgggatcctgaacatcgtctaatgctagacaaagggagtgacgggcaatatccggagttagcgtatattgcggttgctccaagattgcaagtacctgttggggtgtttttaaaagacttgcccgtgagagttcctcttgagagacttctgctatctcgcccgcatatatattcggatgactctgaagccataatgaggttgcggccagaaaacggcaaggaaaatattcgagtaaatcgcctaccagctttgggccctcagctagaaatactcgttcttctttacgtattttcttttgttccagcgagtgtatatactttattttattcttactaagtggtgccatagatttgatattcttttgcaaagctataaagatatttccaatctgcctttactttcctctctttttcttaaattattttccctatcggaaaatataatttatctttgtaatcactttttttatgctatcgatgtaagaaccgtatgaggagagattttctttgtttgtttgcttctgtcgctgtcttgtcacttgcttcgtgcactgccaccaagtttgtgccggatggttcatatctgttggatgaagtcaaaattcgtacggatgagaaaagtatccgcccttcttcattgaaaatgtatgttcgtcagaatcctaatgccaagtggtttagtctgataaagacccaactttacgtttacaatctttccggacgtgattctactaagtggggaaataaatttttacggagaataggtgatgctcccgtgatatataatgaggatgaagcattgcgttctgaagaggaaatcacgaaggctgtgcataatatgggatatatggcagctactgtgaaacgttcgacaaagataaaaaagaagaagataaaattatactatgacgtgactgcgggaaagccgtatgttgttcagtccattaaatataatatatccgatcctaaaatagaagcgcttctcaagcaggattctgccaggagtctgttgaaacaaggaatgtattttgatgtaaatgtattggatgcggacaggcaacgtatcacggataaattgttgcaaaacggttattataaatttaataaggactatataggctatactgccgatactgtccgtaatacctataaggtcgatttgactcagtttttgcggtcttacaaggcacatacgaatgattcggcacgagcacatcaacaatattggatcaataagattaattttatcactgattatgatgtcctgcaatcttcggcattgagcagtgtggaaatcaacgactctattcattataaaggatatcctattttctataaagataaactttatttgcgtcccaaagtattgacggataaccttcgttttagtcccggagatttgtataatgaacgcgatgtgcagcaaacatactccagctttgggcgtttgtcggcgttgaaatatactaatatccgtttctttgagactcagttaggagattcgacaatgctcgattgctatgtaatgctgacaaaaagcaagcataagtctgtatcttttgaggtggaaggaacgaattccgccggagacttgggggcggctgcttcagtcgcttttcagaataggaatctatttcgtggttcggagacttttatgataaagtttcgtggggcatacgaggtgatctccggacttcaggcaggctattcgaataacaactataccgaatacggggtagagacgagcattaattttcctaacttcttgtttccctttctttcttctgactttaaacgtagaatcagggctaccactgagttcgggttgcagtataattatcagttacggccggagtttctgcgaacgatggcatctgccaactggagttacaaatggacacaacgccagaaaattcaacatcgtatcgatttgattaatattggttttctctatttgccgcgtatttcagacagattcagagaagattatatcaataaagggcaaaatcatatattccaatataattatcaagaccgcttgattgtaaatatgggatatagttacaattataatagtgtaggtgggtctatcgtcaataatactattgcttctaattcatattctatccgctttaattttgagtctgcgggaaatatattgtatgccttgtccaaagttgccaatatccggaagaatgataatggtgagtatgccattctaggaattccctatgcccaatatctgaaaggtgaatttgatttcgcaaagaatatacggattgaccaccgtaactcattcgcgtttcacgccggtttgggaattgcagtaccctatgggaatgcaaaaacgattccgtttgagaaacaatatttttccggaggggctaatagcgtacgtggatgggccgtgcgtgatttaggaccgggttctttctccggaaatggaaacctgttggaccaatcgggagatattaaactggatgcaagtattgaatatcggagtaaactgttttggaaatttcaaggagccgtatttgtggatgcaggtaatatctggacgatccgtaactatgcaaatcagcccgggggtgtttttaagttcgacaaattctataagcaaatagcggttgcttatggcttaggtttacggcttgacctggatttctttattcttcgttttgacggaggtatgaaagcggttaatcctgcttttgaaacaaagaaagagcgtttccctattattcatcctaagtttagtcgtgatttcgctttccattttgccgtgggatatccattctgattagccatttattgcgttccctcattagttcaagtgtgtctcgcagaacacttatttgttgcatttccccactgatgggacttatgatatgcgcattttttatttcgcaaacgaccgttgccctttcggaattagcatctatttcgctggaaacgacagatattttggctgctccctgtgcttttaattgttctatatgcttctgctgtatattggaggctaaaaagctaagataggatagggaagaaggagtgctccactcttcggcaactggataattgaagttataaaaggcttcgcaaaagtctacggctgcttgctctatttggttttggggtgtttgttgctgacaagataagcagatgaatgagaatatggataggatgtgtatgtgcagtttattcataacattaaatttatatgattggagataatattatagtggtaatgaggatgaaaaaaggagatgaaacaaagtcgagttcagttccatctcctttattatatattcttgggttgttatgttaacgggctgcaaacatgagattgcttgtagtagcttggcgagctgccatcataccttgagcatccagagttacattcattttctcaccgttcggcaagaacaagtcagcagtaccgtcattattcatttttacaagttcagcactttcaccgtttgcaacaacgttccatgtattggcttctttgtcgtaaatcagatccatagaagcagtttctccttctttagtgatagagtagccgttctccagcgtttttaccatatagttaccgttttctcctttaactttctttacgtcacctacattagccataggattggaaccactccagaattcaatagagttgattactaaagcatcggcaaggtaagctacaccatagaccggtacaatgttgaaggctaaaaacacaagttcatttacaaatttgttaccaagagactgattccaagttgtcaggcggttaaataagccgaatgaacctacacaggaactaaataataggctgccgctgagtactgccgcaaccaaaaacattttgtttcttttcatgtcagaaagtttttagttaataaaaaatatttatattttttcttttgtgtacctgcaaatataatacttttttgtttatttaggttataatccctgttttttatgattttaattttcggcgtgccatttcatttccgatgatatgatcgatggagaatttgccaggtccggcgatatacatgattataaacacaattaagtaaataaaagccaactctttgactgtaaatgcatcattggcatgaacgataaaaaatgccactatcattgtgaaagccatcggaatcattgccaaacgatataaaaagccgacgataaatgccattgagcataccaattcgccgaaaatggctaacccgagagaaatggggctgcctaatcccagtgggtccggaaaaacggcagataattcttgaaagttactccatttttgtattccgtgattcatcaataatactccgaagattatccggactgctagtagcaacaaagaggtttttgttgtgttgggttttgttggaaataaaaagttataaatcataagatattctattttaagtttgttcttatttatgataaacataagaaatcttgattttgttctcataattttataataaactttgtatctttgtagaaaaatgtgtgatatggaacagcatacttatgataatgagtccgttcaggaattgctggattgggcaaaaaaaatggttgaaactaataattatccgacagagagatttaagatcaataagtgtacaacaattattgatgggaaacattatctggaaacattaattgcaatgatttccagaaattgggaaaacccgacttttcatcctactatagagcaattgtgggagtttagagaaaagtgggagaatagagaagcgcataaatagaagtgcactctgatcacgcctgacaagagtgcacaacaaacaaaacaaacaaaattaacatattatactcgtatcttcggagattacgagaaataaggatatgcaaatatacaccgaataatctcaataattgattatttaatcacattttttatgtatatagtcatttatttatcattttaagtgttaaaagggcagccatcttttctttttcttcaaaggctgctgctcattatcattttggctatatatatccgcgaatgtttttttcttctttatcatctcataaataagcccccaatccggtaaaccgcctagattgcgatcgtcaatgaataagtcggcttttaatttgcgggaaaagccttgatggcttttttgttcttcaggataatccttgttgaccgcatagaattccagacctctggctttacaccattcgacagcttcttccaagagtgttccttcacgcacactccataatattaagcggtgcttttcttgttgcaataacttcaatgtatcgatggcgaacggaatttcttcaccaatgcgtggataacgatgctctacaatcgttccgtcaaaatcaacagctataatcatagttttctagtacctaatttctgacaaagatacagacagtaagctaaaaaaacgtatctttgccccgaattaacattttaacaaaaatataaatacatggacaattcccctcagcgtgctgctaaaggctttacgagagctttctgggtcagcaacacagtcgaactgtttgagcgtatggcatattatgccatttttatcgttctcactatttatctatcttccattttaggttttaacgatttcgaagcaagtatgatttccgggcttttttccggaggtttatatctgcttcctattttttccggggcctatgccgacaaaatcggtttccggaaatcaatgattatagcattctccttattatctgccggatatttggggctaggtgtgttgcccactttgctggaagctgcagggctggttagttatggcactgctactcaatttaatggtttgcctgatagttatacccggtggatcattgttccggttttatttgtgcttatggtgggaggctccttcattaagtctatcatctctgcttctgtggctaaagaaacaacagaagcaacccgtgcccgtggttattccatcttttatatgatggtaaatgtgggtgctttcaccggtaaaacaataatcgaccctttgcgtaatgtcattggtgagcaagcatatatctatattaattatttttccggtacgatgacagttattgctttgtttgctgttattttcctttataaatcaacgcacacggcaggcgaaggaaaaacactccgtgagattgggcaaggatttatacgaatcattacaaactggcgtttgttgattcttattctaattgttaccggtttctggatggtacagcagcaactttatgccactatgcccaagtatgtgattcgtatggccggagagacggcaagaccgggttggattgctaatgtgaatccgtttgtggtggtttgttgcgttagttttatcacacgtctgatggcaaaacgcagtgcgattacttcgatgaatgtggggatgtttctgattcctgtttctgcgttgctgatggcgtgcgggaatttgctgggcaatgatcttattgccggtatgagcaatattactctgatgatgattgctggtatagtggtgcaggcacttgccgaatgttttatttcaccgcgttatttggaatatttctctttgcaggctcctaaaggagaagaaggaatgtatttagggttcagccatttgcattcgtttctttcttctattttcggttttggtctggcgggaattctgcttactaagtattgtccggatcctgctttgttcgagacacgggcagcgtgggagggagctagcgtaaatgctcattatatatggtattattttgctgctatagggctgattgcagctgtggcattactgttatttgcaaaaatcaccgaatccatcgacaaaaagaagaaagcttctcggtaattctcttcttttttacgtatatttgccgtcactttgctgtaaaagttgacggcattttgcattttaataaagaagataaaacatgaaagtaaaatttataagcctggcgagtggcagtagtggaaactgttattatctgggtaccgaaacttatgggatactgatagatgcaggaattggtatacgtacaatcaagaaagtactgaaagattataatatcctgatggatagtatccgtgcggtatttataacccacgatcatgctgaccacattaaagcagtgggtaatctgggagaaaaaatgaatattcctgtttatacaaccgcacgtattcatgccggaattaatcgtagttattgtatgacagagaaactcagttcgtcagtccgttatttggaaaagcaggaacccatgatgttggaggattttcgtatcgagtcttttgaggtgccacatgatggaacggacaatgtaggatattgcattgagattgacggcaaagtcttttctttcttgacggatcttggggaaattactcctacggctgcccgttatatcagtaaagcccattatctgatacttgaagccaactacgatgaggaaatgcttaagatgggtccttatcctcaatatctgaaggaacggattgcgagtaggaccggacacatgagtaactctgatacggcggagtttttggcggaaaatatcactgaacatttgcgatatatttggttgtgtcatttaagcaaagacaataatcatccggaattggctttcaaaacagtagaatggaaattaaagaacaaaggagtaatcgtcggcaaagatgtgcaactgcttgctttaaagcgaaatacaccttccgagctctatgtgttcgaataaaagcggaaaaaagatagtaaaaaagctgcattattgtttggtcaaataaaataaaagacctacttttgcaaccgcaaacgaggaaataagcactcttagctcagttggtagagcaactgactcttaatcagtgggtccagggttcgaatccctgagggt

SEQ ID NO: 11848 - DNA, 84816 bp, Unknown
  gut microbiota DNA sequence
aagctatatatttcttttctctttctttcatgacctcttatttgtcaatgacaaccgacattcccggacggaggttttctactttttccataggggaagctttcacctcaaatgttttcaagtcaaactgtccggttgttttagttgctttccaagcggcataacttcctagatctttcagataatatactttgagtttgattgttttattatccagagcgggtacgattgcctcaaactcggttcccatagtcaaatctttgaggaggtcttcgcgcacattaaatgttacccacatattgttcagttcggctatgttcatgattggcgctcctgtacccactaattcaccgactttcgggaatatttcagaaacctctccggcggcaggcgctataagataggtttccttgatatacgattccacttcggcaacagcaccttttgcccggttcaccaaagcctccgcagccattttgtcctcacgttcggctccgttcttagccattgtatattgagctttggcggctttctcggttgcgatggcagcgtcacgctgtgcggttacctcatccaacttttgtgcgggcataactccttgctcatgcaggtttttgattctttggtatgatttctcggcaatagtaacacctgcctgtgctttttgccacatctcgtaagcagcttggatttgttccttgcgggctcctttgattgctttctcattctgtgcttgcgcagcggcttcggctgcacgtgcctgttccatttttgccatgacgtcaggggcttctaaaatagctagtgtatcaccggcatttacgctttgaccttctttcacgcgaaattccagaatacgccccggaactttgcttgaaacgcggtactcggtaacctctgcctgcccttgtatgatctcagggcctttgcgaagcatgaaaaagccaactactgcaacgattgcaataactccgagtaaagtaagaaaagccagcagcatattgctgttttgtgattttgtagttaccatattataatgaattactaaattactatttataaattaccagataatgagttttactcccaactctccatcctccactttttactctccacttattgaagagttcctaatgatttcttcagataaatctcagtcagtttcacgtctatttgtgcatcgatcttttcagattgggcggatagccaggcggtttgcgcttcgagaacgttgctggtggcaattacgccttctctgaatccaagtgtcgcgtaacggaggttttcttctgctttttccatattttgggaagccataaccaacttcttacctgcttcattcactttgaatgctgcttgattgacttgcaactctattttttctcgtgcatcttgaagttgatactgggcgatgcgtgcttcggccttggcagcttttgttttatagataccttctccccaatgccatataggaagctgcaccatgacacctacattccacatacctttgaatttattctcaaaactgttgaagacggaagggttggtgaccatgtagtttcccatcaatgcgatagacggaagatgttcggcgcgggttacgttgactttctgcttatagatttgtgtagccagttcaagactgcgtatctccggacggttttcgtatgcagtggacagatcgaaatgagtatctgtcggaattaatggaatattctccatattttcatccgccagcgtgatgggtgaactcagatcgagaccgcatagttgacacaacaacattcgggcaaggctcaatccgtcttccactttagttagtgtcatttccgcttcattgactttgacgcgtacggaaagaccgtccgctttggtcgctactccctcggcgatcatcttctcaacgtcgctatccagttgttgcagaagttttaagtaaccttctgccaattttttcttattgaccagtgagattacctgccaataggcttggtcggtgctcatgataacctcctgcataccaccattatgttgttggcgtgccaactcttcggcgtattttgttattttattataagcacggattttaccgcccatatataaaggctgagttaatgtgatggctccggcatatacatttctggtgtctgtacgaagcgcgtccaccaaagaattgcctgcctggtcgagggctgccggtaaactcccgcttaatgaggatatgagtggagccagttcgggataagttgctataattccggctgcggcttgcccgatgggacctgccagattacttcccaatccggagagtgccgctttctgatcgttgttcaatagagagaattctttttgatttctcatgtaagctccggttgccgaaaagttgggtaagtagttggtgaatgccgcctttcgttggtaatgggctgcatttattttttcatgacttatcaacaaatctttgttgttggtaagcgctaatgcccggcaactatccaagcttagtgaagtttgcgcttttactataaaagtcaggtgtaataggattgtcaggagaaatagttttttcatcgcatcttgcatattaataaggtgatacttctatttaaataaccctgtttttatgtaatttgtttatggaaatagtctgtttatttgtacttgttggcttaaacaataattgcataaacaacgatgcaaatgtatgtgctttctatgagaaagcaaaaagaattagctttttttagaaatatagcaaaattagtgattccggtgaaaagaaaaaggccgttcttctgaaatgaagaacagccttttaatatattaaatgtaaaaggggattaaagagcacctacttctttcaaagcagcgtttgttttgtgaacagcagcagcactggcagcaaatttagctttctcgtcagcgttcaggtctagttcaacaatcttttcgataccgtttttgccaagaataacaggaacaccgatacagatatctgattcgccgtattcgccttccaggaatacagagcaaggaatcatcttcttctggttgtggatgatggattcaactacaaatgctccagctgcacccggtgcataccatgcggaggtacccagcaatttagtcagtgtagcaccacctaccatagtagcggcagctacttcgttcagtttttcttctgacaggaagttggttacaggcatacctttgtaagtagcgaaacgagtcaacggaatcatagtagtatcaccgtgaccaccgataaccatgccttctacttcgttagcattgcatcccaaagcctgagccaggaaatatttgaagcgagagctatccagagcaccacccataccgataatacggtttttcggcaagcctaaagatttcaatgacaaataagtcattgtgtccatcgggttagaaattacaacaaggatagcgtttggagaatatttcaagatgttctgtgctaccgatttaacgatgccagcattcacaccgatcagttcttcacgagtcatacccggtttacgaggaatacctgaagtaatcacaacaacgtcagaatcagcagtctgagcatagtcgttagtgcagcctactattgtagtgtcgaagcccagcaattgagctgtctgcatcatatccattgctttaccttctgaaacgccttctttaacgtccagcattactacttcgtctgctacttcattaaaagcaagtacatttgcacatgtagcacctacgttacctgcgcctactacggttacttttgacataatactatatatttaaaaagttgataatttgttttatcttttagcgcgacaaaattacaacgataatcctgattaaagaaatttttccgtaataattttagttaaaggtctgagtttccaataatataataggtatgataatttaataattgcttgcctatccggatttacttcgtccgctactattacttcgttgcactatagtgttccgcaagaataactatagtctcccttgcggataactatagtcatacgcaaggaagactatagttaaacgaaataagtataggcagtgaaattaataatagtaggcagagaaagaaataaagttcgtatcatacaatatcaggaaatgtcgtggactataatacgttacctcttgaaaaaggtaaggacttggccgattgggagagcagtgttgctaacagaaaaattgataatatctcaagaggtattcgtgaacatacttcggcacaagtctattctttgattgctacccatcaataagttaaaattgtatggattagcagaggggatataaaaaactctctgcttttctgcttgacttctattgcgaaatgattacttttgcggcggttatcaattaacgtactggaactatgaacaaaaaaggcattcttattgcggctgttgccgtattagtgatagcgattatcggtgttacctatctgttatttactgaaaaacaggctaaccgggagttggtgcaagaattccaattagataaggaggatctggaaaacgaatatactcgttttgcacaacaatatgatgagttaaagatgacaatttccaatgactctttatctcagttgctggagcaagagcagttgaagactcagcgattattggaagaactccgtacggtgaaaagttcgaatgcgacggagattcgtcgtctgaagaaggaattggctaccttgcgcaaggtaatgattggctatatcaatcagatagattcactgaataaactgacggtacaacagaaacaagtcatcgcggaagtcacccaaaaatacaatcaggcttcacgacagattgataacctttccgaagaaaagaagaatctggataagaaagtgatgttggcagcccagcttgatgcgaccaatattcgtgtcgaaccacgcaataaacgcggtaaagtggcgaaaaaagtgaaagatgtcgtgaaattggctatcagctttactattgtgaagaatataacggctgagaacggagagcgtactgtttatatacgtattaccaaaccggataatgatgtgttgaccaagagtgcatccaatactttcccttatgaaaaccgaacattgacctattccattaagaagtatatcgagtacaatggcgaagagcagaatgtgaatgtgttttgggatgtggaagaattcttgtacgccggaaactatcgggtggatattttcgaaggcggcaacttgatcggttcccaggcgttcacattaaattaagtcggtgggtacaaaatgagttattgcgccctgccatccgctccccacatcatcttggtacggagtgtatcgaaaaaaacatgattgaacctttttaccacttttacactgtagtcagcccgacggatagtaagttgcgtagtctctttgcaggtttcgctccgaccgtcgatggcgacgaggaagttgtggctacggctttctacatctagtgtgatttcccaatcatcgcggataacgatgggacggacattgaggctatgtggagctacgggagtgatggcgatagtgttggagtgaggcacaatgataggcccgcctacgctcaatgagtatgcggttgatccggtcggagtggcaatcaccagtccgtcagcctgatatgtatttagaaaagcgccgttgatagccgtgcggatactgatcatggaggaactgtcccgctttaatactgctatctcgttcaaggcatacggacattcctgtaaatgtgtgtcgttacaaatcaattgcagcacgcttctttcctccacactgtaccgtccagcatgaatttcattgaatgtctcttccatttcttcgggagagatgtcggcaaggaaccctaaacgtcccgtattaatgccaagaatcggaatcccttttttgcctacacggcgggcggctttcagaaaagttccgtcacctccgatactgatcaccatatcggctgtaaaatcatcgccatccagtaattgatcggcttcgattttcatttgttctgaaatcaagaactggtagaactctctgcatacacatatttcagctccctgtctcttcaataattgaaacaggttggcggcatgaaaagactttttgggctgataagtatttccgaagatggcaaatttcataagctgtatcattggtttcggttgcaaatttggcactttttcttggatttctactttaaataaccaaaaaagaacggagaatgcgtttcgtattattaggcaactaataataatatttgtatttttgcggcaaatattacatagaactatgactaaattaagtgtgaacataaacaagatagctacgctgagaaacgcacggggaggaaatgttcccgatgtggtgaaggtagcccttgattgtgagtcttttggagcagacggcataacggttcatccccgtcccgatgaacgccacattcgccattcggatgtatacgccttgcgccctttgttgcggactgaatttaatatcgaaggttatccgtcgcctgagtttatagacctggtgctgaaggtaaagccgcatcaagtaactttggttcccgatgacccttcacaattgacttccaattcaggctgggatacaaaagcaaatctggaacttctgacggaagttctcgaccaattcaacagtgcgggtattcgtacatccgtttttgttgccgccgattcggaaatggtggaatatgcagcaaaggctggtgccgaccgtgtggagctttatacggaaccatatgctacgaattatccgaaaaacccggaaacggctatcgccccttttatcgaagctgcgaaaaccgctcgtaaattgggcatcggtctcaatgccggtcatgatttgagtcttgttaatttaaactatttctataaaaacattccttgggtggatgaggtttctatcgggcacgctttgattagtgacgcactgtatttaggattggaacgtaccattcaggaatataaaaactgtttacgctgatgaatgcaatgatattgttggctcaaggggctatgaatatggccgactcgctggctaccgccaaccctgtactgacggaagttggcactcctgaaatgaatatgcttgatatggctatcaaggggggatggattatggttgtgctgggcgtactgtctgtggtctgtttctatatcctgtttgaacgtaactatatgatccgtaaggccgggaaagaggatcctatgtttatggagcggattaaagattatattcatagcggagaaatcaaagcggctatcaactattgccgtacgatgaatactccttcggcgcgtatgattgaaaaaggtatcagtcgtttgggacgtccgataaatgatgtacaggtagctatcgagaatgtaggtaacattgaggttgcgaagctggaaaaagggcttaccgtgatggcgactatctccggcggcgctccaatgctgggatttctcggaacggtgaccggtatggtgcgcgcattctacgagatggcgaatgcgggtagcgggaatatagatattacgttgctttccggtggtatctatgaagcgatgattactacagtcggaggtctgattgtcggtattattgccatgtttgcttataactatctggtgatgctggtagaccgtgtcgtaaacaaaatggaatcccgcacaatggaattcatggatttgttgaacgagcctgcccaaaagtaactttatagctgacagctaatcactaaccattaatcactaataaagtgggattaaaaagaagaaatagagtatcgcccaatttcagtatggcttccatgacggatgtcatatttctgttgctgatattctttatgataacctctactgtggtgtcgcccaatgctattaaagtgctgttaccgcaaggcaagcagcaaacttcggccaaaccgctgactagagtcattatcgataaggacttgaatttctatgcggctttcggcaatgagaaggagcaacccgtagcgttgaatgatttgacatcatttttgcagagctgtgcggagaaggaacctgaaatgtatgtggcattatatgcggatgaatcagtgccttaccgtgaaatagtacgggtactgaacatcgcgaacgagaatcattttaagatggtgctggctacacgcccgcccgaaaacagataagaatgatggacagaagaaaaaagggtgaatacataggagcgctgggtgcattgctggtgcacgtggcagtgattgctcttttgattctggtgagcttcactgttccgcagccggatgaagatgcgggtggaatacccgtgatgatgggcaatgtggaatcggcgcgtggctttgacgacccttcgctggtagatgtggacgtgctggatgaggatgcggcagctcctgcggaaacacagccggaactaccttcagaacaagacctgttgacgcagactgaggaggaaacggtcgccgtgaaaccgaaaacagaagaagttaaaaaggagacggtgaaacctaaggagacggttaagccgaaagaacctgtgaagaaaccggaaaagaccgaagctgagaaagctgcggaagccaaacggcttgcagaggaaaaggcggaacgtgaacgtaaggctgccgaagaagccgcaaggaagaaagttgccggtgcttttggtaagggagcgcaaatgaccggcaataaagggacggcaaccggtggcacaggtacggaaggcggcaaagaaggcaattcttctaccggtgcgaaaataggaataggaggcgagggaacatttgacctcggcggacgttctttaggtgcaggcaccagtctgccgaaacctgtttataatgtacaggaagagggacgggttgttgtgaatatcacggtaaatcctgccggacaggtgattgcaaccagtatcaatctttcgcatacgaatactccgaaccgtttcttacgaaaagcagccgaagatgcggcaaagaaagcccgttttgaggcggtggaaagaatgacgaatcagattggaacgattacgtataactttaagttgagatagagaatagttaacaatcagtgcgcagccaattggcacattagcatattggcacattaatacattattatatatgggaactgtatacgcattttttgcagatggctttgaagaaatcgaagcattaactgctgttgacacgttgagacgtgccggactgaatgtagaaatcgtatccgttacaccggatgaaatcgtagtcggagcacatgatgtgtcccttctttgcgacgtcaactttgaaaattgcgatttctttgacgctgagcttttgttgttgccgggaggaatgccgggagcagctacgcttgataagcacgaaggattgcgcaaactgattcttagctttgcggaaaaaggcaagcctatcgctgccatttgcgcggctccgatggtattgggcaaattgggattgctgaaaggtaagaaagctacttgttatcccggattcgaacagtatctggaaggtgcggaatgtgtcggtgaacacgttgtccgtgacggaaatattataacgggtatgggaccgggcgctgctatggaatttgctttagctatcgtagagctgttggctggtaaagagaaagtagacgaattggcggaagcgatgtgtgttaagcgctaagccgtttatgaagaaatatgtcattattgtcgccggtgggaaggggttgcgaatggggagtgagcttccgaaacaatttcttcctatcggtggtaagcctgtactgatgcgtacgttggaagcattccggaagtatgaggctacacttcagattatattagtgcttcccaaagaacaacaggatttctggaaacagctttgtgaagaatatcattttgacgtaggacacctcattgccgatgggggagagacacgctttcattcggtaaagaatggtttggcattggtgcgggaatccggattggtgggagttcatgacggggttcgtccgtttgtctcggtcgatgtaatccgtaactgctatgatttggcggagacaaggaaggctgtaattcctgttatcgatgtagtggaaaccgtacgccatttgaccggcaatagtagcgagacagtcagtcgcaatgattataaactggtgcagacaccgcaagtattcgatactgaactattgaagcgggcatatacgcaggagtttactccgttctttacagatgacgcttctgtggtagaagcaatgggagtgcctgtatatcttgccgaaggcaaccgtgagaatataaaaataacgacccctttcgatttaaaaatagggagtgcacttttgtaaatgttcgatttagtcacacgagacataaagtttatctccggtgtaggtcctcagagggccgctatattaaataaggagcttggaatctactctttgcacgatttaatttactactttccttataaatacgttgaccggagccgcgtctattacattcacgaaatagatggcaatatgccgtatatccaattgaagggagagattctcggctttgaggctatcggtgaaggacggcagcgtcgcctgactgctcatttttcggatgggacgggtgtagtggatctggtgtggtttcaaggaataaagtacatcttaggcaaatataaacttcacgaagagtatatcattttcggtaaaccgaccgtgttcaacggacgtatcaacgtagcgcatcccgatatagacaaatcggatgaactgaaactttcgtccgtaggtttgcagccttattacaatacgacggagaaaatgaagcgcagcttcctcaactcccatgcgatagagaaaatgatggctactgtcattcagcagatacaggagcctttgcccgagactctttcgcccaaactgctggcggaacatcatctgatgcccttgacggaagcgcttcggaatattcatttccctgccaaccccgatttgctccgcagagcgcaataccgtctcaaattcgaggaactgttttatgtgcaattgaatattcttcggtatgccaaagacaggcagagaaggtatcggggctatgtttttgagaaggtaggggatgtatttaacacattctatgccaagaatcttccttttcagctgacgggtgctcagaaacgggtattgaaggaaatacgtaacgacgtaggcagcgggcggcagatgaaccgccttttgcaaggggatgtcggaagcggaaaaacattggttgctttgatgagtatgttgctggctttggataatggttatcaggcgtgtatgatggcccctacggagatactcgccaatcagcattatgaaaccataaaagaactgcttttcggcatggatatccgtgttgagttgttgaccggatccattaaaggaaaaaaacgggaggctattctttccggactgctgaccggagatgtgcatatcctgataggaacgcatgccgttatcgaagatactgtaaatttctcatctttgggattcgtggttattgacgaacaacatcgtttcggggtagcgcaacgtgcccgcctgtggagtaagaataatcaacctccacatgtgcttgtcatgacagcgacccccattccgcgaacattggccatgactttatacggtgatctggatgtgtctgttattgacgagttgcctcccggacgaaagccgataactactgtgcatcagttcgacaatcgtcgggagagcatctaccgttcagtgcagaagcagattgatgagggacgtcaggtttatatcgtttatcctttgataaaggaaagtgagaagatcgatttgaagaaccttgaagaggggtatcaacatatcctcgaagaattccccaagtgcaaggtttgcaaggtgcatggcaaaatgaaaccggctgagaaagacgagcagatgcagcttttcgtttcgggagaggcacagataatggtggctactacggtgatagaagtcggagtaaacgtaccgaatgcttcggtaatgattattgaaaatgccgaacgtttcggactttctcaattgcaccagttgaggggacgggtaggacgtggagcggaacagtcttattgtattttagtcactaattataagttgacggaagatactcgtaaacgactggaaataatggtgcgtaccaacgatggttttgaaatagcggaggccgatttaaaacttcgtggtccgggagatcttgaaggtactcagcagagtggtgtcgcttttgacctgaagattgccgatatagcccgcgacggacaacttctgcaatatgtccgtaccattgccgaagaaatagtagagcatgactttgcagcgcagaatccggagaacgagattttgtggcgacaactgaaagcattgcggaaaacgaatgttaactgggctgccattagctgaaaaacggttaaacatacagtttatttacgtaaatgtgttgcaaaacatatttagtccttattctccctatttataggagtttaggggacaattattagcacgcttaccggctaaccgtctgaaaaatagttaatgacttccttgcagtttcatcggaaaatgctacctttgggggaattttttagtaaatgtatagtttaaccaatttataaagtcgagtattatgcttgaaaaaacgctggtcattttaaaaccatgtacccttcaacggggattgataggtgagataacccatcgctttgaacgtaaaggattacggttggccggtatgaagatgatgcaactgacagatgaattgttaggcgaacattatgcccaccttagcggcaagccattctttcaacgtgtgaaagattccatgatgacagctcctgtcattgtttgttgttttgagggtgtggatgctattcaaacagtccgtacattggcgggaccaactaacggacgtctggctgctccgggaaccattcgtggagattacagtatgagctttcaagagaatatagttcatgcttccgattctccggaaaccgcagctgttgaattaacgagattttttaaaccggaagaaatattcgattacaagcaggctacttttgattacctgtatgcaaacgacgaatattaaatgatttgacaagaacgaatgaattttaactgcattattaaaaccggattggtggctgtagcggctatggttagtttgagctctttctctcaagacctgattgcccgccaagcaccgatagacaagaaattgaaaactgttgactctttggcattgcagaagcaaatccgtgccgaacagtccgaatatcctgcccttagtctttatcctaactggaataaccagtatgtacatgcttacggaaacgctattattcccgaaacttatacaatcgacctgaccggattccatatgccgactccgagtacgaagataacttcgcctttcggtccccgttggagaagaatgcacaacggtcttgacttgaaggttaatatcggcgatactatcgtggctgcctttgatggtaaggtacgtatcgtgaaatatgagcgtagaggttatggcaagtatgtcgttattcgtcacgacaatggtttggagactgtttacggacacttgtccaagcagttggtagaagaaaatcaattggtgaaagccggtgaagtgataggtctgggtggtaatacgggacgttctaccggttcgcatcttcattttgagactcgtttcttaggaattgcaatcaatccgatttatatgttcgacttcccgaaacaggatatcgtagccgatacctatacgttccggaaaacgaaaggtgtgaaacgcgccggttctcatgacacacaagcggcagatggcactatccgctatcataaagtgaaaagtggagataccctgtcacgcatcgctaaattgcgtggtgtatcggtcagcacgctttgtaagttaaaccgtattaagccgacaacgactttgcgcatcggacaagtcttgcgttgttcataaatatcttgcttataaaacagtaatacaatatctttagaagagggcactttaatataatttagagtgccctctttctgtttttacttaattattgttacctttgcacactatttggaagaaaatgaaagataccaagcaacaatttgaacatgtcatcgctttatgccgtgacttattctccaagaagctgcacgattacggtcctgcgtggcgtatcctgcgtccggcttcggtgaccgatcagatttttatcaaagccaaccggatacgtagtattgaaactaaaggagtgactttggtagacgaaggaatccgttctgaattcattgcgattgtcaattacggtattgtcggactgattcagctggaattgggatatgccgaatctgccgacatcagtaatgaagaagcgatgacgctttatgataagtatgcccaagcggcattggaactgatgcttgccaagaaccatgattatgatgaggcttggcggagtatgcgcgttagttcgtatacagacttgattttgatgaaaatttaccgcaccaagcagattgaaagtctgtccggtaacacattggtgtccgaaggaatcgacgctaattacatggacatgattaattattcggtttttggattgataaagatagaatttgaaggataagaacttacatattattcaggaagtggtggcgaacaccggtcgctttattctggcggcttcgttcatattttccggatttgtaaaggcagttgatccactgggattccagtataagatacaggattatctggctgcattcggaatggcttcttggttcccttcatttttcccgctattgggaggtatcgtgttatcttctgtcgaattctttattggtatctctttgtttttcggaacgcgaaggacgatcgcttcttcattggcgttaatgctgatgatttttatgacgccactgacactgtaccttgccctctttgatccggtttcggactgtggttgttttggcgatgcttgggttttgacgaattgggagacatttggcaaaaatgtagtgctcctgcttgcggctgccggaacgttccggtataggaagatggtgttccggttcattagcgtgaagatggaatggctggtttcattatatacactgttttttgtgtttactttgtcattttattgcttgaaccgtttgcctgtattagacttccggccgtataagattggaaagaatatatcggaagggatgacgattcccgatggagcgaaaccgagtgtatatgaaagtatttttgtgctggaaaagaatggcgaaaagaaagaatttacgctggataactatccggacagtacttggacatttgtcgatacacgtactgtacttaaggaaaaaggctatgaaccgcccatccatgatttttccataatggatttggatacaggagatgatattacggaagatgtcctgaccgatatgggatatacattcctgttggttgcccaccggattgaggaagcggatgacagtaatattgatttgattaatgaaatatatgattattcggtggaacatggttacagattttattgcctgacttcctcacccgaagaacaaatcgaattatggaaagacaagactggtgcagagtatcctttctgtcagatggatgatataactctgaagacgatggtgcgttccaatccgggattaatgctgattaagaacgggactattctgaataagtggagtgacgaggatattccggacgaatacgtgttgaccgataaactggagaatttgccattgggacaacaaaagttggaaagtgattttcacacagtgggatatgttttcctgtggtttgttatcccgttgttgcttgtgctgggcgtggatgtgctggttattcgccgtagagaacgaaaaaaaagttttattaaccctttaaataaagaaaacaaaatgagaaagaacattgttgcaggaaactggaaaatgaacaaaacccttcaagagggtatcgctttggctaaagaattgaacgaagcattggctaacgaaaagcctaactgtgatgtgatcatctgtactccgtttatccacttggcttctgtcactccgttggtagacgctgctaagattggtgtaggtgctgaaaactgtgcagacaaggcttccggtgcatatacaggtgaggtatcggctgagatggttgcttctacaggagccaaatatgtaattttgggacactctgaacgtcgtgcttactacggtgaaacagttgctatccttgaagaaaaagtgaaattggctttggctaacggtctgactccgattttctgtatcggtgaggttctggaagaacgcgaagctaacaagcagaatgaagtggtagctgcacagatggcttctgtattctctctgtctgctgaagatttctcaaagattatcttggcttacgaaccggtttgggctatcggtacaggtaaaactgctactccggaacaagctcaggaaatccacgctttcatccgttcaatcgttgctgacaagtatggcaaggagatcgctgacaatacctctatcctttatggtggtagctgcaagccttctaatgcaaaagaattgttcgctaatccggacgttgatggtggtttgatcggtggcgccgctctgaaggttgctgatttcaaaggtatcattgatgcgttcaatgcataattaactttcaccacggattacacagactcgcacagattaacttcattcaatgaaaatctgtattaatccgtgtaatctgtggtgaactatttcattatcaaatgagaaaacttgttttatttgtcctattgcttctcttggtgggtgccggtgcacaggcgcagggcattatcaggagtttggagcgtacggtgccggggcagggaaaggtgaccattcaccaggatccccgtattgaagctctgattggcatggagcgtcctgcaacaggcgaacagaaggtgataaagacttccggtttccggatacaggcgtatgcaggcaataatacgcgacaggcaaaaaacgatgctgatcgtgtagcttcaagagtcaaagagtattttccggagttgtcggtatatacttcgtttatttcgccccgttggctttgtcgtgtgggtgatttccgaagtattgaagaggcggacgcaatgatgcgtcggttgaaagctaccggtatgtttaaagaggtttctattgtgagagaccagatcaatattcctttataaatctgtcatgttggaaaaagaagaaattgtctctccgaatttggaggaattgaagaatcattatcgtagtattataactttgttgggcgaagatgctgaacgggaagggctgttgaaaactcccgaacgggtagctaaggcgatgctgagtttaacaaaagggtatcacatcgatccgcacgaagtacttcgttccgctaaattcaaagaggaatatagtcagatggtgattgtgaaagacattgatttcttctctctctgcgaacatcatatgctaccgttttatggaaaggcacacgtggcctatattcctaacggctatatcacgggacttagtaagattgcccgtgtggtcgatatattctctcatcgcctgcaagtgcaggaacgcatgacgttgcaaatcaaagagtgtattcaggaaacgctgaatccgttaggtgtaatggttgtagtggaagccaaacatatgtgtatgcaaatgcgtggtgttgaaaaacagaactctattactactacttccgactttacgggggctttcaatcaggcaaagactcgcgaagagtttatgaatctcatccagcacgggagttagtgtagaacaaccctatcccccaagcgttttgccataatgctttgtacggttctcagctcattataacgttgcattagtgagtcgcacttttcattgtcatgagcgagcgccgggtcctgcagtgcataaagcatatgcttcagttcttccgtaacgattgcgtatttaaagttaatcatcaacatgggaaccagttcgtagagccgttcttcatctgtcacaatcttctgtgatttggagtggtatttgctgagttgataacgtacattaatcaggtctacgctcaatttactgataatcgggtcaggatgtgccagaaagtaacgttccgcgataaaagccgaatcatgcatgtgtgcggcagcttccgacagcatttggcgatgcaatggattatggaaagccaaatcatcctctttcaagtcattgacaacatattctatgacagtgactgggatttcatttccttcttcgtcagtcagattacacatgactttctcaccgtaacggactacggcctgtaatatcaaccgctcgaatttataaaattcctgtccttcttttccttcctgcggaataaaagaagcatagttgtcttcttgtggcgggaaaggggattctgtatatcctgcctcagcaatttcaggaggcaatggaacatccccattgggagcgggcatatttccggcctgttcaccttgtggcatagaggctgccctttcggcaatccgtcggtcccgctctgtctgttccgcccgtttctccgcttgcgtttcccgtcttttggctacttccgaaaccaacagtttatcttctatatgtaatagttgggcacattctttgatatacacatcccgtacaattgcttccggtatgaccgaaatgctttgtaccagattaccgatcagttccgcacgtttgatgggatctcttccggcgtcctctaacaacaagttagtcttgaagcggataaagtccgtttcgtgttccgagatgaaggcctggaattccgtagagttatgtttgcgggcgaaagagtccgggtcgtcaccgtcgggaagcaggcagactttgacgttcataccctcttcgagcagcatatcaataccacggatagaagctttgatacctgcggcgtccccgtcataaagcaccgtcatattgtttgtgaagcggtgaatcatacggatttgtcccggggtaagcgctgttcccgaagaggccactacattctcgatgccggattgatgcatagagattacgtctgtgtacccttcaaccaaaaagcaacggtcttgttttacaatcgcctgtttggcaaaatagataccgtatagttcgttgctcttgtggtaaatatccgattcgggagaattgacatatttgaccttaacccctttggtcgcattggcaagcacacgtccgccgaaagctactacctttcccgaaagagtgtgtaccgggaatatgacacgtccccaaaagcggtcccgcagacgatggtcatccgtttcataacaaagtcccgttttcacaagatactctttcttatatcctttctgtattgcttcttgggcgaaagcgtcatggctgtcggtgcaatatcctaactgaaacttctcgatgatatcatcccgaaagccgcgattgcggaaataagccatcccgatactgcggccgtctacatggttcttcagtatattctgaaagtaatcgcgtgcgaagttattgacgataaacaggctttcccgttcgctttgcacaaacttttcttcatcactcagttcccgttctttgatttcgatattgtactttttggcgaggtatcttagtgcttccggataggacatctgctcgtgctccatgatgaagtgtacggcatttcccccttttccacatgcgaaacatttgcaaagccctttggcgggagagacataaaaagaaggagtcttgtcgttatgaaaaggacacaaaccgacataattcactccacgcttgcgtagtgtgacaaaatctgaaacgacatccatgatctgtgccgcatccaatatccggtctatggtagcttgatctatcattctttctatctcctgtaaatctgtttttgcggatacaaaggtacacataaaaaaatcccctgcaaagaacttttttgcaggggaccgttaaatcttatgtgtaatcagtgattgccgattacgggttatttgatcttttcccgaatctttgtcagatacttcttcattccttccgcatccttgttctcaatgatttcgagaagatttttcagctcggtgcggatgttggccacctgtcccggagtgcgcgggttgaacagaatttcctgaagcaggtagtcatcttcgctcagcaaacctttggcaatagccatatgcttcttgaatgtggttcccggtgcttcctggtgtttcattacagctgcaaatacgaacgtcgaaacgaacgggatggatagcgagtaagccaccgtttcatcatgttcgtcaaaggtatattcgaagatgttcaaccgcaaggtctggtagaggtctttaaaaaagatcttacccaagtgatctccttcactgatgataatggcgttctcgctgcttagattgctaaggctggcgaaagtcggaccgaacatagggtgactggaaacataacggaagccgctttcttcgtagaacttcttcagtcccgttttaacagaagcaatatcactgatgatgcaatctttgggcagcacaggcaacactttgcggaaagcgtccagtgtgtactttactgttgcggcgttgataaccagttccggttcaaaatccttgatttcttccaatgtcgtgaaacgataagtgttgtagacaaaacgtaattggtgcgggttgacgtcgaacacggccgtttcgtgttggaagctcaatatatcagtaaagaaagagcccattttcccggctccgagtattaatattctcatatctattgtttatttgttgataatctccatctgttggcggacagactcttcgtggatagcctcgaagattttcttcatgaattccgcatccataccgcattgttccccttgtgaaccgcgcttttccagaatttcattgtaacgtccggtctggagtacggtgatattatgttctttcttgtatgtaccgatttcacgggcaatgcgcattctttttgccaactcttgaatgatgttgtcatcgcattcatcaatctgtttgcgtagcagccccagactttcggtcgattgggtctcggtacggataaccaatagattgaggatatagtcgagtacatccggtgtcacttgttgggaagcgtcactccatgcacaatccggattgcagtggctttctacgatcagaccgtcgaagttaaggtccatagcctgctgacaaagcggagctaccagttcgcgttttccaccgatatgactgggatcgcagaagatgggaagattagggatgcggcggcgcaattcgataggaatgtgccattggggcagattgcggtaaatcttcttatcgtagctgctgaaaccacgatgaatagcacctagacgtttcagacctgcattgttgatacgttccaaggctccgatccacaattcaagatccggatttacagggttcttgaccaatacggggatatcaacgcctttcagagcgtctgcgatttcctgtacggcgaaagggttggcagtggtacgtgcacctacccaaagaatatcgattccggctttcagacattcgtaaacgtgcttggctgttgcaacttcggttgcgacatacataccggtttcttttttcacctctttcaaccaggcaagaccttcgacgcctataccctcgaagcctcccggtttggtacgtggtttccagattcctgcacggaatattttctgacctttcgctgccaattgcttggctgtatccattacctgttcttctgtttctgcgctacacgggccggcaatgacaatcggtcttttagcctcaatgcccggtaataaaattgattcgagttccataataataatgtatcaatatgccaatgtgctagtaattccattggcagttgggttatctaaactatttaattgttctatttatcggcacgttggctgtcagcacattgtgtcattgtttttatcctttcgagtgcttcctccaacttggcgtctttgcagcaaagagagatgcggatatatctcgctccgttgctgccaaagataaatcccggtgtgataaacactctggcttcatgcaataccttttccgtcaactcttccacatctttgcaggaagcggggatctttccccaaaggaacatacctacctgtttctcatcgtatgtgcaccctagtgttttcataatttcaccggctaggtggcgacggttacggtagttcttgttattgccctcgtaccagtcggcttcggcttccagagcagtggctgctgccagttgcatggcacggaacattccgctgtctatattgcttttcaccttcagaatccattgtacaaactcagcatttgaggccagcataccgatacgccatcccggcatattgtggcttttgctcatggagttgaattcgatacaacagtctttggcccccggtacgctcagaatactgatcggtttctcgttcaggataaagctgtatgggttatcattcacgattacaatattcttgcggcgggcaaagtcaacgagacgcccgtataattccggagttgcattggcgcctgtcggcatattcggataattggtccacatcagttttacccggctgaggtccattctctccagggcttcaaaatcaggcatccagttctcgtcttctttgaggtcgtagttgatgacttccgcaccgagtatcttgctcagcgaagtgtaagtaggatatcccggattaggaaccagcacttgttctcccggattgacaaatgccagagtgacatggagtattccctctttcgagccgatcaaaggctgtatctccgtgttcggattcagttccactccataccaacgttgataccaggcggcaaaacccttgcgaagttcggggatgcccacgtacggttggtagccgtgtccgttgggatcatgcgcattgctgcacaatgtttcgatggttttctcggaggggggcatatcgggacttccgatacccagactgatgacgtccttaccttccgcattcatctgtgctacctctttcagtttcttggagaagtagtattcacttacgcttgccagtctgtcggcaggaacgatcttatacatttgactttccttctgcatattcgcctaatgttttgagttctttggttaatggagtgattgctgcaatggactgcttatatctcagataatcgttgaaagccacatctacataaaactggtattcccattcacgtccgatgatcggtaacgattgtatcttggtcaggttgatattataaaaagacaggatggacaacacttgcgacaaactgccttccgtatgcggcaaggtgaataccatgcttgccttgttggtagcatttgcatgatgttggcgtagttcatccgcctgccagggatcggcaactaccagaaaacgggtgaagttgtgtttgtttgtctcgattccttcttgaagcaccttcataccgtaacgctcggctgccgctttggaacagatggcggcgtgtcctttcaagttctcgttcttgatgatttccgcgctgcgtgccgtatcctcaccctctactactttcagttgcggatgttggttcaggaattcgcggcattgcatcagggcgatagggtgggaatttacttccgtcaggtcttcccaactttcgtcgggaaggcagacaaaactgtgtgagatacgcaatttgtattcgccgataatttgtgtgccgctttgtctcaacaactcattgttgtgcaacaagcttcccgcaattgtattttcgatggcgagcattccgattacctggctgtcttttcgtatcgaagtaaacacgtcctcgaagttggcgcagcagattagctctatttcttccccttcgaagtacttgtgtgcggcgatatcatggtaggaacctaatgttccttgaattgctatctttttcattgttctaaatggtttatataaaaaaatcccgcgtccatattggagcgggattcatatgattgatttctctattcagtccttaagcatcactgtcacttgatacatacaaactcccgctctactttgttgctaaagtaaaagtaaaaaaagaagtaatatgcataagtaaacgatttcattcgatcctttgtttttgctttggtttctaattctagggcaaaagtaataattttctgttagatgcaaacaaaaagcgatactttttttctattcttgcctaaaaaatataaaaaggacacttagaagatacccggaagagtttccggctttgctcccagagtcttgaattcaccgttcaaaccggcttcatctttcgggttcagctccaatgatttcttcatgtcctcgatagaaccgtccttgtcgccatttaacaatttggcacgtccgcgttccttataagcttctgcgaagttcggattcagctcaatggcttcgtcaaagagtccgatagcttccgtcagtttcttctgactgatgtaaagtcgtcccagatagaggtacgcctgttcgttgaaaggatttatttccgtgacaagtcgataatccttttccgcttcttcggactctccgttgtcctccttcacttttccatgtaggagtatcgccgtttcttcttccggattctgagccaatatggcatctacatcctccattacctctttgtattgtttcattttcaataaggcttctgcgcgtaacagacgggcttcgatgaaatcatccttcaaggtgatagctttggtgaggtgggcgatagtcatcaggtcgtcgtcctggcctttgcgggcttttcccagcagataatgcgctacggcatttccttcttcgatggcgatggccttgttggctgcctcttccatagcctgataatcttcctgaatgaagcatacattcgccaatgtcaggaaagtattggtaacatgaggttccattacagccattttctccaaaagttcgcgggcctttgccgtttctcccaattggacgtagagttggctgagatatcccaatgtctcgaaatcctcctcaatggcaagggcttccgtgaaacattttacggcataatccgggcgtcccatgcgttgcgcgcgcaaaccgtcatatttgaagatctcgaatcttttccggtcgtttttctgcttttcactttccagtgtctccgatttcccggagaagaaagatttaaaaaagttcggcatgatatgttgtttttgagttacacttgcaaatgtaataacttattttgatatatgtatcattccatcctgcatcttccattcgccttcctccaataaatagcggataacctctccaaccttttctttctccgcttccatgttattggctatttctgccggagtaagcggtttttgaatgagcagtccggtcattcgcttctttaattcttcaaaggagtcatcggacagactgtctgtggcgcggtggctgaggcagatatcgcattggccgcaattatgttcgtttttctctccgaagtagcggagcagcatccggctccgacatacgttttctgaagtgacatattcctccatcgccttgatgcgcgcttcgtatcttgctttccgttcttcgtagacagagggaggaatatgtacaaaacgcagttcctgccgttcgcgcgtatatataatataaggtgtctttttgtgtggaatataatccacgatgcggcgtttggtcaatgtcaccaggatgttatagatctgttcgcgtgtcagccccgtgcgtatcgacagtgaagcctcgctgatataggcataatccgtgaatacccctgtgtaggaacgaaggattgtctgtatcagcgcttcggtttcttttcccatctcccgtagtttgtacagttcgtcccggtgaatcgtaaaaaggatgcgggaagcattatcctgttcgtccgtatattccagataaccggcttgcgtcagtatcttcagcgcactgtctaccgggaccggaaagtatttgaatttccggcagaattcttccagattaaattcgcggacacattggaaaccgtcgcccatcgccatctgatagtaatattgcaaatgctcgtaaacatcgagaatatactctttgtcggggaaggtgtctgccacccgtttgtgcagggtagtcttatcagatttggcatatagaataacagcatatgcctttttcccgtctctgcctgcccgtccggcctcttgaaaatacgcttccggagaatcggggagatcaagatgaaggacgatgcggacatccggtttgtcaatacccattccgaaagcattggtggctaccattacgcggacttccccgttttgccagcgtttctggcggaggtctttcactgcattatccagtccggcatgatagaagtcagcggtaatatcttcgttcaccagcagttcggtgatttcctttgtccgtcgcctgttgcggacataaatgatggcgctacctggtattttccgtaagatatgcaataactcgttcgtcttgttgtctgtcttacggacaatgtacgccaggttcttccgttcaaaactcatgcggaagacattgccttcatggaagttcagacgattctgaatatcctttactacttccggtgtagcggttgcggtcagtgccagcaccggaactccgggcaggagttcccgtatttccgcaattttcagataggcaggccggaagtcatatccccattgggagatacagtgactttcgtctactgtgatcatggagactttcattgccttcagtttggtgcggaaaatctccgtatccacacgttccggagaaatatagaggaatttgtaatcaccgaagatacaattctccagtgcggtgagaatctcttggcgcgtcatgccggaatatacggcaagcgccatgattccccgtttgcgcaggttctgcacttgatctttcatcaaggcaatgaggggagtaatgacaatgcaaataccttcttgagcgagagcaggcacttggaaggtgatggactttccaccgcctgtcggcataagccccaatgtatctttgccttcgccgatactggtaatgatctcctcctgcaagtcgcggaaggagtcatacccccagtattgtttcaatatctcctgatacttattcaatcggttttatatcttcaatttgaagttggatttcgccacgcttatgcgtgttttcttcgatggtgtagcagatgtcgaacgagcgtttcgtcttgatataacgtacgtgcgaactttgcccgaaagcaatgccgttcattacattgttcgatttattatccactagttccagtttgatgtgctcctgatcacgtcccaccaccttgcttgttccgtagtcgtagacatggtgcgtacagaaaataggtttcatattgtcaggaccgaaaggattgaatcttttcagatcattgaagaacttggatgaaatgtctctgaaatctatctccgcatcaatgtcgattacggcactggtctgctccggtaaaatatgctgcgagacgtattcttcaaatcgtctggtgaactcttccacgttttctactttcatggatagtccggcagcatacgtatgtcctccaaagttctccagcaggtcgcggcaatgttcgattgctctatatacatcgaagccggaaacggaacgtgcggaacctgtcgccatgtcgtccgtccgggttagcactacagccgggcgatagtagacttctgtcagtcgggaagccacaataccgatcactcccttgtgccactcttcgttgtagatcacgatagagcggcggtcggcaagcccttccagattggcgacgatattgttcgcctcttccgtcatactcttgtcgaggtctttacgagtctcgttgtattgattaatttgtccggctttctccagcgctaccgagaaatctttttcggtgagtaagtctaccgcttcttttccattttggatacgtcccgatgcgttgatacgcggtcctattttgaatacgatatcgctgacggtaatctctttttcggagagtccgcatacatcgatgatcgctttcattccagtactcgggttgctgttcagctgcttcaacccatgaaaagcgagaatacggttttcacccatgatgggcacgatatccgatgcgatacttaccgccacgatgtcgagcagcggaatcagatgatgaaactcgataccgttgctgatggcgaacgcttgcataaacttgaaaccgaccccgcaaccggaaaggtgtgtgtacggatacgtattatccaagcgtttggcattcagaatggctacggcaggtggaagcacctcatccggcacatgatggtcgcagatgataaagtcgattcctttctctttggcatacgtgatttcctctacagcctttatgccgcaatcgagcacaataataagccctacaccggtttcggcggcatagtccactccttttttagaaatgccatacccttcattgtaacggtcgggtatataatagtcaaggttcgaatagaactgttgaataaacttgtagaccaatgctaccgcagtagtgccgtctacgtcataatctccataaattagaatacgttctttctttcccatcgccttgttcagacgttctactgcaacgtccatatccttcatcaggaatgggtcgtgcaggtcgggcaattgcggacggaagaatttcttagcgtctgccgctttcgtaattccccgttgcaccaaaagttgtccaagtatcgggctaatccctaattcttgggccaatatctggcttgtctctgtctgttcgggtgtaatgggtcgataattccatttgtgattcattttatatattgcttttttctttttctgttctcaagggtcagaaaggcacttctttccaacaaggggtaaaagtacgaaaaaaagcggaagtgtaggataagatatgacgaaaatatttcatgatgctatgttgaaacgcaaattattatgccaccctcatagcaatagagtggcacaatatgttttgtaagcaatcggaaacctagagcccgttgataaacagattcgctttttccactacgacgtttgccggagtctttaacagttgaagctcatcaaaactttcaagtactctctccagtttgcgtagtgtagcagtcttgttttgggtttgcagttccgttttcagaattcggattttctcgtatgcttgtatgcctgccaccagattctcgaaacgcagacaagtccttcctcccggatagagaaggtaagtatctccggctccccatgtgtagaagcggctgtctagtaacggctcgatagtccagctgttcaatgcccaacgcaggtatccgtccagattctctttcgctgcataccaggctatccaagcgccttctgccgggttgctgaatgtatatgtgttgggatgggattctgcgcaacaggtgtagtaagttgtgatttttccttctgctttccgtttcgttttcatctcttcactgaatttctctgcgatggcaatgcaataatcattcagttcgtctgaaagttctttatggagtgagccggcaagtgaaaccttgaaattcggatctgcttcacggataatcttcagtgctttcaacatatcgggcatggggcgttcgtccatagcgatgtgcgtaatgtcaaaccagcctttggattttaagtgagcagcaaagtctttcagcatacttaaccataggtcgtgataagcctgttctcccggcttggattttaattctttcatgctgttggtggcttggtcgaaatagaggaaagacagtttccagggaatcatggaataacatccgatctccttttttattcccatatctatcatgaactccacccatttgtcgaagatcgtgtagtcgaaccaccagctgccgtctattttccgaacccaagtgatcatcgtttcgtatggatcataagtttgtccgccccaagggtgatgcatgatggggacggtaatcacttttccgcctgcatccgcgtatggttgcagttctgtctttaagattctgaagtgttcctccgaccataaaggaacctgatgataacgggccactgcaaatgggttttgccaaaggtccagatggaaagcccattgatcgggttgaggcaatgtgcgttgctgaacctgtatggtcagttttaacttcccgatcacttcgtgattattctttataagtacatcggatgaataattgccgctaattgcatcttcaggaatccagacgcgtatccagtatccttgagaggtcttcgcttttatcggtaaagcagcggcgagatggtcgatagggtcagctaccagtgtggagtcgaattgtgacaagtccggtcggggaccgcaagtacctttttggttcttgttcagttcatctgtcatcacatatctgacaaaccctttcagaatacggtctgccgaaatactttgtttaccggaggaatgcgtcaggggagctatttctacggaaacattatccaaatcgatagcggaagaaactaccaactgtgcggcgactctttctcctttccatcctttgatatcaatctttttctgattgagatgtggatttacctctttcttatatcgggtgtaagtgtctccccatgcacaacgagtgccggaaaggtctttccaggattcctcgtccgttggagccggatttttgagttccgtgtactgtgtcaatgggaaaggagcttgcgaggttgactgcccggaatgggtaactcccatcgggatttgtccgttcaggcttcccagactgcaaagtccggagaagatgaggacgatagcttttactctaatgttcatacgagttgtttttaataggtgattaaaggaaatatactttagtttgatttaattcagaagaattgggaccgatgccgatggtaaagcttccgggttccagtaccttttccattttattattgtatatgctaaaatctgcggaaggaatagtaaaacgaatctccttttcttcgccgggctgaagatggatggaagcaaagcgttttaattccttttctctcggaatgacggtagccacttcgtcacgtatataaagctgtacaatttctctgccgactacggaacctgtattcttgatttttatccgtacagtgacggaatctccccttcggtattctgttttatcggtaacgggagaggaatatttgtattgcgtgtaactcagaccgaatccgaatggaaataaggctccttgcggtatgtcggcgtggtgtactgtgtaaaaagttcttctggcattataaacaataggaatctgccccgcatgtctggggaaagtctgcgaaagtttccctgagggattttcgatacctgtcagtaaggctgctacggcttttcctcccatagtgccgggataccaggcttctagtagagcatcgcagttcttgatgacttcatccaatactagtggtcggccgttgaataacactacgatgatttttttcccggttgtcttcaatgctttcagcaatctcatctgctgatctggtaactcgattttggcggttgaaacagcttctccagataagttggacggttctccgagacaagctataatgatttcatttttttgtgccaaagcacaaacatccgacaaataggccggtgtaataccggagaagtcacaagcccgtacatcaatcgggatatcagtacgtaaggctttgaagccttcttctactgtaattacctctttgctgtctcctttcatattccaggaacccagcaaatggtagcgtgtattggcgaatggaccaactagtgctattcttttagaatcggataagggaagtgtgcgatcttcattttttaagagtaccatactttgacaagccatttggtatgcgtcttcctggctttctttagaataaagtgtctgcttttcccgttcggtattaaaataggcgaatggattatcaaacagtcccaaccggaatttcagttctaaggcacgggcggcagcgcggttaatcagttgctccggaactttctgtgttcttaccagctccggcaggaattcgataaactgtttggcactcatatccatgtctattccgcttttgatgcctctttcagcagcttcttgttcgttgtcggcagctccttccgtcaccgcatgttgaaaagttgtccaatcggtcattagcaatcctttgaactgcatttgtttacgcaacacctcttcattcatgaaatagttcattgtcagcggctctccatcgtaggaggtatatgcgcacatgacacttgctactcctgcattaatggctgcttgaaaaggagggagataaatttcctgaagtttgcgcagagatacgtccgtttcttgatagtctcttcctgccatgactgccccataaccggcaaaatgctttacgcaggcagcaatcgtatgagggcttgtcaagtcgttcccttgaaaccctcggactcttgcggcagccagttctccgcacaagtaagcatcttcaccggatgtttccataatacgtccccaacgaggatcgtatgatatgtcaaccatcggtgcgtaggtcagttggatacctgctgcagcggcttcccgcgctgccatagcagcactttgttctactaattccggattccaactacacgattcggctagtggaatgggggtaatggtgcgatatccgtgaatgacatcttcatgaaagactaaaggaatacctaacctgctatgtttcagagcctcctcttgtagagaacggtttagttccgctccattcgctttcaaaaaagcgccgactttccctgcacgtatcagagatcggcagatggagtcgtctttcgtataataaggtattaagttcagttctgctattttttcttcaagtgtcatgcgtgacaatagatctttcacccgttgggggacggggatggattccttttgataaggataggattgtgcaaggcataccgaaaacacgtttcccacaaggaatagtgttataaagataaacttgttcatgtttaaagtctgttatgagttaaattaataaatattaccgcagacttttcttatttatacagacaaacaggggatgtggaaacatcccgaatttaattggagaagagaaacacgttgcaatattaggaataatattcgaagtacacaagtaaagcgggcaaagaatttgaaagggaaaatttgttcgttactttatttatttataatattgcggactttatcatccaataaagccctatttatatgctagatactgatgaaaaaacattcgagaagctctttagggagcattattcccttctatgtaattatgcgaatagcattgtctgtaatgagcaggcggtagaggacattgtacagaatttctttattgccgtctgggagaagaaacacttatctataacggaggatacttttcttccgtatgcctattgtgctatcaagaacagttgtatcaactactataagtcagagattgccaaagagaattttttcactgtgctggcggaggaatggcaattacaactgcaagaagaagaggagttcagatataaacaggaggtacatgccgctcttcagaagttaccggaaaaatgcaggaaagtatttttgctgaagtgtgtcaccggtcttcgttataaagaaatcgcggaaatttccgatatttcggtcaataccgtgaaataccatctgggagaggcttttcgtgtcatgagggaagaactgaaagacctgatgatactattaatattaatttttagctgattgtgcctacccattttagggaaagcaattgtcatagtaacagaaagataaaaagaaaatgatgaaacaggaattgatctatcaagctattctttctacattagctcatgaggctaccgatgaggaacaaaagattgttgacgagtggctgcgtgagtctgaggaaaacagagaggaatatgaggggatgcgtcgtatgtatgagaaagcgacggctcctcgtaaacccaaacaatttgatgcagaccgggcttggaaacaggtggccgaccataccatatataaaaagaaaagttggtatctgtctatgtgggtgcgctatgcggccgttgtagctgttgtggtggcaagcggattgttctttatcacagattggttccgtgcggacagtctggatgggatagacatgatggcttacaatgaacctaccctgcttttggaagggggggatgagattgatttgagcgggcggtcctttacgatgaagcgtgatcaggctttgataaagaacgatgcggacaacttgctctcttatgaggcggaaggcgggacggataaagcgaagattgttcataaccgcctgattatcccgagaggaaaaatgtacagactggtgttggaggatggcacgaaagtatggctgaactcagaaacggaactctcatatccgagccggtttaccggaaccaagagggaagtaaagttattgggtgaggctttctttgaagtcactcctgacaaggaaagaccgttctatgtaaaggcgaacggaatggatatacgtgttctgggaacttctttcaacgtaagtgcctatcaagatagcgagagtacgagtacgacattggtggagggatcggtagctgtgagcacggccaatggtgcggaacggacaataacgccttccgaacgattggcgtataataagaaaagtcatcagttatctgtggagaaagtggatactgaactttatacttcctggatcaacggtgtatacatctttaagaatatgcctttagaggaaatattggagaaactttcccgatggtatgatttctctgttacctatcaggatgaaacattgaaacacacccgtttttctcttaccgcagaccgaaaaacggatatagacaaactcttggaagtgataaactacacttcggatgttaaattggagaaacaaggaaagagtattaatgtaaaaaaaaggaggatagaatgaagtaagaaagaactgtgtcacgaaaaaacaaaatagagcctatgctgaccttgattaagatgaaatggatagtgatgttgttcctgctgctgtatacggcaggcagttacctgcattgcgctgttctctatggggatatacttgctcaaaagtacactattgtgcttgattttaaggatactccggtagaagccgtactggacgccatcaccaagcagactggaatcaagattgcctataataacgaggtactcgaccggaagaaaccggtgaccgtcaagatagagacatccgatattttggaagcgttgtatgccgtattgggcgacagctatatctgtcggcagattgatgactatatcgctgtttccaaacggccaaaacctgtttcgggcaagattgccggtaaatcgccaacgatgacggaagctttttcttccgccatcgttagcggcttgattacggatggagacggaaacccgcttatcggtgtcaatattctggtgaaagggaaaagcacaggtgttgtttccgatttatacggtcgttatcagattgaggtgacggaaggtgaccggttggaatttcgttatgtcggatataatagcgaggaaaggatcgtgaggaaggtcccggtcattaatgtgcgtatggtggaattaccggttgggctgggagatgtggtggtagtcggatatggacagcagaagaaatccagcgtcgtttcgtctatacagacattggaatcgcgagatatgaacgtgaaacaacgtaatctggcaaccaatattgccggacggattgccggtgtgatttccgtacagcgtagcggcgaaccgggaaatgacgaagcggagttttacattcgcggacagagttcgtatacgggaggaactaacccgttggtactggtggatggtgttccccgtaatatggaagatatcgatgtagatgaaatagagacttttacggtacttaaagatgccgctgccactgctgtttatggagctgaaggggcaaatggtgtcgtgctgattacttccaaacgcggaaggccacagaagactctcgttaatttcagcgcacaatatgccattgccactcctttcagaatgccccggtcgttgggtgcctgtgagtatctgtccatgtataacgaggcggtgtggaatgatcggggaaatccggataaagatcattttcagccggaagtgaccgatgaggttatagaaaaataccgttcgggagcggataccgatttatatccttccgttgattggactgatttgctgaagaaacacacccaaagccagcgttatacgatcaatttcaggggcggttccgagaaaacacgctttttcgtttcgggagcttattatacggaagagggaatctatcgttcaaatcctattgaggactatgatgccaatattgacttgaagcgttttaatctgcgctccaacattgatatgacaatcacaaagactacccaactgtccgtagatttgagcgggcagtatgtgatgaagaataatcccggatatagttccgaccagatattttcgtacataacccatagccctactcacgttattcctatgtattattcggacggaacagcttctatttacagtaatctaggctacggacacgacaagcagccttacagtatgctcaatcatagcggatataccaagacatgggatacatatctccagtcgaaggtttgtttggagcaaaagatggattttcttcttccgggcttgttggttaaaggaatgatggggtttgatgcggacttcggagcctcgacgaagagaaccaagtctcctaaaacttattttgcgttgcgccggaaagaggatggtactctggagaagaaaacgatggaggaggggactgccttgagcgatcctgtcaagggagagacttcgggagccaaaaggatttatctggaggcttctctgaactatcagcaacgctttgcggacaagcatgacctttccgctttgtttctgtatatgcaaaaagagacccagtaccagcaggaagaaggattgttgcggcttccctatcggaaacagagtcttgtatcgcgtatctcatacgcttatgatgaccggtatatcgtagaagccagcatgggagctactggcagtgagaattttgcgcagaatcatcgctgggggatatttccggcagtgggaatagcctggtatatcagtcatgagaaatttatgcagggggtggaaaacagcttgaccaagctgaaactgagaacgtcttacggaatagcgggtaacgacaatgtgttcagccaaaatggtggattagtgcgttttccgtatcggggacaagtcacgacagacggtcccggatatgatctcggactgacgcccggtgccggtggcggagtgtccaattgggtcggtggggtgtacgaacggagctttgccagtccgaatcttagttgggaaacggaacggaagttgaatgttgggttggatgtcggcttgtgggaaggcaggattgatttttctgttgactattttagtaaccgtagaaaagatattctgattcagcggcagaccatttccgctgttacgggtttccggaccgggatgtatcagaatttcggtattacgacgaataaaggggtggatgcaaatctcattttccgacatcagtggggaccggtcggtctttctgctcgcggaaatgtaacgtatgcaaggaatgaaatcattgaatgtgatgaaattactcctaaatatggttggatgtcacaagtgggaacctctattggtcagcaatctctttatattgcggaggggctgtatactccggatgactttgatgtgacggaaaggggagacggttcccggacttatcaattgagggaaggattgccgaaaccttcggcaaatgtggctccgggtgatatcaagtatagggacttgaacaaggatggcattatcgattcctacgataagacctacgacagtggattttactctacgggtataccggaaattgtatatggattcggggtgaatctttcttggaacggactgtttgtcggggctttttttcagggagtgtctcatgcgtctgccagtctgatagcttctcctagtaatatcattccttttacgtcgggcagggacaatggttccgcccgcgatattatacgtgaccactggtcggctgaagcacctttcaatcaaaaggtgttttttccgcgtcttcacacaggagcgtttcagcacaatcaattgcctagtacctggtggatgcgtgatgcggcgtttctgcgtctgaagaacatcgaagtaggttatgaattcgataaatcggtactccagcgactgaggatggagaatctgcgtgtctatgtgcaggggaataatgtagcggtgtgggacaagattaaatattgggaccctgaattgggaaatgctaactcgggagctaaatatccgttttgcaggaactttactgttggtttggaaatcacttattaaaacggaaggtcactcattaaaaacagaaaagtcacttatttaaattaagggaaggaaacaagatggaacgaatttggaagaaaatgataggggcgctcggttttacgctttgcatggctttggcggcttgttccgattatctggatgtctcgaatgagatcgcggagtcgttggatctggaagcggtattccgtaatccggcatatacacggcaatggcacgccaatctttttaattgtatttccgaatattcatgtaccggcggtaacaatgccagtgggttcaccaatgtctggtcgtctctttgtggtgaaacgttgataagcagcggaccttcttcccggctgatggaagccggttacaattcgagtaacgctcccctccatcgctggtgggtgctttatcgggagatacgtgacgcttttattttcttgaaacgggtaacgccgttgggagcggtggaagatgagcagcagttgacggaagaaagtgtacgccgtatgaaagcggaagcgaagttcttgattgcctattcctatttttccctgtttgaactttatgggccggtgccgttactgacggaagaggttgatccggaaagtaaggatttgaattttccccgggctacggtggatgagttggtggattatatcgatcggctgctcgaagaggtgattcagtcgggcgatttgccgcctacattgattaatgctgccatccctgacgggaatgagcggtataatttgaatgagattgtccgtcctacccgttcggcagctattgcgctgcgcgccaaattatgggtatatgctgcttctccattgttcaacggaggatatgcggaagctttagaagtgaaaaacaatgatggagaatatttgtttcctccttatgatccggaaaaatggaagatagccaagaagcgcctcgaagaggtactggaagatgcggaagcttgtggatacagattgtacaaggtttaccaaaccgatggctccatagatgccgaccgttctgtttatgaggtgtttcaggcttataatgatgagataatctgggctaccggacgaaactattatcacaccggaagccaggatggtgtaatggaggagaatacgactccgcgtgacctctataaaggatgggcgcacgtttgtgtcactcaagagtcggtcgatggttttttcatgaaggacggactgaccattgatgatccgggcactggatacgatgaaagcggatttacggaggtcgtcaatccgtgcaacgatagaaaacgtaccgataagaatatctttacgatgtatgccgacagagaacctcgtttctatgctgctgtcacttatgaggggaaaagctggcatatacagccacgtttcaattatgactggggagccggttttgcaaaaggggaaggaagcgacaactcggttggcgattatcctcgaaacggatatttgctttataagttcaagaatcgtcagattatgtacaccggtgattatatcaagaaatgggcacgtccgtccatcttgttccgtttggcggatttttatctttattatgcggaagtctgcaatgaaattgatcccgaagacgaatgtgttattgattatttggataagatacgcgagcgtgccgggttacttggatatcgtgagctggcagccaccgggaaaaagaatatcataggcgaccggaaattacaacgcagggctattcaacaagagcgcagggtagagctttttgctgagggacagcgtttcttcgacatccgccgctggatgatttgcggagaaggggaggatgccgaccagcgatttgtacatgggatgaatatgaacggagaaagaaaccgccctttgggtacagaccaatccttttatcgccggacactgattgaaaaccgcccctggaaacgggcgatgtatctacatccaatacccttcgatgaacttcaggtgaataagaaaatcgtacagaatcctctttggtagaattgctgaaacaataagaaaactccctccgttaccatctgtttcctttctcggtggcggaggaggttttcctcggtgccggactttctctgtgtaaatggtataaaaaatctagtcggttccgtaatccatccttatatttatattttcttgattgtcaacaaacctctctagagattgataacctttcttctgaaagcgcagtatctcccgattgccggtctttacggtgaaatttccccgattgtcacttttccctaacagtttgccggtcgttttctcataaatccggacttcggggatcaaggtggcctgcacgtctctgatgactccttgcacggttatctgccgttcacttttgggtagaacctgttcctgcctgttcacgaccggttgaggctgtcccactcggatagtcttccgtaagagaatatggtcggaggcagaacctacttgtatctcgaattctcccggttctacgatggcttcattcttctcattcagaatggtaagctcactgacaggaatactgagacggacaatttgagtctcgcctgcctggagagctaccttgcggaaatctcttaattggcgtaccggcatggcaaccgaactgcatacgtctgatacatacaattgcaccacctcttttccttcgcacttcccggtgtttttcaaacctatacgtacgtgaacggtatcgttgagcagataagacgctcgatccgtttgtaggttggaatactcgaaagtggtatacgtcagtccgtgtccgaatgaccatagcgggacaggagcggagaaaacataatctcttcccggtgagtcataactgccgggagatttgtagaatccacggtcggatcgtagatgattatagtagactgggagatgtccggtactttcgggaaaagagaatgtcagccgaccggagggagatacctttccgaacaggatgtccgctatggagttcccgctctgttccccggcataccattgtaccaggatagccggtatatttttcttttcccagggaatggcaaaaggcttgccggttactaagacaagaatgacaggtttgcctgtggcttgaaccgcttttatcaaggcgggttgtgctcctgtcaaggttaggtcgttgaggtcgaatccttctccgcaagtcgaacttttatagtcgcgtgccaaggccgcgctggcgcttccgcaaaaaagcacacagacatcgctttgctcggcggcctcgaccgcctgccggattccactttcatccatagataccaaactgcaacctttagcgtaattgactttcacgtttgtgcctgcccatttccggataccttgtaagggggtaactccgaaacggttgtcgcgtgtccatgtgtaatcaccgaattgtatctggtcggcgttcggaccaatgactgcaatcgatttcaactttccgatagagagagggagtagctgccgttcatttttcaataagacggtcgattcgtccgctatctttttcgatagcgctatcgctttcccggagtgaatagcccctttggcaaatttttctccatacggatcatcaaacagaccgatccggaatttggcatacaatacccggcggacagcttcgtccactatctcgcggttcagctctcctctttctatcagtccggggatggccggatagcagtcactcgaagcttctacatccagaccggcggtcagtgcctgcaaggcggcttcttccgaattgcgggctgtgaagtggaagttcttcagcatttcaatggctccccaatccgagtagacatatcctttgaatccccattcttttcttagaacatctgttagcagatagtgcgaggcggaattagggatgcggttccatgagttataggcggacatcacggcgagggtaggcgcttgcttcattaccatttcgaacggtttcagatagacttcgtgcaggtcacggatactggtttctacggatgcgaggttgaggccgcttaaagggttgccgtgcggaccatagtgtttcagcatgggggatatgccgttgtccatataccctttcacttcggctatgccgaatcttccgcagagataaggatcttctccgaaagactcttccactcttccccagcggaggtctcgcactacatcaatgcagggggataacacttgccgcatacctaccgcatggagctcgtcggcaatcatggatgttttgcgataggcgagatctgtatcgaaagtacttcctagagcaatgttctgcgggaagacggtggctccctcatgcactaccccgtgtaacgattccgctacggtaaagataggaatgcctaaacgagttttctcgaccatgaagcgttggatggctagcatattctttgcacagttttctgccgtcaggggaaacccctcaacgaacccccaactcattccctgcgctttttcttccaacttgcgttcgtccagcgcttgtccgttgaatatctcccaagaatggatatgtctgatttgagcgagtttctcttccggagtcattcgttgtaacaagtcttttacccgctcctcaataggtagatccgctctttgataaggtagtttgggtgaggctgttgctgatgaaaaggagactgctgatgatacaggcacttgcagagtggtgaggatattgattccataacgtcggtcgggcgaaatccaccaaggaatatctccgttggcgcagcggatagcaaagcgggaaaggtgttggagctgtcgggaaccgtcgggtatccataaaccgagtttataagtgccgttcgccgtcttggggagggtcacttgtcctttgattgtgtgaatcaaaggcgtgtaggttttatctcccggtcgataaggctggaaactgttggtatccgcattggtcaggaactctttcacttggttgtgttcgtccactaatacgaagtagacagggtgctcattgaacagcgtagagaagccacggtttatcaatgtgagcgaaaggttgaggatatggttatccgtatgcttgagtgtgtcgatttgcagttcttgcaattcgagacggtatcccagatgatcgcgcacatattcaaatgcgtttctttgggcagcactgccgtcgtgtttccgaaaatatccgtcagagacgggcatgtgcttctctttcaggtattcttcgctgatgggtgtttctttccagtacatcatggaatacttgtccggtgcaccgcgctctttgtaattgtggatgacgcttaatgaggtgtaatgctccaggaataattgtcgtgctgtctttttgccgtctatgatccagccgttcgcgtctccgttctctttgttcatgctccacgttccccaaggcagttcgccgtctacgggcatgaatgctccttcttctacaatctggtcgaagttgggcgtaccttcatgcatatttccgtcccatctgtgtgggtctactacgataaagtcgtcatggaaagaggttttccggtaggcttcgctatctttgggtaacaggttcttgtagtccggcactctgacttgtaccacccgatcttgaggggtcatccggcagatcttttcaaggataatacgtttgttcgcatcggaactttcgatattatgtttggaactgtgccattctccccatgcaccgataaatccggcttgaagagccagtatgacatctttgtttttctcgaggtaaggtttcaattgtttcatatggcgaaacatatcttccattgtgggacctgacgagacggttcccatcggttctgtttcgtaggcgaaccgtagcaatgctttcttgccaagttggcgcaacttgttgaagtagacatccattgtggcaaaagcttccggaggtagctgtcggcctatatatccatgcagataaaaatatgtttgaactaacgagacactgtcgcaagcgtatttgtttatctctgattccagatagtcggtaattcccggatattcctgcggtttccacacatcgcattttttagcgatgtctacggctatttccaggcggaaacctctttccggattatatattccggcagtgccgttcggatcgtcggcgtagataccccgatatggaatgcgggttgtctgtccggcaaataatacgggaagaagggcaagaagaaataaaattgtcaagttgaactttcgcatattaataaggattagataagatatgaatagaggtgagggtgtgccataatgagtaataattcgcattaatctgcattttgacacactctcgttctcctattgaataagatttctgttattctacaggtatcagactaaattcgtcaaaccagtaaataacaccaccccaagcgccttttccccagatttcgtgcgtgttgatgtctcctacataggcgcaaggcttgaatacgaatcgtataagtacattttcggggatatctactgtaacggagtatttgatccagccttttccggctttattgtcacaggtggccgcaagcccccaagtgggaccgggagaaagagactgtgaaccgtccggattgaaaatgatactcttctgattttcttttaataccaaaggtatgtcatcttctgtttcgcatacgacaatactaagtgtaaatggcgtatcgtcttgattggtcttaacgtaataactaaatgtatatctgccttccattacgttttgtaatgcgtatgacaggttaactttctctgcatccattatttccgtagcttcgtattttagtgagcgtgaactgttgttcgctccttcgcttttatctatagtcatattacaacttggagcgtccggtcggcagaaccatctgtcaagataattaagaattccactttgatcggttttgtcggcactgaagacaccgggttgctgatcttctgcaaaattcttctcgaagtttccgttctgaatgaggttatcggaaggttcttcctcctcgtcatcgtcatttcctttattttctttctcataataccggacatattccacctccatgtgtgcaggtagtcctctgtcgtcaatcggtcccggccatgcgtcctcaccgcctaccgaatagttgagaatcaggtaataaggtacatcgaacggccattgctgcatgagtgattcattcggaagatgcaggttcggatagctgaaagtctcttctccgttcaccgtaaagataatcttctccgctgtccattcaattccgtaaatattgaactcgctatcccgatattctccgtatccgttacggggaggattcttgtcataacctaaatctaatgtataatgcgtatgcaccgaatgttgtgcgatcttgtccatgcttacttgttccatgatatcgatttcaccgggataactattgtttactgatggatattgtcgttcttgcggcatgagccagatagctgcccatccaccttgaaaactagtaaacttggcacaaacctccagcttcccatatttgaaacctactttgtccatcgtccacacgccacctgtcttgtattcaccgtctttcttttcggctatcagatatagtttcccgtctttcacataagcttggtcgtagctttcggacatatagcgattccaaggagaagcctctttagctgccagtgaccagctttgggcattcggaatgttactttcctgttcaaactcttccgaccacaccagattccatccgtctttatttttcgatatctctttcacgtgctgggtatagatatttatttcttcggattggcaggatagaaaactaatccagaagactaaaaaagcaatgatctgtttcatattgtctcacttttagttgattaaaaaagggggagtggagggagtatgattactcccaaccactattttgtgttaagttaggattcttgtaaagttctgtttgggcgatgggatacaagtacatcttcctgtcccatatacgtgtctggatttttgtgcgggtataggtgtacttacttcctcgcttggtgattttaatcccatagatatcttttactacgtccccgtccatccaacggcaaatgtcccaaaaacgatggtcttcgaaagccagctctatccggcgttcgttgcgcaagcgtttggtgaaagcttcaccggtgtcctctataggtggcatattggcagcagcacgtacctggttcaaggcttcgcgggctgtgagtctgtcgctaaccttataatccggaccgcctaattcgttcatggcttctgcatagttcaacaatgtttccgcataacggaataagatgaaatggtggggttttgttaccgggtcggtcggagagagggataccgtttcgttcatgtttttcctcaagtaatatccggtcagtgtagcaccattgagaggagcaccgtttctgccgccttcgtaagtctcgatgggggtattcatgaatgaacttccattgtaaagaacggttttatagaaacgagggtcacgttttgagtaaggccgtgcggcatgtttcgggttattccaatcaaacggcttgccgtcggacatttcgaaagcgtctaccagattttgtgtgggcgtgcttccactgttcccgttttcgaagccgataggcagattcagtccttcgaacgagttgcttgcaccattgcggcgttcgaagatgagctgcgaagaactaaggacgtcatttcccccattcacattgtaaagcgggtctacatcaatatttggcaaagagtaccaattctctttgataatatcataagcagcttcggcggctttttcccatttgcttttctcaccggacggattgtgtagtttgctggcagcatagagcagggcgcgtgccttgacagacaatgccatgccacgtgttacccgtccggactcgttgtaaaaatccttttgcgagacgggtaatgccggagccacttcgctacattctttggcaatgaactcaattactttgtcgaaaggagtctctgatacggtgttgatctcgtcaattccgtaagtacgggtcagcagcgggatgtcaccgtatcttttggctagttccaaatagtagaaagcgcgcaatgcacgtacttcgttcacatacatcttggccttttccatgttttccttgtagttgggattccattggaaacgttctagcttctccagtgaatagttctccagaaaagaattggcggcacggatggcggtataatagttaccccatacgtcgtctatgggattgagtggactccaattaccgttatagatgtcgtacacactgttgctgttccaggtatatacggcattgtcggttgccgcatcccgtacagcaccgccgatggcgccgtaatcttgaggcagttgggaataaatgtaggttgccaggcttgagatattctcgaagtaggtgtacatctcgtcctgtgtcttaccgatggattcatcgaaatccagatagtcgcatcccgacagggaagtcactatgcaagctattgtgatatatttagttattttcatacaatcaatctattagaatttgatactcgctccgaaatatacggagaacatatccggatagttaacactgaaatcttcgcagttcatgtatttcacatggtcgatagagaacacattgttggcgcgggcaaaaatctggcactgttccagtttgacttttgagatccagcgctgcggcaggttgtagtagacgttgagattgcgcagcttaaagtaatcaccgtttaccagccattgggtactgttgcggaagttattgctgttgttcagcgttgtcagacgcggtacattggcgatgtctctcgtttcctccgtccaccggattttgtcgtgcagataccagtcggatacattggtgttattgcgcaatggccaatatacactgcttacattcatcattctgctgtagtcggccactccttgaaatagagcgtcaagaccaaatcccttgtattcgaacccgagtttgaggccataatatatttccggtacggaacttgaatgtccgatgggatgcacgtcgttgtcgtcgatgatccggtctccgttcatatccttgtatttgatatctcccggtcgcacttccgaaaacatctgttgaggactattggcgatatccgcttcatcccggaaataaccgattgcttccagaccgaaaagctgtccatcgggaagtcccttgccggaaagatagtcgtagggaatatatccttccccgttttctattacctcagtccggatatagttcagcgtaccacccacgtagtaagtgaagtctttgccgactttgtctttccagtcgattcccaagtcaatccctttgtattcggtcttaccgttgttctgttgcgggatactgataccgatggcggaagaaatgacattgctgccgcttaccggcattttgctccttttatccatataggcgtcaacggacaggttcagtcttttgaataaccgcatctccagaccgatgttatatttgtcggacacttcgagcgtcaagttattcatagccagtttgtcctctttcataccctccgactgggtgtttgcgtcaccaaaccaataggctccaccccatgcccagtattggcggtccagttcataactgatgttatcccatccggcgcgtccgtaagaagcacgcagtttcagatagtcaatgacggtagccttcttcatgaagttttcgttggagatgacccaagcggctgatatggcaggataggtacggaatttgtctccgtcgggcagtacacttgtccctgtgtgattgactagtgcgtgaatcagataagtgtctttgtagctgtatccggcggaagcattcacatacatccgtttgtgggcattgttacgtccgattcctctctccgattccaggcgatacgaacctaaagcgctgacggcatgtttcccgaaagaacggttatacttcaaagcggcttccagattggcgtttatgtattgttccgtcatgtcgaggttgtttacttgcaaggtactgttgtcaccatacactttggaatccgcttctatcttgtctgtgattacatttctgacaggcgtattgacttcatattggaatttcttgtagccttcttccttgtaaacggcattgttatcatacgctacggcggcttccagacttaatcccggagtgatgagtgacaaatcctgccggatgcggaagtcggcttgcaacgttcgcgggttttctttgaaataaccgatatctgcgatacgggctatcggatttgttttcagtacattattactcccccaatatccattagacgtctgcatggggaaagcaccggatggtgtgttgaaaagcccggcgaataagtcatactcacttgtattcggacgtttccgttcgcggagttgtcctaacatactgaattgtgccagagtcgtcggtgtgatatctacgtcaatgttcatccgcagtcccagttcgtatttcctcatttgagcggtgtagcggtcggaatatttggcgtatgtttcattcaggataccgtagtcgttcttgtaacttaacagggtgaagtagcgaagacgtttgccacccccgtgaaaggagatatcgagctgattgttgatggtatgtttgcgcagcccctctttcatccaatcggtgtcggcatataaatcccggttacttccgtttctgaacgcgtccagctcttcacgcgtgtattgtggttccagtccgtcgtaataaagcgcttcgttcagtgccgacgcatactcgtatccgttggcgaacttgggttggttgattggaaaatccataccgaacttatagctggcatctatttgcattttggtgttgtactctcctcttttggtggtaatcagaatcacaccgtttgctccccgtgttccccacacggcagttgcggcaccgtctttcagtacggtgaccgattcgatttccgctgtgttcagataagagagcggacgtgcgaatccgtcaactacaatcagcggattattatatcctcgcaaaagagtagctgcatcgtctgtccaccccgtctgctgcatgactgacagtcccggtagcaacccatacaatgtattggatacattgggagttgcattctttgatatttcatcggccgatattgtggagacggcctgtgtctttcgggcaatgctgtccgttatatcctgcgctcctgcgacgacggaggataatatggcaacccccattagtatatatttacgtttcatacgttctttcatttttaattagtcttttgttgattgtttattcccatcccggattctgtacgagtccgtacttcttgttgatttcatccaatggaataggaatgaggaagtagcggtctgtccaccgttttatccagccgcgagggttggctatcttgttatcccttacataatcgaagcttccatcttcattcctggtgataacaaggcgttcgatgtcggttttgaataggtcggaacgtttccaacgtaccaggtcaaaataacgtacctcttcaaatcccatctctacggcacgctcgtggaggatggcttctctcaaaggcagtccggaagctactttctgattggtcaatgctggcatttttacccgttcgcgaaccagattgacataatcataagcatctcgcccgaattcgtctttctctgttgctttccccagttcgttcatggcttccgctatattcaggtagatttccggaaggcggataagcgggcaggagtagaatttgccgccgacttccgtactccggtctcgcaggaatttgcgcataccgtaaccgttgtaagtggctctggccagttcgtccgaatatccgtcacattgttcccgtccgcctttgtatatttccaaagtacgtcctctgaaacggtcaccgttgacgaaaagggtttcatacaggcggatatcccggatcggattgttatgctcgtcaaagaaaggattggcatacttattcggttctcctaaagcgaaatcatcccagttgaaaggagttccgtcggccatttcgaacatatccgcatagttggaggtggcgccacccataccataaatgagttcgttgaaagcatttccccatacattgtaagtaacccaacgatgagaggcaagcagtacctcgccattgtaacggtcgaaataggcggagataaagtcttctctggggtttcccgtgttgacgagtttataatattcgttgttttccttattggcgcgcagaaattccagtccggcatccaaagcattttgccaacgagtcttgtcgaagttgccataccacacataatgcttgtcggccgcttccccactcatgaaagggtctttgttattgaatagagggcttgctacaaattggagcattctcgatttcagaccgagaacggctgccgctgtcattcgtccttcgtcggacgcagaaacgttccatggtaaaacctgtacggcttctttcattagttcgagggtcttttgtacggtctcttccacagtcatacgggtgaatttcatctcttcatccgggcggtaagagcggtctacccatggcattccaccgtagtaacgcaacatttggacgtagtggaaggcgatgatggctttagcttccgccttgcgtatcgttttttcacggtctgtcatgtccggcacacggtcgatattctccagaaagatataggctttgcgtatgcccgtcatgggtgccatgcctacggtagggccatcctcagcaggcggtacatccagacggtagggcagagaacctacggaggaggcattgacgtctcctgcatgataagcacgtataccgccgggtttggaagtgtcaccgagatcggtcatacactctagtgtcgcccaagatagtcttccgcctgtggggagaaagtcgggcaaggaacggtagatttccgctaacgcttgttcggcatatactttgcgtgaaaatacggtgtcgatagtgacatcggttgtaatgggcttgtcgagaaagtcattgccgaacttgaagtcctcgcatgcactgacagaaagcagtagcatggctgccatgccggtatgtaatatattccttcgtttcatgatattgatgttttaaaaggtgatgttgactccgagattatagatcttgttgatagggtatgaatcggtcagtcccggcgtacattccgggtccataatcttgaacttatcgaatgtgagcaagttgtaaccgcttagtttgatggcaagttcggagataccgattcttttcaaggcagccacgttgcggaagttataccctagtgtgacggtcttcagcttgagatagttaccgttctttacccatagcgaagaagtcttgctgttgtgagtcatagtcttcgttgcaaatcggggcacagtagcggtttcagctgtctcgggagtccatcggttgtcggcatggaattgcatcaacgcattgttggaattgattccgaaaggtatccggaagaactcttccaacagaagtgaacgctcggcggctcctgtccagttcatgctgaagaagaaccctttgtagtcggctccgtaattcagaccgaaagtataggacggacgtgtaggatgaccgattttgcattgatcatcttcattgatgacgtggtcgttattcaagtctttgtatttgatgtcacccggttgtacatctgcgtcggggacgggcagcccgtcttttaatgctccttctttcgtgaagtcctcttcgccgtagaatccgtcggccacgtatccgaagatacttcctaccggttgaccggtacgccataggtaagtttcgttcggctctatctcgtcctgaaagataatcttgtttttactgtaagatacattggcattgatataataatggaagtctcctttaatccggtcttcccattttatatcgacttcgtatccatggtttttcacctgtcccatgttgaccacaggcatgatgttactgttcagatcagtgaagatgggaatggtcttccgcttgatcagaatgtctttccgattctcgaagaaaaggtcggcactcactttcagacgattgttcaggaagttgacatcgataccgtaattgtgttttaaagctgtctcccaactgacgttcggattgccgatacggctttcgatagctccgaacatcgtgttactgttgttgtacccgaagttgtatccgtgctggtacgctccccaattgtcgacgacattgcccagttggtcaactgtccatccgttaggcaggtagaggaaacggttgtcgttcatattatcgttccccaccaaaccgacggaagcacgcagttttaaataatccactaccttttgttttttcatgaacggttcttctgaaagtacatatccgacagaaccggccgggaaggcaccaaaccgcttgtcgggggcaaagttttcggaaccgttgtatccgaagtcaaattccgcgatataccgggttttgtaatcgtaggtcagtcggcctaccaaaccgacgtatgccgtcggaacgtccgtgaattcggaagggtagtatcttttattctggttgtagagcaataatccgcctacattatggtcgccgaatttccgattgtaacgaagactcgcttcaaaataccaattgcgcccccgataggtcttttcggcatagcccagccgtttgttctgtccgtctacccggtaaacgatggttttgttataagcaggatctttgatatccaaatcgggattctccagttccgattggtagtaaggagtgtacgattcgacagaaccgtgacgctgctgcaggaaagagtaagaagtattataggcacctttaacctctacggataatccttttgtaataaagtccagcttctgtgtcaatgacaagtccatattcatggtattgctggtattcctgtcgtatccttgtccgtaatagcgtgccaatgcattattgttcatcaagataccttcatactttcccggattgatggtgacgagctttccgtctatgattcccggactgttgaaaggttgtgccatgttgatgagcgagaagagaccatattcataattattgtcattaggctcatgggtgataccgacgataccaccgagtccaactttcaataaagtgcttttggtaatgtccaaatcaaggtttccccgataattgtaacgggtatagttaaagttgttattgtagtccagttccttatattgccggaaaagtccgtcctgccataagaatcccatagagataaagtaacggacacgttctgttccgccacttatgttaaggttatgctgggtttggatagaagaactcttcatgatatacttccgccaattcacgttgggatacatgatcgggtcgtcaccgagtcggaaacgttccaatgtatattcgtcgaaagcgtgcttcggctttttgtcgttatcattcatctcattaaagagttgggcataggtgtaactgtccgccatttccagaatccgtgtgggttgttggataccgacagaggaagaaatggatatcttggcttttccttcctctcctcggcgggtggtaaccaggattacaccattggcaccacgtaccccgaatacagccgtagcggaagcatctttcaggacggtcacactttctatctcattggggtccatctggaaaaaggaacgttctactccgtctaccaatatgagcggagccgaagcactttctgtcaatgaacctactccgcgaatgtagattgccgggtcttccttgcccggttgtccgcttgtggcgacggaagaaaggccggtgatttgtccggcaagagacgtagcgatgcttgcattgggagagcggagcaagacatccgttttgacagaagagatagctcccgtcagagtctctttcttttgagttccgtaggctactaccattacttcattcaacgcgttggcctcttcctttaggataactctgattctggtttttcctttgagagggattgtctgcgtctcgtagccgacataagaaatttgtaatactgccgtttgggcgttcggtacacttaacttgaaattaccttcggagtctgtaatggttcctttctgactaccgacaagtaagactgtggcaccgatggccccttcgtctctctcatcccgaacattaccggttacggtaacttgagcaaacatccaagatgttatgaatagcatagccagtaacaatccgattcgtttgccttttgatgcatagtttttcatggtgattaaattaattgatttgtaacattaacagttatggggttcgaaatgggtaggggaatcaaaagattttttttggaagctagcttcttttatctatctttgtttcgttaacgaaaagctgaatagatgagaaactgctaaaatgagaagactggataatacaataaacactagtatgccatttgatgatatctatctagagtattatcaacgctgctgtctcaaggattacctttcctctttcctctttttctaacttttttcatttttccactagtgaacttcgtgagtggcgtgtcttatatatgtaaggcggaaaactgctgatattttaattcaaaaccgtatggacacgaaactattaaataaatatattgccggtgatgtacttcccgaagaaaagaaggaagtggtacgttggctgaaagagaacgaagaacaccgtgagcagttgatgcaactacgccatatctatgatgcgactgtctggaatgctaatctgaaggaagaaaaaccgggaaagaaaaagaccgtgactcattatctccggacctccataaagatagccgttgttgttgctatgtttgcctttattcttcataaagaatatcaggagtaccggttggaacattctacagagatgcaggtgatgactgttcccgcaggacaaagagccagtctggttctggctgatggaacaaccgtttggttgaactcgaactccattttaaaatatccggctgccggattccactccaaagagaggaaagtgattttggagggagaggggtattttgaggtagcgcgtgatgagaaacatccttttattgttgaaacggagaaatataacgtcagagtgttgggaaccacgttcaatgtttccgcctatccggattccgatctgtttgaaacctctttgatagaaggtaaggttaccgtgtatcaacccgatacacagaatgaagtcacactgcaacctaatgagaaagtagaaacgagagatgggaaactttgtaaggaagcctttacgtcagatcatgctttcttgtggaggataggtgtttattctttcaagaatgaaccgttggaagctgtattcaagaaactggagcaatattatgaagtgcggattatcaataagaacattgaaattgcctcccgtccgtgtacgggtaaattccgtcagaaagaagggatagagcacgtggtaaaggtattgcagaagtatgtcggcttcgactatactttggatgaagagaacaatcagataattatctattaaccctagtacttaatctaaaaaacacagaaaatgagagcaagagaaccggcccgtccagaacagaaatatcggtaagtgctgcaacacttaccgatatgtgagaagtcaacaagaaagactcgcatctgttacaaatctttatgtattaacttaataactcgaagcaaagatatgaaaaataatctttagtgtgggtgtattgcccatagaaaaacacactgtactcaaattttaagaattatgaggttgactgtctttttcctgttattcatcatttttgaggcgtattccgtgaatagttattcgcaaaatcagaaggttagaatgaataaaggaatcgcaacactggctgagattatcagacagattgaaaagcaaacggactatttgtttatttacaacgaacgtgaggttagcctgaaacgcaaagtggctatttccactccgaacgggacggtggcaagtctgttgatggatgcgttgaaaggtacggagttctcctacacgatggaaggaaagcacatcattcttacgaagaagcaagtggagggacggactcccacacaacacaagaaaagaataaccggactcgtgaaggaaacttccggtgaagttgttgtgggatgtaatgtgaccgtgaagggtactacgatcggtaccattaccgatataaacggtaaatatagccttgaagtgcccgagcatgcaacattggtcttttcttttttgggatataagagtatggaatatccggtgaaagcgcaacagaacatcaatgtcacgttgagtgaagattcaaaagcattgaatgaagtagttgtggtaggctacggaacacagcgcaaggcattggtaactaatgctatcagctccttcaaaccgacagaatcgaatatgcgtccggtgcttagcccgagcgaactgttacagggacgagtagcgggggttacggtatcgacaggttccggcaacttgggaagttccgaacggatgagtattcgtggagccgcctcattgagcgccagcaatgaaccgctttatgtagtggacgggatacctattctcaacagcaacgcttctctatttaacatgggagagaatctaagttcgatggcagtgttgaatctgacagatatcgaatccattgaggttctgaaagatgcggcttctgccgctatctacggatcccgggctaccaacggtgtagttgtgataacgaccaaatccggtaaggaaggccgttcggacattcgtttgaatgtcagtacgggtatctctaaatttgccaataaaggacgtatcaaatatgcggattccgacttgtacgtagagacctataatgacggagtggaacgctacaatcgtcagaacggatataccgtagggacttccggttatgtcgttcctatctcaaatccttttcagggaatgccggatacggactggttggatctgattactcaggtagggcattcttataatgtagacctgtctttctccggtggcagcaagaaaacgaagttttacgttggagcgaattacaattatcaggagggcattatcaaaacgaacgatataaccaaaatcaacttgaaggcgaaaatcagtcatgaaatgacttcatggttggaagtcggcgccaatgttagtggcaattatttgaaaaataaccgggtgccgggtgccaatattggttctactatcgtggcccgtgctgtggaacagcgtcctttcgaccgtccgtacaagccgaacgatgactattatttgggaggaaccgacgagctgacgcgtcacaatccgcttcagatattgaacgaggaagtgtcctatattgacacgtaccgttatctgggtacattcaacgctgacctgaaatataagaaattcagcttgaaaaactccgtcagtaccgatatcggatatacgtatgactatgtttattataatgagaaccatccgtatggagccggtggcggacgtatcgttgagtacaatcgtctggtaaagaacatattgatagagaatatcttcaattataatgataagttcgttgacattcagttacactttcccgcaagtgatgttgcagaagatccggatgaaaggacttcgcctgtatgttcagggggataacttactgttgttttccaaatactccggttgggatcctgaagtgagtaagaatatggatccgcagtacttcggagtcgatctttacggagtgccgccttcccgttcggtcaatttcggaataaaccttagtttctaatcataaatgctcacaatgatgaaaaagattatatatatatttatcggttgcctgttgctgacttcgtgtagcggtatgctggatattgagtctcattccgcagtatcgccgggaagcgtgacttcccaagatctctccgctttgcgtatgggaatgtacaataaggtacagaactctccaacgagggaatcttacattacttttgatatattgggcggtgacttgacgcaaagcactgggaatgcgaaggacttgatcaactcagtgctctcttcgttgaattcaatcgtatccaatagttggaatggatattataatgccctttatcaggtgaataatgtactttctatcgtcgaatctctccctgaatcggaactgcggaatctgattatcggcgaagcgcattatttcagggcatacatttatcatgcactggtgactcgttggggtggtgtccctattcagaaagtgaatacgatggaaaagcctttccgcgattcggaagaggcggtatggagctttatcgaagaagaactgcagacggcacttgcctttctcggcacatcgtccagctattattatgtgtcccgtgatgcggctttggcatatgataagtccggcagcagggtattggctgccgtgaacggtgatttctttgcaaaggatggaacaccgcaaggaatctactaccggaatggtacttgtctgaaaggtacgatgactgataacgtttgtactttcttcgccattacgaaaaacaagagagcgatcatcggctcgtatgatgaatatgattcgtacaaagagaatattcaggaagctgtgggagggcgtgtgcgtctgatgacaaacgggaatgtgcttcctcagacggtaaccgcattggaaccgagaaccgctatcggagtgacggatgataatgtggtctatatcctcgttgccgacgggcgtaacttctggtactccaacggaatgagatatgctgaaatgggtgcggtgatgaaggcgttaggagcaaagaacgctatcaatctcgacggaggaggttcttctacttttatcatccgtaagattgccggatttgaggacgggcgttttgccatacgcaactggccttatgataatggtggagtagaaagggaagtggcaaacggactgctggttgtgactgataattgattgtttgaattttaaatagctgaatatatgatactaaatagaatactatctttgtgcggacaaagctgtatcggaagaatcgggcttttgtctttgctgataggtttgtcgggttgtcaggattttacggatgatacgggtatgactctgccggaaccggacttgaaatttgtggatgaggcattgaatttgcctttggatgaaaaggaatatacagtggatatcgaatcgaatctcccttggagggtgaagacttctgcggcatggattgacttgctgacctctaatggactgaaatccggaagcttcaaaatgtcggtgaccaagaatacggatgtggcctctcgtgaagccgaaatatccgcttggatcgtggaaggtgctgaaataaagttgaaggtggtgcaggaaggtattggcattgccttgaagaagcgtacgttgaaagtgggagctaaggggaacgaagaagaagtgattccttttgctacgatggttgcttatacgtatgaattgtcggaaggctgcgattggatacacataaccgatggtgagccgatcactcccggtgttgtgaacgaatcggaactgaaacttaaaatcgatccttataaagatgtggaagacggccgcaccgcttatctgtatttgaagggctcgaacggggtaaccgatatgctgaccattactcaggacaagaagccgttggaagatattgattatttgaggatgttctatgagggggcgaacggagataattgggtgaagaagtggaactttgacgctcctttggaaacgaatgcgactcattggccgggtgtgaaatttgagaatgggagagtggtacagattgatattcaagaaccgaataacattgtgggagatatcactccgttatgtgaattgtcggaactgaaagtgctgaagttcaagcgtcaaaagataacaggtattccggaagagataggacatttgtctcaattgacaaatttgtggattattgaatcagcggcgggtggcagtttgccggagtctttgggggaatgtcaattattgaccagctttaatatatccaatcatccgacagcaactcccgccggatttgaaaattcttttagcggaaatctggatccgttgattaagattccgggcattgtcacgattaaagcatattgtaatgatctgagtggctctcttccggtgattccgttagatggcagtaataaaccgactacttggaaaaacttgatggaatttatggtctatgacaatggattcaatggaagtatcccttatggatatggaattgtgatcgagaagagtggttctaaagggatatttagagtaaatgataaccagttgagcgggcaaattccttcggatatcaaagcttggtcgcagtatgctactcgaaaaaaggactggatattgaaaggcaataacctcactgaataaaataacttaattgatttattatacttaacacatttattaatctgtttatgatgaaaagaaacttgttactcggcattgtcttggctgtatgctctttgggaatagtaaaagggcaaactgtatcggattcgctggcaatcgtatctgcgcaatggaagatagaaagtccccaaaaagggattatccataagtatgtttccattcctcaattatatcaggtcccccaatctatcagcctgatagaaattgatcccggtgcaggattgaaagtcggtgtaaccgtctcggataagatgagagaaacaagtagaatggcttcggaacagggcgctatcgcagctataaacggttcttactttgatatgaagcgagggaactcggtctgtttccttaaagtagaccgccaggtggtagatactactactttgggtgagtttgcgagacgtgtcaccggagccgttagtatccgcaagggaaaaatgaagataatctcttggaatagacagatagaaaagcaatataaagggaaaaaaggtatcgtattggcctccgggccgttgatgttgaaagacggtcgctattgcgactggagtttatgcgagaaagactttatccggactaagcatccccgtagtgcggtagcccttaccaaagacggaaagatactattcataaccgtggacggacgtttcccgaaacatgccggaggggtaagtatcccggaattggcgcatctgatccgaatcctgggaggcaaagatgcgatcaatcttgatggaggaggttctactactctttggttgtccggtgcaccggataatggaatcgttaactacccctgcgacaataagcgtttcgaccatcgtggagaacgtacggtacctaatatcctttatattcacgactaacatatttatgactaaccttttttaatatagatataaaatgaaagacaggatgacaagacctatgaggcctgttttgttcgggctactgctagtctgcgctacattggcatacggagcgcaggcgccgaaatacatatttttatttatcggtgacgggatggggttcaatcatgtggaagcttcgcagatatatgcggagaaagtcggtacagataccggtgagcgttcactactgttctctacttttcccgtgatgacacaagtgtgcacacggtcggcctctcacttgataacttgctcttcggcggctgccacagctttggcgacgggagaaaagacgactaactatgtaattttatgatgctagagggtggcaagatagattgggcggctcatgcccatgatgcggctacggttgttacggaaactatcgactttgaccaatgtatccgcctggcttatgaattctacaagaaacatcccgatgaaaccttgattcttgtaactgctgaccatgaaaccggaggtttaggattgggaaattctggcacaaacttgaatatcgaattgcagaaataccagcagtgttcgcaagaagctttggccaatgctatgcggaaaatgaaaagtgctgttgccattccttcttgggaggagatgaaatttttcttgaagaagaatctgggcttttgggaacaaattacgattactccacgtgaagagttggaactgttgatatgctatgagcagcagtctttcttgaagaagaaatcaaaagatatagtgagcctctatgctaaagatgagccgttggcggtggctgcggtcgccttgctagataaaaaagactctattgggtggactaccaaatctcatacaggcgctccggttcctctgtatgttgtagggaaacaggctcatttgtattcgggcagaagagataacacggatatggcgaatatcttgaggcggctgtttaacctcaagcagtgggaagaataaggtcttgctgtgcgaaaaagagtggggttttatgtagccgggtagtcgtcaccttacaaggggacaatggtcactttgtagaatgacaatagtcaccttataaagtgacaaatgtcattctataaggtgactacctattttcaaacggacgtgagtcctaaagatacaaaattaattggtgaaaagcaatagtggggcagtaattttgatagtattatcaacagatgtttgcctttgtaatgtttgggctcattttcgcaaatcccgtccctcatacttgcatatcgcctctatccactcttttgtcaaggggatggattcatgcttttcgaggtcgaaagtcaccatgacggacttacagatacattttatttcattcgttgtggtgtcaatgacccgttggatgagatgaaagcttttcgtgcctatttgggagacagccgtttgcacagcgatgtggtctgaggcgaagatttgtttgacgaagtccgcttcgatgtgaacgacgacaattcccatcttttcccaatcgactcccggacatactgaggcgaagtattcagtctttcccaaatcataaaaagagaaataaacagtattgttgacgtgcccgaatttgtctacgtcattgaagcgcaactggataggcagagtgtggtgaaatacgatttcttccattgttttcacttaatctttttgaatttggcgcaaaagtactacttttgcgtgttattctcaacagaaattaatcaagaaatgatagaagatattaaaaaagcctgtcaggtgatgaatgaaggaggagtgattctttatcctaccgataccgtatggggaataggctgcgacgctactaatgaagaggctgtacgccgtgtgtatgagattaagaaacgtgctgatagcaaggctatgctggtgttggtggacagtcctgtgaaggtggatttttatgtacaggatgtaccggctgtagcgtgggacttgattgaagttgccgacaagccgttgacgattatatattccggtgcgcgcaatttagcgacgaacctgttggcggaagacggcagtgtgggaatccgtgttacaaacgaagaattttcccaaaggctttgccagcaattccgcaaagcgattgtctccacatcggccaatgtgagcggtcagcccggagctgcgaattttagtgagatcagcgatgaaatcaagtcggcggtggactatatcgtcggtttccgtcaagaggatctgagtcggccgaaaccctcaagcattattaagttggacaaaggtggagtgattaagataattcgcgaataaatgaaagaagaaaaattgagtttattacagcgttgtatcaagtggcgggaagcgaatataaaggaaaagcagtttatccttatattaagttttctggtcggtatctttacagcgtttgccgcattaatattgaaattctttatccatcagatacagaatttcctgaccgataatttcaacgtgacccaagctaactatttgtatctggtatatccggtagtcggaattttcctggcaggctggtttgtacgcaacattgttaaagacgatatcagtcatggagtcacaaagattctgtatgccatttcccgccgacagggacgcatcaaacgacataatatttggtcgtctatcattgccagtgcgataactatcggttttggtgggtcggttggggcggaggcgcctatcgtcttgacaggttccgctatcggctccaatctgggaagtgtgttcaagatggagcaccgtacattgatgttgctcgtaggttgtggtgcggcgggtgcggttgccggtatctttaaagcaccgattgcgggattggtatttacattggaagttctgatgattgaccttaccatgtcgtccctgcttccgttgctgatttctgcggtcacggcagctaccgtttcctatattactaccggtacggaggctatgtttaaattccacctcgatcaggcgttcgaattggaacgtattccttatgtcatcctgctgggtatcttttgtggtttggtttcgctttatttcacacgtgccatgaattcggtggagggcgtgttcggcaagctcaataatccctataagaaacttgctttcggcggtgtgatgttgagtgtgttgattttccttttcccgcctctctacggtgaaggatacgatacgattgagctgttgctgaacggaacttccacagccgaatgggatacggtgatgaacaactccatgttttatggttatggcaatctgctgctggtctatctgatgttgatcattctgttgaaagtatttgcctctagcgcgacgaatggcggtggcggttgcggtggtatctttgccccttcgctttatttagggtgtatcgccggattcgtcttttcccatttcagtaatgactttactttctccgcttatttgccggagaagaattttgctttgatgggaatggcgggagtcatgagcggtgtcatgcacgctcctctgacgggagtattcctgatagccgaactgacgggtggatacgatttgttccttccactgatgattgtatccgttagctcatacctgacgattatcgcatttgagcctcatagtatatattccatgcgtctggcaaagaaggggcagctgattacgcatcacaaagacaaggctgtgttgacattgatgaagatggagaatgtggtggagaaggattttgtagttgtacatccggagatggatttgggcgagctggtgaaagcgattgccgcttcccatcggaatgtgttcccggtaacggataaaaaaacgggcgaactgttgggtattgtcctgctcgatgacatccgtaacatcatgttccgacaagaactttatcatcgtttcactgttaacaaattgatgacatccgcacctgccaagatattcgatacggacggaatggaacaggtaatgcagacgtttgacgatacgaaagcctggaatcttccggtggtggacgaggagggacgctatgagggctttgtctctaaatcgaagatatttaactcatatcggcaggtgctggtacatttctcggaagactagactttgcgttttaatgataacatagttggattatgaagaaagaagacttaagaatagtatatatgggtactcccgattttgcggtagaggccttgcgtcagttggtggaaggcggttataatgtagtgggtgtgatcacaatgcccgacaagcctgccggacgcggacataaaatacagtattctccggtcaagcaatatgcgttggagcggaacttaccgttgcttcagcctgagaagttgaaagatgaggcttttgtggaggccttgcgcgaatggaaagccgacttgcagattgtggttgctttccggatgttgccggaggtggtctggaatatgccgcgactgggtacgtttaaccttcatgcttctctgcttcctcaatatcgtggagctgctcccatcaattgggcggtgatcaatggtgacacggagacaggaatcactacgtttttcctgaaacatgagattgatacgggagaggttattcagcaggtacgtgtgcctattgcggatacagacaatgtggaagtggtacatgacaaattgatgatgttgggaggggaactggttcttgaaacggtagatgctatattgaatggaacggtaaaaccgattcctcaagaagaaatggcggttgtcggtgaactccgtccggctccgaagatattcaaagatacttgccggattgattggaatcaaccggtgaagaaggtgtacgactttattcgtggattatcgccttatcccgccgcttggagtgaactggtcgcttctgaaaatgaagcggtagtggtgaaaatcttcgagactgaaaagatgtacgaatcacatcagctctctgcgggaacggttgtgacggatggcaagaaatatataaaggttgccgtgccggatgggtttgtatccattctttccttgcagcttcccggcaagaaacgtttgaaaacagatgaattgcttcgtggataccgtttggcggacggctgtaagatgaagtgataaaccttaaatatagaagaattatgaaaccgattattgctccttccattctttctgccgatttcggacaattggcgaaagatattgaaatgataaaccgcagtgaagcggagtgggtacatattgatataatggacggggtctttgtcccgaacatttcattcggctttccggtattgaagtatgtagcgaagttgagtaagaaaccgttggatgtgcatctgatgattgttaatccggaaaaattcatccctgaagtaaaggcgttgggcgctcatacgatgaatgtgcattatgaggcttgtccgcatttgcatcgggtgatacagcaaatccgggaagcggggatgcagcctgccgtaaccatcaatcctgctactccggtagctctgctgcaagatattatccgggatgtgtatatggtgcttgtcatgagcgtgaatccgggatttggcggacagaagtttatcgaacattcggttgagaaagtccgtgagctgcgtgccctgattgaacggacaggatcgaaagcgctgattgaagtagacggtggtgtaaacttggaaacaggagcccgactggttgaggcgggagccgatgcgttggtggcaggtaatgccgtctttgcagcaccggatccggaggcgatgattcatcaattacatgacttgtaattattgtatccatcaatatccttatatgcgcctggttatcccctggatagcaggcgttttttgtggagaacgctttttcgactgttcgatggatgttctttggggagtatcggtttccatcttcctgttaatcttggcttttctctttcatttctgtgagcattattcgcagcgttggtgtttcggagcagtcctgacagtcctgtgtttcgcgggcggatggacaggaataacttggcaactgcggcaaacacaatatacctttcctgacgatgacgtaatttatcgggttctgataacggatactccacaaccaagggagcgtacatcgctctgcagggtacttgtgaaagaatattatgattctatcggtagtcatccggtagagcgaaaagcgatactctatctgaaacaggattcagctgccgcctgcttgaagagcggggatgaattgttggtttctacacgcatttccccacctgctaatcagaagaacttcgatgagtttgattatgcccgctacttgatgcgaagaggtattagtgggacgggctatgtcgctgccggaaaatggataacactgcgttccgtacagacaaacggaacgattcatttgcgtcttcggtgtctggccgattcttaccgtgagaaagtgatagctctttaccgtcaattaggctttaccggagatgaactagccgtgctgtctgctttgaccattggtgataagactgaattaagcgaatctgttcgcgaaagctattcgatagccggcgcgagtcatattctagctctatctgggttacacatcggacttctgtatgcttttcttttctttattctacgacctgttgcccgaaaagggcggaccggcagatgtgtccgttccgtgtctcttttagtcttattatgggctttcgccttttttacgggactttctccctcagtagtccgttcggtcaccatgttctccatcctggcattggcagatgtattcggccgtcaaccattctccttgaatacactagctgtgacagcatggcttatgctgctttgtaatccggcaggactgtttgatgtcggctttcagctttccttccttgcggttgcctccattttattgattcagaggccggtttatcgcctgtttgctgtaagaaacagagtggggaagtccgtctggggactgatgagcgtatctattgccgcacagataggaactgctccgcttgtcatgttttacttctcccgattctccgtacactttcttttgacgaatctgctggtcattcctttgattactattatcctgtatgccgctattttcatgcttcttctgactccttttccttggcttcagatatgggcagtggtaggtgtcagaaaactgttggagggattgaacctctttgtgagatgggtggagcaacttccttgctcgtctgtcgatggaatctggctttatcaattggaagtttgcggtatctatgttttcctgttcggagcagtctgttactgtttgcataggcggcttagaaacctgttattctgtcttctttccgttcttttattaagtatttatcatgttacgatggtttggatagaccgtccgcagagaggtttggccttttataatgtacggggttgtccggcggttcattgcatagaaagcagtggagattcctggataagttatgcggacacgttaccgaacaaaaaagcattggaacgtgtgacagccaattattggaaacgtcggcatcttttaccgccgacggaaatcacctccgactgtcggactgacgtattttcccgacaacggcaacttgtatcatttcatggatgtaatatctgtattgtaaacgataatcattggcagacgttgcggaacaaatcgacgactcccacgttatatattgattatctttacttatgcaaaggctatgacggccgattgaaagaacttaccaaattctttcttcccggttgtatcatcttcgatgcctccctctcagagtatcgtagagactgttttaaggaggaatgcaaggaatacggtttacgttttatctccttatcggaagaaggttctgtccgctttttgctctaagtacaaagaattatcgtacatttgcaccttgataaagaaaaaaaagtatgttgacgaaagtaatagaacaagctaaaatagaccattttactaaatggtttgagcgagctgacaaaatagtaatagtatctcatgtatctcctgacggtgatgcaatcggttcatcactaggattatatcatttcttggattctcaggaaaagacagtgaacgtaattgtgcctaatgcatttcccgatttcctcaagtggatgccgggcagtaaggacattcttttgtatgaccgctataaagagtttgcggataaactgcttgctgaggccgatgttatctgttgtctggacttcaacgcgctgaaacgtatcgaagatatggcggatgccgtagctgcttctcctgcgcgtaaaatactgatagaccatcatttgtatcctgaagacttctgtaagataacaatgtcctatccgaagatctcttctacttccgaactggtgttccgccttatttgccggatgggctatttcgacgatatttctaaagaaggtgccgagtgtatctatacgggcatgatgaccgatacgggtggttttacctacaattccaacaatcgggagatctacttcattatcagcgaactcctttccaaaggcattgataaagacgatatctatcgcaaggtgtacaacacctattccgagagccgtttgcggctgatgggatatgtcttgtcgaacatgaccgtctattcggattgtaactcggctttaattacactgacgaaagccgaacaaagcaagttccactatataaaaggagatagtgaaggctttgtcaatattcctctcagcattaagaacgttcgcttttcctgctttttgcgggaagatacagagaaaccgatgattaaaatttccctccgttcggtcgggacttttccgtgcaatcagttggcagccgaattctttagcggtggcggtcacttgaacgcgtccggaggtgaatttttcggaacgatggaagaggcaaaagctgttttcgagaaagcgcttgagaaatataagtctctattaacagccaaaagctaaaggtggaaggttaaaagtgaatatggaaaggttaaaagatacgaactttcaacattgctctttcaacttttaatgattttgagatacatttgtgcggaatatagctaaataacagataatgaagaaacttgtatttttatttctctctttgctgactgccggaagtctgttccaggcgtgcgatgattcgaagacatacgcggaaatgctggaagatgagaagaatgcggtaagccagttcatcaaagatagtgcgattcatgtgatttcagtcgaggaattcgaaaagaatgatacggtgacgaaagcgaaagcgaatggggacgcatacgatgaattcgtgtctttcactagcgagggaatatatatgcagattatagaccgtggacgtggtgatgataatggtggagaatatgcggacgaggacaaagaaaaagataagttcgtagacggtaatatcgtttgtacccgttatgcggagaccaacatcgctacacgcgaacttgcggcttttaatatacctatggaagagtatatggacgcttcacagctgtatgcctatcctgccgtattccgttatgtgaagacagacacttattcagccggtacattcatcgaaatggactatgtctggtcgtcctattacgccagtacggccgtacctcaaggatggcttttggcattgccttacctgcgtgacaatgcccacgtgcgtctgatcgttccttcaaagatgggacatacttctgctcaacagtacgtaactccttacttctatgatatcactgagttccgtaaagcacgaagctagaaacactaacatttaaataaatctttaagtaaagaacctatgactctaatcaaatctatctctggaatccgcggaactatcggcggaggagcgggcgaaggattaaatccgctcgacatcgtgaaattcacctcggcttatgctactttaatccgtaagacttgtacggtaaagagtaacaagatcgttgtgggacgtgacgcccgcatctccggtgaaatggtaaaaaacgtagtagtcggtaccttgatgggaatgggctgggatgtagtggacattgacttggcttctactccgactacagaactcgctgtaacgatggaaggcgcctgtggcggtattattctgacagcttctcataatccgaaacagtggaatgcactgaagttactgaatgaacatggtgagtttctgaatgcggcggaaggtaatgaggtacttcgtatcgccgaagctgaagagttcgactatgccgatgttgatcacttgggctcttatcgcaaggatcttacctacaatcaaaaacatatcgacagcgtattggctcttgacctggtagacgttgaagctatcaagaaagctgatttccgtgtggctattgactgtgtaaactcagtaggcggcatcattcttcccgaacttctcgaacgtttgggtgtgaaacatgtagagaaactatattgtgaacctaccggaaacttccagcacaacccggagccgcttgaaaagaatctcggagacatcatgaacttgatgaaagggggaaaagcggatgtggcatttgtggtagaccctgacgttgaccgtctggcaatgatttgcgaaaacggtgtgatgtacggtgaagaatatacattggttactgttgccgactatgtgctgaagcatactccgggcaatacggtatccaacttgagttctactcgtgccctgcgtgatgtaacccgtaaatacggtatggaatacaatgcttctgccgttggtgaagtaaacgttgtaacgaagatgaaagcaaccaatgctgttatcggtggtgaaggaaatggtggagtgatctatcctgccagccattacggtcgtgacgctttggtaggtatcgctttattccttagccatctggctcacgaaggaaagaaggtaagcgaacttcgcgctacttatcctccttacttcattgcgaagaaccgtgtcgatctgactccggaaattgacgtggacgctattctcgctaaagtgaaggaaatctataagaacgaggaaatcaacgatattgacggtgtgaagattgacttcgcagacaaatgggtacatttgcgtaagagtaatacagaaccgattatccgtgtatatagcgaagcttctactatggaggctgccgaagaaatcggacagaagataatggatgtaatcaatgaattggcgaagaaataattaatcgcctgccttatagtagaaacgcggattaacgcagattgtcgcaaagaagagttacgatttgcgatgattgcattggtccgcgttttaatgtttggttgtcaaaccataaatcgatgccttgagtagggtaatcataactttcgaacagacatagtaagtgttcgttgctgcttttcaatgtagtttccgcctgtgttttttatccgaagaaacaattacttggatagagaaggtataagagagactttctgcaattcttcttcgaagttgggagtgaaaatccctttgcccagattctcttttatttcttcaactgtccagaaccgtccgccatccagttcgtcactgggatgaatttctccgtcataaacggtcttgtggacaaagacaagctccttttcacgttcggactcgaatacatagctggtaagccgttcgggagtgaaatctgtgatacctaattcttcatttgcttctcgactgagagcgatatctacgctttcacccaaatcaatatgtccgcctacggctgtatcccattttcccggttggatatctttccattcgggacgcttctgtagatacaagtctccgttggcattgaatatatgaaggtggacgaccgggtggagcaacttgctgccgctatgacattctccgcgtgtagcggttccggtgatatttccctgctcatctacgatagggaacatttcttggttattatcgctctgtgccattgtttttgtattcgggggattatggtattaataaagaagagtctccataactaaggaaacggaaatcgtggcttaaggcatagtcgtagatcgtccgccaattgccttttacaaaagcggaaaccaaaagcagcagggtactttgaggctggtggaaattggtaaccatcgcctttacgattttataatcatatcccggtgctatgataatctgagtactggtgtgaagtgtttccatgccgtggcggtcgagataccccagtattttctgcagggcaactaccggaggtatctggtcgtacttctcgtaaggttgccattgtctgacgtgtagttcctcttccgttgcgtccggattctctgcgagagtgactccgatatggtaaaggctttcaagtgttctcacagaagttgttcctacggcgacagcacaaccgtcatggtcgatcagtttcttgatggtactccggttgactgatatgtattccgtatgcatctcgtgaccttcaatctcttcactctttacaggtttgaaggttcccgcacctacgtgcagggtcagttcttcaagttcgattcccttctcttgcagtgcatccaatacctgtggagtgaaatgtagtccggcggtaggggcggcgactgatccttttatcttcgaataaaccgtctgataagtttctttatcactctcttccgtattccgattcaaatagggtggaatagggagttctccgaatacttcaagaatatcggcaaaagtaacttccgcattattccaggtgaagtctacccaatggctggtccctctgcattctcctctcgttgcggtcagagtgatgggaaatcctttcactgtcatttcccgtttcagttccccgtctttccatttcttcagattgccgatcatgcacagccatgcggcgtgttccgtctgctggaagttcagtacataatcattgggctgaatcggctcaaggcagaacacttcaatcaacgcacctgtttctttccgaaaatgaagacgggcctggatgactttcgtgttattgaatatcatcaggcttcctttaggcaagtagtcaggtaaagaagtaaaaatgtcttcgttcacttcaccgtggcggtagatcagtaatttggactggtcgcgaacgggcaacggaaacttggcgatacgttcatccggcaacggatagttgtattcactgattcggatatgtttcggatcttctttcattactatagggctattcttgataaatacgggtttattgttccaaatgtgttcctctaaaaaataaatcagccacttactgtttgtaaatggctgattctcaatgtcggggtgactggattcgaaccagcgaccacacgccccccagacgcgtactctaaccgggctgagctacaccccgaattgcggatgcaaaagtagtgctttatttttaattagcaaataaattctttgaattttattgtgcggtgattttttttgtgcggttttaaatcttttcttatgtttggtagaggataaatgaggtatggcaggtttaaagtgtcgaggtacggataaacaattcaccagtagttttgtttatgaattaatgtaaataacaggtatattatttctgtagaataataccataattccactgatagtgctttggtataaggggatgttatacatttgtagaaaagactagtttagattagaaaggcgttaaatgttagacattaataatacagagacattagagatatatgttttgggtgatgactttaaattttaccagaatctaaaataccttcctctgacttcctatccttccaatatccaatctgctttgattgtatatagtttgaggggaaaagcgaaacttactgtacatgaggacgtacattggatacagccgaaggaactgataatactgttgcccggacagtttgtctcatttagtgatcctagcgaagatttcttgactgtaacaatggtcatatcatcttccttgtttagcgatgcgttaagtggagctccccgattttctccacattttttcttttatatgcgaaaccattattggtattcgcagacggaatctgatgttcttcggatctataattttctggggatgataaaaggaaaagttacatctcaggatatatatagacgggaactgatagttcatctgctgcgatatctgtatctcgagctgttcaacgcttatcagaaggaagctactttgaagactgataggaaagatatacgtaaggaagagttggctaataaattcttcgagcttatcatgaagcattttaaagagaataaggatgtggccttttatgcggataaactttgtatcacttccaaatatctgactatggttatcaaggagacgagcggaaagtctgcgaaagactggatcgttgaatacgtcatattggaaataaaaacactgttgaagaatacaaatatgaatattcaggagatagccattaggacaaattttgccaaccagtcttcgctaggacgtttcttcagaaaacatacgggaatgtcgctttctcagtatcgaatgtctcacttgggctaagggaattaaattcccatacattcacggtaaaagtccaacatttcaaagatggtatccttatcggcagtctggttgatacagatgtctccgatgtctttcaataatgtgaaattaattgttcctgaagtattttttttgtcatgtgtcatgaatgcgtatagttgttcatatttcttgcagtcgaaagtgaatactccataattgtctttgataaaccggattgtctgtctcattttctctttcggaaaaccgactttagtatgggacaggtacaattcacatacaattccccaggcgactgcataaccatgcagtaccggacggttttccgccaatgccatgctttcgaatgcgtgtcctaccgtatgccccaggtttaatgctttacgaatgttacgttcgaagggatcctgttccactatttcttctttcacttgcaccgacttgccaaccagccttttgagagcggcatagtcgatattgatggtatcgaaactgagtaactctgcccaatgttctacgttgctgatcaaaccgtgtttcagcatttctgcatatccggaaaagaagttatgcgcatccagtgtgcgcaggaattctgtttcgagtagcacactgttggccggaaaaaatgagccgatctcgttcttcagtccgttgaagttgattcctgttttaccgccgacagacgcgtccaccatagccaatagggtagtgggtatattgatataagcaataccacgtttgaaagtggctgcggcaaagccacccaaatccgtaaccatcccccctccgagattgataagcagagagtggcgggtagctccttgcgtgcttaatgccatccagacggaggcgagtgtatccaacgtcttatgtacgtcttcggctccgatacatatttcaacagcctctttcagcaatgatgtttcctttagggaagggagacagagagagcgggtatgctcgtctgtaagaatgaataatttgtcgtgcggacactgttcgatggcacggtgcaggcttgtttccaagctttcacagagaataacttcttgtttactcatgattcttttgcttttctgtctgcaaatgtatataaaattatcttttttgcttacttttgtctcgttaaaacgttcaatcattcaattatgaaagcattattacctgtctattgtcgtcctttgggatatgttgtcttgttggtagctctgttcattccttttattctggtgatgcaagggatggtgaccgacagaaatctgttgttttataaagaatgtacaaagttgctgatgatggcaggatgtttattgataatctttgcttttagtaagcatgaaagtcgtgaaacggtgcagattcgtaattcggctgttcggaatgcgatctttctgacgttcctgtttgtctttggagggatgttatggcgcgttatgcaaggagatgtcatcaatgttgatacttcttcttttcttactttcctagtctttaatgtgctttgtctggagtttggtctgaaaaaagcgctcgttgagcgattctttaaaagataattatcttcccgattaaaccttttacgatcttatttgtcaaaagagcattgctattgctactaatataatcgtaaataaggtaaatgaaaagattttcagtcgggttggtgttgctattgctgagcaccttctctatttttgcacaaaataaggtgattactgtttcgggacgtgttgtagagtccgactcgaaagagccggcggcacaggctacagttcaattgttgtcattgcccgatagcgcttatgctgccggtattgccagtaataatcaaggttggtttactcttcccaaagtgaaggccgggaaatatcttttgaaggtatcctatatcggttttctcacaaagtatgtacctcttcatctttatgcgaacatgacggaaaagcgtgtggggacgatagcgctggagtctgacgctgttatgctgaaggaggcggtgattactgccgaagctccccaagtgactgtgaaagaagatacattggagtataattcctccgcttaccgtacccctgaaggagctatgctcgaagaattggtaaaaaaacttcccggtgcggaaattgacgatgaggggaatgtcaagatcaatggtaaggaagtgaagaagattatggtggatggtaaggaattctttggcggtgatgtgaaaaccggactgaagaacttgccggttaacatgattgataaactgaagacgtatgataagaaatctgacttggcgcgtgttacgggaattgacgatggagaagaagaaacggttctcgacttgaaggtgaagaagggaatgaaccaaggctggtttggaaatgcgagtgcggctgtcggtacggaagaccgttatgggagtaacttgatgttgaatcgttttgttgataacagtcagttctccttgattggttcagctaataatgtaaacgatcagggattttccggaggtggtggaccccgtttccgaaacagtaatggactgactgcaaccaaaatgttaggagtcaactttgcttcccagtcggagaaattggaattaggaggtagtgcccgttataactttagcgaccgtgatgcgctttctactaactattcggaacgtttcttgcagaatggaaattcttactcgaactcaaatagcaagaaccgaagtaaaaatacgaacttcaaagctgacttccgtttggaatggaagcctgatacactgaccaatataatctttcgtccgaatttttcgtatggaaagtctgacagttactctaaatccgagtcgggaacttttaagagtgacccattcaatttggtatccaatcctaatgactttctggataaaagtatttggaatacgacggatgatcctttggatgatatccgtgtgaatgccagcaatagcgagtcttcgactgaaagtaatagtctgtcagctaatgcttctttacaagtgaacagaagattgaataatcagggaaggaatataacttttcgtggcacatttagttatggagataatgatagtgaacagtttagcgagtcgttaacacgctattttgatacggcagcgggaaaatcggatgatgaacgtaagcagtatataacatctccgacccaaaattatgattatacggcagaactgacttataacgaaccggttgcaaaggctacttttttgcagttccggtataagtttcaatacaaatatagcgaaagtgacagaagtacgtatagtctgcttcccgatgctgataaaggacaagactggatttggaattatggtgatggactacctgaaggttacgaaagcaataaggatatgagtctgagtaaatatgctcagtataaatattataatcacgatattaatgcggggttgaacataatccgtgagaaatatcggttgaactttggagtatctttgcagccacaaaacacaacgttgacttatagaaaggatgatgtggatacgattgtcaaaagaaaggtgttcaattttgcgcctaatatcgatttccgttatcgtttctctaaggtgagccaattgcggtttacttatcgagggcgtgctagtcagccaagtatggaaaacctcttggatattgaagataactcaaatccgttaaatgttcgtagaggtaatccgggactgaaaccttctttttctcactctatgcggttgttctataatacttataatggagacaaacaacgtggaatgatggcgcacgccttccttaatatgactcaaaacagcattaccaattctactacttataatcagacaaccggtggggtgacagtaaaaccagagaatattaatggtaactggaatgcaatgggtatgttcggatttaatacggctctgaaggataaacgttttactatcaattcgttctctcttgttaactatactaatgcagtggcttatctttataacgaaagtacacaggtgaatgataagaacacgagtacaacgttgactttgggtgaaaatctgaatggaactttccgtaatgattggtttgagtttactattaacggttcgatcaactataatttcgaacgtaatgagttgcgtccggagaacaatcaggagtcatatacattcggatatggagcaagcaccaatatttctttgccttggagtatgacattgtctacaaacataaccaacaatgcacgtcgtggctatcgtgacgccagcatgaataagaatgagcttatctggaatgcgcagattgcccagaacttcctaaaaggtaatgccgcgacaatcagtttagagatatacgatattctgagacagcagtccaatatcagtcgttcgttgacggccgatatgcgttccgtttctgagtataatggaataaacagctactgtatgcttcgtttttcttatcgtctgaacgtctttggaaataaaggagctcgtggcaatatgcgtcaaggcggatttgacggaggtggtcatcgtggaccgcgtggaccacacggcggtggaccgggacggatgatgcgtttttgaggataagtgaatacagataaaaaggaagtcccggtgtaatgaacgagagttgttatcgggacttttttgtttatccgataaattactctatatttgttgcttagtatccgcttttagaagagattcttatgatagattggaattacatacttggtcagattgcaacggtggcttttgatattctctatttcggggctatcatcggtacgattgtcatcattatccttgacaaccggaatccggttaagactatggcttggatactgatcttgctttttctgcccattgtaggtcttgtcttttattttttctttgggcgcagccagcgtcgcgaacggattatcgggaggaagagttatgaccgtcttctcaagaagccgatggcggaatacttggcgcaagattgctcggaagtgcaatacgaatattcccgtcttatccgactattccagcataccaaccaagcctttccgttcgaaggaaaccgggtagccgtctatacggaaggttatactaaacttcagtctttactgcgtgaattgcaaaaagcgaagcagcatattcacatggaatattatatatttgaggatgacgctatcgggcgtatggtcagagatgtattgatagagaaagccatgcagggagttgaggtacgggtgatttatgatgacgtaggttgctggcatgttcccaaccgcttttttgaggagatgcgtaatgcgggtattgaggtgaggagcttcttgaaagtccgctttcccttattcacaagtagggtgaattatcggaatcataggaaaattgttgttatcgacgggcaggtaggctttgtaggaggaatgaatctggcggaacgttatatgcgcggtttctcttggggaatctggcgagacacgcacatcatgatagaaggcaaggcggtacacggtttgcagacggcttttctgcttgattggtatttcgtagaccgtactctgataaccgcttcccgttatttcccgaaaatagactcttatggaaattcactggtacagatcgttaccagcgaacctatcggtccttggaaagaaatcatgcagggattgaccgtagcgataaccggtgcaaagaaatacttctatatgcaaacaccttatttcttgccgaccgaacaaatattggctgctatgcagacggcggcattatccggagtggacgtacgtttgatgttaccggaacatgccgataatagaatcacccatcttggttcctgctcctacctagctgatgtgatgcaagcaggtgtgaaggtttatttctataaaaaaggcttcctgcattccaaacttatggtttcggatgatatgctttctacagtaggctccaccaatgtggactttcgcagctttgagcataattttgaggtgaatgcctttatatacgatgtgaacacagcacttgagatgaaggagatattcctgcaagaccaacgggaaagcacgcagatattcttaaagaattgggtgaagcgttcgtggagacaaaaagcggtagagtctattgtccgtttgttggctccattgctgtagcccgaaagatagagaagttcacgcttccatatactctcctttctacaaaatacggattttcctcaaagttattgtcctttccgtgctccaatactaataagcctccctctttgagtaaattgttttggaagataagttcggggattgtctccagttcctttaaagcgtaagggggatcggcaaagatgaaatcgaactgctcgcggctgctcttgatgaatttgaatacatccccgcgtatcggcaggcatttgtctgtcttcacctctttcattattttggagatgaacgcgtgatgagcaggttctttctcaatgctgattacacggtcgcagcctctcgatacaagttcgatacttatgcttccggttccggcaaacaagtccaatgcactgactccttcttcaaagtcgatataattattgagtacattaaacagattctctttggcaaaatctgttgtgggacgtgctttgaatgttcgtggcacatcgaatcttcttcgtttgtaaataccgctgattactcgcataagatcataaccttttataatgtattgaatatcactaatgaaaagccagtctcccctgcttggaagtaacagtatagtaacgacattgatgaatcagactgttttggtagacttttcatggtcaaagatacagattctttttgatatagcaatatatattgattggcgcttacttgttacattgaacacatttgcttactttcgcagaaaagatattccccaatagaatacagcccaagtctgacagtatatcaatcgcctgcctcaattgtgctaaaagaataacaccaaagtagaataagatggaacaactcgaagtaatacagagtaagatttatgatatacgtggacaaaaggttatgctggatagagatttggcagaaatgtatggagttgaaccccgcgct

SEQ ID NO: 11849 - DNA, 3314 bp, Unknown
  gut microbiota DNA sequence
gaaaaaacggaaatcaaagacggtcatacaaataaacatgggcattatgcgtgcttttgttgctgttcgttactgttaagtcctcctatcagtccggtacatgaactacagcgtgaagtcaaggaactgaaagagtatatcgaagaagtgttcgcagactacaacgacatcaatgacgacactcgtatgcaattggaattgataaatcagacattagccgaattgcaggtgcaaaaagcattggcagacaagccgcgtaatcctattggcttcattacccctaagaagaaataaaaaacagactgctttatcgtctctccgttaaccaccggttattcgcatgtcaataaggcctgcatatcaatattagtagcaggattcatgataaatacctgtaatataaacttttttagttcattcatcagagtttctttatccggaagcgtcccggtcagatgcagttcgtccctttcctgattgaactctaattgtttccagacatacaacagataataaatgcggtcctccgtatgcgtgcattcaaaagaattggctaaaagcagatgtccccgttcaaaacaataaatgtcaattgcttcccgatgtatggaaacgtacatctttttactgtttcccagcctgctcttgacggagaaataatcgatgagcggggtagattgagaatagaaatgggcttcggggtattgttcgctcagaaaggtatgtgcactcttgtccataccgaaaatgatagctacattattctttttgagaatattgcagatcaccgtctcgttttcccgtttctgatgattgtggtaaaatagaagttccgcctgttcctcttcaaacaactccagtggcacgatagtaaaacgcttatcagccatcatgatgttaacccgtttgtaggagtggtttagaaagtccgattcacggaaagtagctttcagattagcagtaagagacagggaagtatccgtctctttctctatcgtcgacagcgaattatcgtgaatcgggttatagatagaaaaagaaaatccatccgtactaagacggatggataaagtatattgttgtgatttagtaaaatcaatcattattcccagttaccggcaccattgttcggagtatcgatagaacctaccatcaaaccgcagtatctacccaatttgctctgaacatcttttaagttaatgatttcctgtttgtcaagaccacctagataagtttcgtacggagcttttacttcgaacaagaatacaggagcaccggatttagcggtatcattcctaacattcatttcgaactgagcaccgtttccataaggaatatatctcatagagtcaggattgaatcctttagggaagatagtatccataacggctacccacatagtatcacgtttgaaaccttcgagtccccatttcttgacttcgtcatatttacctgtcttcttagctttgttgatgatagccattgccttcttttcagtcagtccgtcttccaactgcttgtctgtcaacatacccattttcattacgaacggtagtttttgatttttaacgaagtcaatcagcgtatcaaatttgtctgtatacattccgtgattaagcgtgcggtattcctgctgcgctttacggatgtcaatcaaacgagcaatgactgctttttctctgtctttttttgcgttttcaaaattgataggacccatgatactggcgtagcagatgtaaaccaatgcggcagcacagagcaccaatacaatattaaatactgttttcatgataaattatgtttttagttgttatattcgcatcgcaaaaatagaataaatatatttaaatacgatagttcctcgaacttttttctcgtacaaaaatgataaataactatttagaaaggcaaattaaggaaaattttccttaccaaccaactttagagcaagaaattgctgtaaaatctctttcagagttcctgttatctactctggcggatgaagtttttatcttgagaggttatgccggtaccggtaagacatctctggtcggagcattggtgaaaacgatggaacagttgcagcagaagtctgtcttgttggctcctacgggacgtgccgcaaaagttttttcggcgtatgcaggccatcctgctttcaccattcataagaagatataccggcaacagtcctattccaacgagtttactaatttctccataaatgacaatcttgctacaaacaccttgtttattgtggatgaagcctccatgatttccaacgagggtctgtccggcagcgtgttcggtacgggacgtttgctggatgacttgatacaatttgtctattcgggacaagggtgtcgtcttttgttgatgggagatacagcacagcttcctccggtgggagaggaattgagtccggcactttttgccgacgcgttgaaaggatatgggcttgaagtccgtgagattagcctgattcaggtagtccgccaagtgcaagagtccggtattttgtggaatgctacgcagttgaggcagttgatagcggaagacgaatgttactctctacctaagataaagataacgggctttcctgatatcaagcaagcgcctggcacagaactgatagaagaattgacaaactgctatgatcacgacgggatggatgagacaatcgttatttgccgttccaataaacgtgcgaacctatataataatgggatacgtgcgcaaatcctatggcgtgaagatgaattgaatacgggcgatatgctgatggtgaccaagaataactattattggacagagaagtataaggaaatggatttcatagccaatggtgagattgctgttgtccgtcgtgtccgtcgcactcgtgagatgtatggattccattttgcggaggtcaccttgagatttcctgaccagaatgattttgaactggatgctaatctattattagatactttgcattcagattcaccagcattgtcgaaagcggataatgaccgtttgttttatactgtgcttgaggattatgccgatattgccaataaacgtgaccggatgaaaaaaatgaaagtcgatccgcactataatgccttgcaagtgaagtatgcatatgcggtgacttgtcataaagcacagggcggacagtggcagaatgtgtttttggatcagggatatatgacggacgagtatttgactcctgattatttccgttggttgtacacggcttttactcgggcaacgaaaacgttgtatttggtgaattatccggaggggcaggtggaatagctaatttgaat

SEQ ID NO: 11850 - DNA, 2445 bp, Unknown
  gut microbiota DNA sequence
atgttgtaaaacaaccattgaacaagattggtgctgctgagaagtatgacatcaaggttaacttgtgtggtggtggttttacaggtcagtctcaggctttgcgtctggcaatcgcccgtgcactggtgaaaatcaacgctgaagacaaagctgctcttcgtgctgaaggcttcatgactcgcgacccgcgttctgttgaacgtaagaaaccgggacagccgaaagctcgtagaagattccagttcagcaagcgttaatgggttgcctgacagaggaatatgtttagtatctaaactactgggactctgcttgcggactacccggcggttggtttagaaaaaacaaaaaagaaagtaaacgatttaaagaaaaacaagatgtcaagaacaaattttgatacattattggaagctggttgccacttcggacaccttaagagaaagtggaatcctgcaatggctccttatattttcatggaacgcaatggtattcacatcattgacctccacaaaacagttgcaaaagtagacgaagctgctgaagctttgaaacagattgccaaatccggcaagaaagttctttttgttgctactaaaaaacaagcgaaacaagttgtagctgagaaagctcaatctgttaatatgccttatgtaatcgaacgctggccgggtggtatgttgaccaacttcccgactatccgtaaggctgtgaagaaaatggctactatcgataaattgactaacgatggtacttatgctaacctttctaagagagaaatccttcagatctctcgtcaacgtgcaaaattggacaagactttgggctctatcgctgacctgactcgtctgccgtctgctttgttcgttatcgacgtgatgaaagaaaacatcgcagttcgcgaagctaaccgtttgggtatccctgtgttcggtatcgttgatactaactctgatcctacaaacatcgacttcgtaattcctgctaacgatgacgctactaaatctgtagaagttatcttggatgcttgctgcgctgcaatgatcgaaggtttggaagaaagaaaagctgaaaagatcgatatggaagctgctggtgaagctcccgccaacaaaggcaagaagaaatcagtgaaagctagactcgacaagtctgacgaagaagctatcaacgcagctaaagctgctgctttcatcaaggaagacgaagaggcttaatatataaatgtgccaatttgctaatgtgcaagagtatgcttatacacttgtatcttgattggcagattggcacattttttgtttaggaaattattattcatttaaataaaggaaattattatggctgtaagtatggctgatattaccaagctgcgtaaaatgaccggagctggtatgatggattgcaaaaacgcgttgactgaagctgagggcgatttcgacaaggcaatggagattatccgtaagaaaggacaagctgttgctgctaagcgttcggaacgtgaggcttctgaaggttgtgttcttgctaagactaccggtgaccgtgctgttatcgttgctttgaagtgtgaaactgactttgtggctcagaacgctgatttcgtgaagttgactcaggatattcttgatcttgctgtggctaacaaatgcaagactttggacgaagtaaagtcattgcctatgggtaacggtactgtacaggatgcagtgactgaccgtagcggtatcacaggtgagaaaatggaattggatggctacatgactgtagaaggtgtaagcactgctgtttacaaccacatgaacagaaatggcctttgcacgattgttgctttcaacaagcctgttgacgagcaactggctaagcaggtagctatgcagattgctgctatgaacccgattgctattgatgaggacggtgtttctgaagaaatcaaacagaaagaaatcgaagttgctattgagaagacaaaagctgaacaggtacagaaagctgttgaggctgctctgaagaaagctaatatcaacccggctcacgtagacagcgaagagcacatggaaagcaacatggctaagggctggattacagctgaagatgtagcgaaagcaaaagaaatcatcgctactgtttctgctgagaaagctgcacacttgcctgaacagatgattcagaacatcgctaaaggtcgtttggctaagttcttgaaagaagtttgcttgctgaatcaggaagatatcatggacggtaagaagactgtaagagaagtattgactgctgctgatcctgaattgaagattgttgacttcaaacgtttcactttgaaagctgaataatcaatcagattcaaattctatgatgtgtccttaaaaacggaacacgttaacttaatagaggtattcattaagattctctatttgaagaaacaagaaaggcaactgattcataacgagt

SEQ ID NO: 11851 - DNA, 14217 bp, Unknown
  gut microbiota DNA sequence
tcaccaccggacaaagtcaggacgtagagattatagacgaccagacgaatggatactttgtagaaaagtggacgaacctgaccgactcgaaagaaacggcctccaatacagctgatggcggagtaaatacagactatcctttattccgcttggcggatgtttatctgatgatagcggaagctttcaaaagaggcggaacgggaattgacgctactactgtagtaggatatatcaatgatctacaacaacgggcatacggtgataatagtaacaataagacagaagatgaaattaccttatctttcatcctagacgaacgcgcccgcgaattatactgggaaggataccgacgcacggacctgatacgttacagtctgttcacctcaaacgattacaaatggcaatggaaaggtggagtcaaagaaggtacaggagtaaacgatagatataacatttacccaataccaacaactgagttgactgccaatccgaatttatacaatgaaaactattaatcacgcttatacgtatcaacgatatgaaaaaaataaataacctactcactttacttttcgtcctcctgctatcgggagcgtgcgaaaaagacggagacaagttcttcctctccagtcctgaagaaagcgcattaatcgcttcggccgatgcagtcgtactgacagaagcaactgccaagctatatgccttgtcacttgcttggacagaccagactttgcaaataagcgatgcaaactatcaagcgactacccgagtacagactaccatacaaatatcacggtcggaagatttttccggaacaatcattgaatcaacagaaagcgggctttctaaaagttatacagtttctgcattaaatatcatcgcttataaactaaatgcaacagcagaagaggctgcgccactttatttccgattggcaggaagtaacggaagtaacattactcctgtatacagtaacacagtaaaagtgatggtgactccttatccgattgatatgcactatgccgacatcatcaacaaagaaacggtagctgactccggcaaagatttctattcagccaatgcagatggtcagtatctaggatttttcggagctgcagcttatgagggtatttatgtacaagaagccgatggaacaacttggcacacagctcagtccggtggtataggcactccgtttttactgacaacggatgcagctgacggtacatgggatatgtggtttccaggacaatctggatgttattttgtcaatgtcaatacagtcaaaaggcaatggaatgccttactaatacctcaactggaagtaagcggaattgacggtatcacaatggaatataagcgtgccgataatcagtggagaggtgtatttacaggtacagcaggaacagatgttaccattcaaatcaaaggaacaggtaagttctatgataatacgagtgttagtggatcagataatgggattgacgacagcaaagctcaaaatacctcgttcgcttttggcggaacagcagggcaattgacattcagcacaggtgaaaatgtaacagcagaaaacatcacagtgaatgtaccgatgacaggtgaatgcacgttagttattgacttgaataatccggaagcatggacggtcagtgtgacggaaaaagaagaagaacctgagcctgaaccagaagaaggagaatatttatatttaccggggataggtccagccgtcaatggagaatgggcatacgaccataaaattaccatttacgataaagacgctcagaaatatgctggagttgtaaatgtcgcttctgaatggggagattacgcaatgtgtctggttaattattgggacgagagtaaattgtacaccttagccacagacgacaacacaagcactgccgaaagcggagatttaatcaatggaaaaggaaataatctaacagctccagataacggtctttatttatttgaggtatctttgaaagagctgaaatatagtgtcaaagccgtaacaggcatctattgctacttaggcatatccggcaacgatgacctcccccccttacagtctactgacacagaaggattatacacagggactattacattagaccaagattccgaatatggtgtaaaattcataataaataatgactgggcaggatcttacggaggatacgatggcaaactatattacaatgccaacaaaggaatatatccagtaactaccggaacttacgatatcagtgtagacttgataaacggcacttatactatccaatctataaattaagatattattactatgaaacgattaaaatatatactacttacggcttccgcactattgtgcggaaccttcttcaccgcttgcagcgatgataacgacactcccacttttccggagaaaacagaaacagtttacgatatgtccggctttgttcggggagcagacgtcagttggctcacagagatggaaagttccggctataaattctacaatgctaaaggtcaagaacaagaatgtatgtcattgctacgtgacttaggtatgaatgctatccgcttgcgcgtttgggtcaatccggaaaatccgacagaaaaagataacgtatacggttggtgtaacaaagaagatgtcgtactcaaagcgtggcgagcacataatttaggttatcgtctcatgatagatttccattacagtgatgcttgggcagatcccggtaaacaatacaaacctcaagcatggaaagaccactcggtagaacaattgcaggaggatatcgccaagcataccaaagatgtactcaacactctgaaagaaaaaggtatagatgtagaatgggtacaagtgggcaacgaaactcgatacggaatgttgttcgatgaaggcaatataaataaagaaaatggaaccgtaaattttgccaagttcgtaacagcaggttataatgcagtaaaagaagtttatccgcaggctaaagtcatcgtacatatagaccgtggaaatgaaattggacaattccagaaagtattcggagatctacaagctaatcaagccaaatgggatatcatcggaatgtctctttatcctcaaatggatcctgacaatgaagaagattccaattttgttgcagcagattggcgtaaaatgaacacagattgtatcgcaaatatgcaaaaactctatgaagaattcaacacacccgttatgatgtgtgaaataggcatgacatggaacaatgaaaacgccgaagcattttatacagacttcattactaaagctaaattactaggtactgatatatgtcccggagtattcgcttgggaacctcaatgctatggcggttggaagggatatcacaaaggtatgttcgatgacgacggaagacctaccaattcatttaatgccttcaagcgataaatttattgattagtttttatacctttacaccggcattactatgtgaatgtaatgccggacattgacatttaataaatccaactaatagtatacctgaaaagcaaaaatgaacatgaaacatcccaaacagttattaactgtacttttgatgggcgttgcctgcacattgcaagcacaacgcagtgagacactactcgaaaaggactggagattcagtaaaggagatttcaaagaagccagccagccggagtttaatgatacccaatgggaatcggttgttattccacatgattgggcaatcttcggtccgtttgatgtaaacaatgacctacaaaatgtagcagtcacacagaacttcgagaaaaaagcttccttgaaaaccggacgcaccggcggactgccatacgtaggcacaggctggtatcgaacaagttttgacgctcctgccgacaaagaagtaacacttctttttgatggggctatgagcgaagcacgtgtctatgtaaacggaaaggaagcttgtttctggcctttcggatacaactccttccactgcaatgtaactcctttcctcaacaaagatggaaaaaagaatacactcgccgtacgtttggaaaaccgtccacaatcttcacgctggtatccgggagctggtttataccgtaatgtacatctgattgtaacagacaaaattcatgtacccgtatggggaacacaaatcacaacgcctcatgtcgacaaggactttgcatccatacgccttcaaacgaaaattgagaatgcaggcgagaaaacacaactccgtatcgaaacggagattctttctcctgatggaaaagtcgttacccgcaaagaaaatacaagccgcattaatcatggacagccattcgaacagaattttattgtaaatgcgcccgaactctggtcaccggagaatccgtcactctataaagccgtttccaagatttacgcagacaataagttggtagatacttacactacacgtttcggtatccgtagtattgaatatattgccgacaaaggattctacctgaacggaaagcatcgtaagtttcaaggagtatgcaatcaccatgatttaggtccgttgggtgctgctattaatgtagccgctctccggcatcagcttacactattaaaagatatgggatgtgacgccatccgtacctcccacaatatgccgactcccgaacttgtagccttatgtgacgaaatgggatttatgatgatgattgaaccatttgatgaatgggatatcgccaaatgtaaaaacggttatcaccgttatttcaatgaatgggcagaacgtgatatggtgaatatgcttcataattaccgtaacaatccgtgtgtagtaatgtggagtatcggaaatgaagtaccgacccaatgcagtcctgtcggttataaagtagccaagttcctgcaagatatttgccatcgtgaagaccctacccgtcccgttacctgcggaatggaccaagtgacttgcgtacttgccaacggatttgccgctatgatcgacattccgggacttaactatcgggctcatcgctataaagaggcatacgaccaactcccacaaaatctgatattaggaagtgagactgcttctaccgtcagctcacgcggagtatacaaattccctgtggaagataaaaaaagtgccacttacgacgaccaccaatgctcttcatacgatgtggaagcctgttcctggtcaaatattccggatgaagactttgcgctagctgacgacaaccattggacaatcggacaattcgtatggacaggatttgattacctaggtgaaccatcgccatacgatacaaacgcatggcctaatcacagttcaatgttcggcatcatcgaccttgccagtatccctaaagaccgttactatctttatcgcagtgtatggaacaaaaaggcggaaacattacatatcctgccgcactggacatggccgggacgtgaagggaaggttactcccgtatttgtatacaccaaccatcctacagccgaactgtttattaacggtaaaagttacggcaaacaaagtaaaaacaacagctcgcttaaaaaccgttaccgcctaatgtggatagatgctgtatatgagccgggcgagataaaagtagtagcctacaataaagatggaaaagcagtagctgaaaaaattgtccgcactgccggaaagcctcatcacatcgaactggtgagcaaccgcaacgaactgacagcagacggaaaagacttagcctatatcaccgtcaaagtggtagataaggatggaaatctatgtcccgctgacagccgacagataaacttctccgtaaaaggagcaggcaagtatcgtgccgctgctaatggcgacccgacaaatctagagcaattccatcttccgaaaatgcataccttcaacggaatgctgacagccatagtacaatccggtgaaacagccggagaaatcgtactcacagcaaaagcaagtggagtgaaagctggaaatattcgtatccaaacgaaataacacatttcaagaacaaacaatatcttaatctgccaccggattgcacttctatcgaaagtcgtccggtggcttttatatataaatacaggcaaggcctttccttttgcaagaaaaggagcttataaatgcaaattaatatttatctttgcatcagaaaaaattacggatatgtcatataggacttctttcctcctcttaacaggtcttatgcctatattctgttcatgtcacgacaataacaggtttgaatggaaggttgctcagaaacacatggaagtgtctctgaataaagagtccgactcactttatgttatccacctggacacggatcgccccagtcattctacctggaaattgccctaccctgtctatcaatttgattatggagatattacaggaaacggagttcccgaaatcattgtcggagttatcaaaccgacaagatttgatcccaaaccggacaaacggttatttatttaccggattgcagatgaagcttatatccgtccgctttggttagggtcaagagtagcacaaccattggaagacttcagaataatccgtgaagagactcccacacggatacggactctagaacgggaacgcagtgggaattttctagtcgcagaatacatctggagaggattcggtctggatttcaagcgatacttaaaacgggaggttaaaaaacaggaagccatacatatcctcaaacattagctactatcatcatactatatagcgtaattaactgaatggaaataaacatgaaacgactattattattcacctgtatactattgttcattctctgcggatgcaagaataaaaacaaaaacaaccaaatcatgtccgctgtatctgcacaaacagatacaattaccaattccgtttcctcgctgttgactgatacggtactacctcagtccattgatttaaagcaggatatcagccatctttcttttcaggaactacggttattacgcagttatccgtatgccatacatggctatcattttatggaagcggatatcaatgcttttttctcagccaataccaaatggtacaacaacttagtcaatgatatatattgggacgcagaagaaggaaaaggtaagtttgcagaaagctatgaagaggtcaacctgacacctgaagaaaaagcctttgtcgaccgtattgatgcacgtatgacagaactacgccagcatcaattcatacaacgggattcctattacctgggaaatacaaataacatcgtcaacttgtttcaatttaaggatatagacaaagaaatattggagaaactacaacaaaacaactttgtcatcacaaaaggaaataacctgcaactctttcatgcctacgaagaaaacgactaccgccaagtacctaattttattactaccgacctgtatctacaagcattccacatgtatttctcttatatcctaaagagtctggaaaagcaacatatcattcctacactcgaaatgctatgccattctttcaatgcagcctgcatcaagctggccgaacaaacggaggacgaatccctgaaagatatggccgaacacgcagcaaccttctatgccatcccttattatctgctgaccaataagacgcttaccgttccctccaaatatgaaacagaatatcaggaagaaatagagcacattaataaacaggaagataacttttctgactttctttcatacaaagatgcatatttcccgtatagccttttcaagcctcgtggacattacacgcgagaaccgcaattacaagcatatttcaaagcaatgatgtggctgcaaactgcctgcttttgcagggagcaacaggaacaattgaaacgttccatttttcaggctgccgtactttgtacttacaaaagtatagaccagacaccactgataaagttatatcaacatatctataccccactcacattcctaatgggggaagctgacaacctatccatctttgatatcgcccgaattttggaaaagaataatgccatacatattgaagacgcactgacagccggacaaatagagaaagtgaatcaggctcttattgaattggcaaaacataaaaacaacataaagcctcagatagaaatcacttgccgggataaaataaactttatgccacaacggtatctatctgacaatgaagtaactcaaaagttagttgatgtcaatcccaatagtcaacgagcctacccgaaaggtttggatgtattcgcggcctttggcacaggtactgctgaaagtttgttgattgacttttataaagagcctaataactggagcgaatattccaaagaattacaacaactaaaggataaattcaaaacaagtaaatccacacaactctctgtctacgaactatggatgaagagtttgctcaccatgcaacaaacggacaagaataatccgggattcatgcaaactcctgaatggggatacaagaatctgaatactgctttggcttcttgggcagagttaaaacacgatgccatactttatggagaacagccgatggctgctgaatgtggaggtgccggacctcccgatccaatcgttgtaggatatgtagaacctaatctacctttctggaggaaaatggagaacattctccaggccacccgactaatcctgcaacagaacgattgtatgaccgatgacctgaaaggaaaaaccgatcaattgaatgactacgtcaccttccttattcaagtaacagaaaaagaactgagaggagagaaactgacagaaccggaataccggacactggaatatatgggtagcagtattgagtatttcactttatctgtggttgacccagatttgcatctggatgattggtcattagtacaaggtccggacaagtcgatagccatagtagccgatatttatacccgcaatataaggggttgtaacaagaatggaatactacatatagcgacaggaaatgccaacaatatttatgtcgtagtagaaatagaaggcaacctctatttgactcgcggggcgaccttcagctattacgagtttgtccagccactaggcacaaggcttaccgatgaagaatggcaaaaaatgctggaagaaaagaaagcccccgccgtaccagagtggatgaagagtatcctgatagagaaggagcctcatgtaaatgaaagagttttttatagttccggttgttaatgaacttttatcagataagccgaatcacagctgacattggaatcatattcctaatgctggctgcctgtcaacagccttcagaagaatgtctgtctatcgctttcacaggagacgtccttttggacaggggagtacgccaacaaatccgaaaaaaaggtgtcgaacacttatttgaatcagtcacaccactgttccgctccgtagatgcaacagttatcaatctagagtgccctattacctccgttcgttcaccactgcacaagaaatatatcttccgcgctgaaccaatatgggcaacagttctatcccaagccggtattactcacgctgctatggcaaataatcatacaatagatcaaggacgaaacggattgacagacaccaatcaatatctcttatcctccggaattactccggtaggctacggagatacttccacacaaagttgccagcctgttcttattaagaaaggaaagatagaagtggcactttacaactccgttgcacttcctttggaaaactgggtatatctggaaaacagtcccggtatctgtcagcagccgatagaggaactgaaagaagaaatcacaaacttcaaacggcagaatcccaaaagttacatagtcgttattcttcattggggagtagaatatcagcccctccctacccttgtccaaagaaaaggtgcacactcgctcattcgcgccggagcggatgcaatcatcggacaccatcctcacatcatccaaaaagaggaatattacgatggcaaaccaatcttttacagtttggggaatttcgtattcgaccagcacaaaccggaaactacgcaaagtttaattgtacaactaaactttacaaccacagaatgcaatgtccaacttcatcctgtggttattaatcattgcaaaccggaactccaatagccgatattcacataaagcaattatcagatagctttccagaaagcctggaaatcacggtatttaccgtaacaaaccaattcgtccccctcatttactttctcatcctccggcaaattgtttttcacatgaagctctgtcagggagatccccaaacaattggttattttatccgcacgtttcagcccgataagttttaaatgaaactctccatccaaattcagttcattcacaaaatatcccacaaacttcttcggtacggtaaacttcactacataatattccgagtcaatacggaaaccctccatatttgtcccgaagtcaagtaattgcaccaagttacgtgcagcatcttcttccggagtcagaatcttctccaagttgaaagcctccaataccgccttatgcacaccgtcaattgcacgggcataaatacgggctactttcttctgcttcagcagggccactacccgcacagacgcaccgaagttttcgccaatcgccacaatcaccacatccacactattcagcggaagtaccgacaaagattgttcgtccgtcgcgtcaattacaaaagcagtagccaccttatctttgattgcgtccacacggccttcgctgatatccgcaccaataatttcatgtcccaatgcagacaactcttctgccaacacatgaccataattccctaaaccaataataatatacttcatatctttagtttatgatgatgttatcactcggataacggtattttgtattctttttctgtttcacaattccaagcattaatgttatcaagcccacgcgaccgataaacatcaataacgctaccaataatttgcttgcatcacacaaactcggagtcagattcaagctggagcctaccgtgctaagcgctgaaacacattcgaacgtcaatgccatcaacgatgcttgcggttcgagcatactcaagataaaaataaaaagaaatagcacgctcaatgacataaccactgttgcattggaacgccggatagaatcatgagacaactccctaccaaacacctcgacacgctccgtaccacgcaacacagctacgagattgagaacaactaccgcaaaggcattcactttgacaccaccggcagtagactgcgccccacctccaatccacatcaacaccagataaaccaacaacgtctgtacactcagagaggccaaatcgacactgctgaaaccggcggttcgcggacaagtagcattaaagaatgcctgcgtccatttatccgcaacaggcatccccgcaaacgaagcattccattcgaaagcggcaatcgccaatgtaccgattaccaaaagcagaaaagtcattatcagcacaatcttcgtatttaaattataaagatgatgcaccttgtgcctttccaacttacgggtacggataaacctccagaaatgacgcagatgatatagaacgatatccttgaagttaaccaaaatagggaaaccaatcccacccagaataatcaaaaaggaaacggagacaaacaaccagttatgattggtcatcaccatcggattccccaaattgccggaaagcgtagagaacccggcattacagaaagccgaaatggaatgaaaagcagcaaaagccagttcctcatccagattcatccccaatgtaccatgaatactgaaccagatagagaccataccgattccttcaatcaccaatgtaaagcccaatatatataataaggtagacaacaaagaacccaatgaattggaactgaccatatcccggacaaccaactgattataaagagaggtatttcccataaagaacatcgcaaagaaactcgttaatgtcatcactcccaaaccaccgatttgaatcagcaagattataacaacgagccctcctgtcgtaaatgtagtcgacacatccaccggtactagccccgtcacacacaccgcactcgtagccgtaaacagcgaatcgacccaagtaatgccattcaccgtacactttggcaacatcaataatcccgtgccaataagaatgatagccagaaaactgactgccaatatcaaagacgggttggtacgccgccccaacagacgtaccaatccgttggacagattcaataaagaaaagaccagcaataatatcaaatggtaaaatttgccatccaagaactcccagaactgcaagatagctccttcctcctccggacgatgaaaaatgacaggtatcaaagtcaggtacaacagcccgctcaatatccaggccaatttccgatattgctttttagtgctcctatattcaagcgaaatatgcaacgttacatcaatcagaaagataatccatacagccttatacagaacttgtattttcgcaatttcatctaccgacaacggaaagccgtgttcataaatcactccgacaattagcgtaagagacgctaaataagttaaagcctccactaagcccagtataattcgtatataaggttttagcagtttattctgatataacaggaatttatgataaatcttcatatcatattttttataacgtcgtgcaaacttaattaaaataacaatcgaaaccgattctttgttgacaaatttatctgaatattaaaaattttgcctacttttggcagcagataattaaaaaccacaatattatgagtgacaaaagaaaacggtatatcctaccggaagaagaaattccacattactggtacaacattcaggctgatatggtaaacaagccaatgccaccgttgcacccgaaaactaaacaaccactgaaagcagaagatctctatcctatctttgcggaagagttatgccgacaggaattgaatcagaccgatgcttggattgaaataccggaggaagtacgcgaaatgtacaaatattaccgcagcacaccgttagtccgtgcatacggattggaaaaagtactcggtactccggctcatatctatttcaaaaacgaaagtgtaagtcccatcggttctcacaaattgaattccgcattggcacaagcatactattgcaagcaggaaggcgtaaccaatatcactaccgaaacaggtgccggacaatggggagcagctctttcttacgcggcaaaagtcttcggtttggaagcggccgtttatcaagtaaagatcagttatgagcaaaagccctaccgccgtagcatcatgcagacgttcggagcacaggttactccttctccatccatgtctacccgtgccggtaaagatattctgactgcccaccccaactatcaaggttcattaggaacagctatttccgaagctatcgaactggcacaaatgactcccaactgtaaatacacgcttgggtcggtacttagccacgtcacccttcaccagacaatcatcggtctggaagccgaaaaacaaatggagatggcaggtgaatacccggatatcgtaatcgggtgtttcggaggaggttccaactttggtggtatctctttcccgttcatgcgtcataacatactggaaggaaagaaaacccgtttcgtggcagccgaacccgcttcatgccctaaactgacacgcggtaaattccaatatgacttcggtgacgaagccggatatactccgctccttccgatgtttacattaggacataattttgctccggcacatatccatgccggtggtcttcgttatcatggcgcaggtgtgattgtttcacaattgctcaaagacaaattgatggaagcggtagatatccaacagttggaatcattcgaagccggttgcctgttcgcacaagcagaaggtatcattccggctcccgaatcctgccacgccattgcagctgctattcgtgaagctaaccaatgtaaggaaacaggggaagaaaaagttatcctgttcaacctttccggacacggcctgatcgatatggcttcatacgacaagtatctggcaggtgatttggtcaactattcattgacggatgaagatattcaaaagaatctggacgaaatcggaaatttagaaaaataataagatttttaaatcatacaaataagcctggaatcatttccgg

SEQ ID NO: 11852 - DNA, 4253 bp, Unknown
  gut microbiota DNA sequence
ttatgacctaataatgagcaaccttaaaaatatagtcatttgcttgctatttctgtgtttaggtacccattccgctttttcggaaataccggaacctatcaacttctcttacatctccatcaatgaaggattgtcacaaagcactgtattcgccatcgatcaggacaaacggggcaatatgtggtttgccacttatgatggggtaaacaaatatgatggatacgcattcacggtttatcaacacaatgaagatgatcctaacagcattgccaatgacatttcaagaattgtcaagaccgatagtcagggacgggtttggataggaacacgagacggtctatcttattatgatgaagaaaaagaccaattcaagaactttttctatgaaaaaaaaggcaaacggcaacaggtcaacggcatcgcagaaatctctcctgagcaattgttgataagcacacaggaaggtctgatcatgttcgacagcaaagaatccaagtttgtagaagatgctttcagtactgccatgcacaaaatcatagcttccgctctttaccggcatggtgacataatctatatcggtacgatggaagacgggctttacagttattccgtcactcaaaaaaatctggagaaagtgactcctatattggataccaagcggattcaggctattttacagcaatctcccacccgaatatggatagctaccgaaggggcaggcttattattgctcaatccgaaaactaaagaactaaagacatacctccattcctcctccgatccgaaaagtataagttccaattacatacgttctctggcattggattcacaaaaccgtctatggataggaactttcaatgatttgaatatttatcacgaagccagtgactcgttcgtttcatatagcagcagtccggtagaaagcggcagcctttcgcaacgttccgtccgaagtatttttatggattcacagggaggaatgtggcttggcacctactttggcggtctcaactattaccatcccatccgaaaccgattcaagaatatacagcgcatcccatataagaactcattgagtgacaatgtagtaagctgtattgtagaagacaaggacaagaatctgtggataggaaccaatgacggcggattgaatctatacaacaccaagacacaacatttcacccattacgccttgcaagaaaacgagcgtgaaatcggtatcggttccaacaatatcaaagctgtatatgtggatgaagaaaaatcattggtatatataggtacacacgccggaggattgaacgtcctccaccgtaacagtggacggatggaaagttttaatcagctgaacagccagcttatcaatgagaatgtatatgccatccttcccgacaaagacggtaatctcttattgggaacactcagcgctttagtccgtttcaatccgaaagaacgcagttttacaaccatagaaaaagagaaagacggcacgcctttcacttctcaacgaatcacaatcttattcagggattcccacaaacgactttggattggcggtgaagagggtatatcagtctttcaacaggaaggaccggaaatacagaaagttacgatactacctgaatcatcagttacaaagttatttaccaattgcatttacgaggcttccaatggtattatttggataggcacacgtgaaggagtctattgctttaatgaggaagaaaaaacaatcaaacgatacacaacaattaatggactgcccaataatgtggtctacggcatactggaagatactttcggacgactttggctgagtaccaatcgtggtatttcctgtttcaatccggaaacggaaaagttccgtaactttacagaatcggatggattacaaagtaatcaattcaactcttcctcctactgccgcacttccaacgggcaaatgtactttggtggtatcaatggtatcactactttccgtccggaattgttgctggacaatccatacactccgccggtagtaataaccaagctacagctatttaataaaacggtccgtccggacgatgaaacaggcatattgactaaaaacatcagtgaaactgaaagtatcacactgaaatcctggcaaacagctttcaccattgagttcgtcgtatccaattatatttcaggacaacataatactttcgcttacaagctggaaggatacgataaagaatggtattatctgacagacaaacgtagtgtttcctactctaatctgccacaagggacttatcatttcatggtaaaagccgccaatagtgacggtaaatggaacactatcccaactgtactcgagattatcgtacttccgatatggtataaaacatggtgggctattcttctttttctagccacttttatcggcttcatcactttcgttttccgtttcttctggatgcgcaaaagcatggaagctgaactggaaatagaacgcagagacaaagaacatcaggaggaaatcaaccagatgaaaatgcgtttcttcatcaatatctcccatgaacttcgtaccccattgactcttatcctggctcctctgcaggatatcatcaataagataagcgatcgttggacacgaaaccaattggaatatatccaacgaaacgctaatcgtctgctacaccttgtcaatcagttgatggattatcgccgtgccgaactcggagtattcgaattaaaagccaagaaagcgaacgcttaccaactgatacaagaaaattttttgttttatgataaactggcacgccacaaaaagataacttatactctccactccgatctggaagataaagaggtactttttgatcctaattatctggaattgatagtaaacaacctgctttcgaatgctttcaaatatacagaaagcggacaaagcattactgtcacgttgaaggaagaaaataattatctagtgttgcaagtcagtgataccggtatcggtattcctatcaataaacagggaaaaatattcgagcgtttctaccagatcgaaagtgaacatgtaggaagtggtatcggactttcattgatacaacgtctggtcgaactacatcacggacatatcgaactggatagcgaagaaggaaaaggaagtacgttctccgtctatctgccacaggatataagtatctacaagccctccgaactggctgctaacggcaataagagcgaggaggaacaggtatattccaccaattccaaagaaatgtatttcatcgacacggaaaaggtggagaatgaagctatagaatccggtgacaaaaagcgaggaaccattctcatcgtagaagacaacaatgaaatccggcactatctaagtagcgggcttgccgaactgttcaatatattagaggcaggaaatggcgaagaagcattggagaaattgaaaggaaatgaggtagatattatcgtgactgatgtgatgatgcctgttatggatggtatcaagttatgcaaaaatgtgaaacagaacattccgacctgtcacattccggtaattatgttatcagccaaaagcgaaacaaaagaccagatggaaggtctgcaaatgggtgcggacgactacatccccaaacctttctctctttcgatcctgaccacgaagatacaaaatatgatgcgtacacgcagacgtatgcttgaacgttattccaagtctttggaagtagaacccgaaaagatcacgtttaatgccatggacgaggctttgcttaaacgtgccgtaagtattgtagaaaagaatatggacaatatcgagttctccaccgatgagtttgccagagaaatgaacatgagccgctccaacctgcacttgaaactgaaagcgattaccggcgaatccacgatcgactttatacgtaagattcgtttcaacgaagctgccaaactattgaaagacggacgttataccgtagcggaagtcagtacaatggtaggattcaataccccgtcttactttgctacaagtttcaagaaatattttggataccttccgacagaatacattaagaggacaaaaggataagtccgaatccaaaaatgctcgaaatttgttctcagataaatggaggaagcaatatgatagaaagagcattacaacaaaccattcatgagttcctcgttcgacttagccaataaagtaaatgagcctcttaccggaagaaaatgagaatataaaatgtaccctctttttttcaagaaat

SEQ ID NO: 11853 - DNA, 296 bp, Unknown
  gut microbiota DNA sequence
tcgattagtattaacttccttattccctttaacttgcgcatcttgtttataaaggcttccatgatgattatagtcgttaccgggaataaaatcttgtggtctttgatgttgtccaactcaaagacaatgaagcgtttgtgcaacaaatccagttccttgtcggagttcagcaggtagtcgtactcaccgccacgatagtacggttcaagcacgttcaggaaattgtcaatgtcaaaatccttttccctgacgttcttctgttcaagctgtcggcggtaatcatcccggacaaactc

SEQ ID NO: 11854 - DNA, 245 bp, Unknown
  gut microbiota DNA sequence
cgaagttgtaatcagggggtatcacattttgtgatacccctatggataacagcaagttagcttcctcttgggtgagtacaaacataaaatcacccggaaaacgctcgatattgcgcttgaccgcctgcttcaaggctcgtgtttccacttggtagagttctgccaaatgataatcgagcatcacccggcaacttctgacctcaaaaatcttgttttggataatctgcaaatccataatcgtatat

SEQ ID NO: 11855 - DNA, 14518 bp, Unknown
  gut microbiota DNA sequence
ggtttgatccatgaaagatccgtcagacgggaaggggcagccaataaatagctcaagttgcttgcagccaaatccttatcggaagtggtaacaatgctcatacgccacgggaaattccggggtttatctactttggcaatgtaagcttcatgttctttcaccaacatttgaagttgattgtgtccgccctgcaccatctttttgggatatggagcaaaacatcctgtcaaccgcttttctccttcagcagcagacaaataaaggccgggataattctccaaatcggattctgtgataccaaccttaacgccttcaccggcatccacgactaatggcaaaaacatcaaacgttttttattcagcttcgataatggatcggtagtataagtattttcgaatgaattgaaatattgagagttataatcaccgtcctttcctgtttttacataaggtacagaagctaccatatcggatggaaaatgataatctaccgtttcatctaccacgttgaaaggtttcttcgcacggctgacaaagcggtaagcaataccatcattgtacgcacggaactctacattccagtcttttttaaaccgaagagtcagttcattatagtggtctcttaattcactggcacgataaaaaggagaaggaatcatctgatctacttttttcctggaagtgccggacaactttgctttctctccccagacttctccgttatccaatgtcatcgaaatcggagaaggagcaaggatctgccgtccgttacagcggatgtcataagtcagcttgtcacttacagtaatcgttgtttgaagctttccattcggagagttcaaagtaaattgtttttgcgcctgtaccgtaagcgtacatacgacaacacacaagaataataaaatcttcagttttttcatggttttaattatagtagttatcaaattataagaagaatgatgcaaaaataaaataaacaaattatttaattaaaacttgaataactcgttttaaaagagatgtattttgcaagctttacattatctcttttgattacttcatcttataaaccagcgttcctccttttacaatatcttcatgcgaaatcattttctttgtatatggttcgccattcaatgtaatactatctacatatttatgttctttcgacaaattctccgcaataatcgtgaaagtctttccatcggccagatgcaaggtcatcttcggcaactgtggggcaccgaatacatattccgcacttaccggatctaccggatagaatcccatcgcactaagcatataccaggcagacatctgtccgcaatcatcgtttccacaaagtccatcaggtttattcttgtattgagtatcgaatatttcacgaaccaattcttgtgtacgttccggacgacctgccagtgcatataaataagttacatgatgactaggctcattaccatgagcatactgaccgatcagtccggttacatctgacagactttcgccctccaacttaacggtaaacaatgaatctaacttattcaggaaaggcacttcaccaccaaacaaactgatcaatcccggtacatcatgttgtacatgccaagtatattgccatgcatttccttctgtataatctccaccgatactttcagaatgtcctaacgcacttggattaaatggagccttccaggttccgtcagccttacgcggacgcatgaacttcgtctgcgaatcgaacagatttttataataatcagcacgctttgcaaaatatgccgcatcttcctctttacccatacgatgtgccatatcggcagctgcataatcatcatataccgactctaaagtagaagatacagattcagcttttatcaggtctgtcgggaaatagccatattttgtataaacttcccaattggatttcaacggatgagacaccgtctgcgtcttctttattatattaaaagcacgttcagcatcaaagccacggaatcctttacgataggcttcggcaatgactgatacaccgtgattaccaatcatacagaaattctctttaccccataatccccaaataggcaagaaaccctgcacttcaccttgttcgatcaacgaattgacaaaaccatctacacgttcggggatcactaatgtatagaacggatgggcagcacgataggtatcccacaaagagaaggtagaatagaaagcacccgttcccgcttttactattgaatcggcggcgttgcgatacataccgtctacatccgaaatctggttaggctgaatcaatgcatgatagaaacaggtgtagaaatttgtcttttcatcatccgtaccgtctatgtcaatacgactcaaataattattccattcatcatgagcggcagttttcactccctcaaaatcccaagcgggaatttccgtctccaaattttttctggcaccttctataccggtagtggaaagggctactttcatcatcaactcatctcccggttgcatatcgaaagtcgcaatgatgcgttttcctttttcagtcttgcccatcggcaggtaaagcgaatcgactaccggacgattaaatttcatgataaagaaataatcctgatccacccatactgtgttattgacgtgcccggtcagtgtctgcgcatcttcccagtttacttcacaactgttgacctgtgaatgatattgttcttccctccatgcaggaccatgctgcaagtctatcagaacagaagcggaatcggctttatgataagtataacggtgaagggctgcatggatagaagcggtcagttccgctttcacttgaggatcggaaagttcaactgtataataacccggagtagcagcttccttatctttagagaagcggctacgataagcattccatgcacgagtacgtgtacccgttaccggcatgacgagaatgtctcccaagtccatacatccggttccattcagatgtgtctgtgtaaatccccatgccagagaatcttcataaacatattccgaacagtaccgccaaccgactgctcccgtcacggggctagtctgtatcattccgaaagggcaacaggctccggggaaggtatgcccattatcagcggcaccaataaaagtattaacatactgagtataatccttgacttcctgtttttctgttggtgtacaagaatacaaaaacaagcttgttaaagctatagccataaagggggcttttcttttcatggtaaatatgatattaaagttgatgtcgcattaaaagttacgttgcaaaaataaagaattctttctatttaggaaggccggacacagacaaatatacttaaatctcaaacgataaaaacccaatttatacagattcattgtgataaaacaaaaattcgcacgacttattgaataaatatcaactcaattatttatctttgttagcttaataactagctgataaaaaattattagtataatgaaagatttcttgaaatttacacttgccacagtgacaggtatcattttgtcaagtattgtattatttataatcggcatggtaacgctgtttggtatcatggctgcttcggatacggaaacgatagtcaaaaagaactccgttatgatacttgatctgaacggaacgttggtggaacgcacgcaagaagatccactaggcattttatcacagttgttcaacgacgattccaacacgtatgggctggacgacattctttcgtctatcaagaaagctaaagaaaatgaggatatcaaagggatttatctgcaggcaaattcgttggggacatcatacgcttctttacaagagattcgtaatgcactgctcgacttcaaggaaagtggcaaatttgtcatcgcttatgccgactcttacactcaagggctttattatctttccagtgcagccgacaaggttctgctaaatcctaaaggaatgattgaatggcggggtattgcctccacccctttgttctacaaagacttattgcagaaaattggagtagaaatgcaaatattcaaggtagggacatacaaatccgccgtagagccgttcatcgctacagagatgagtccggctaaccgtgaacaggtcacgacatttatcagttctatctggagccaggttaccgaaggcgtttccgcttcccgaaatattcccgtagattcattaaaagcctatgccgaccgtatgttaatgttctatccggcagaagagagcgtcagatgtggattggccgatacgttggtttatcgcaatgatgtacgcgattaccttaaaaggttggtagatatagacgaagacgacaatctttctttgttaggattgggtgacatgataaacgtaaggaaaaatgtgccgaaagataaaagcgggaatattatagctgtttattatgccagtggtgaaattacagattatccgggctctgcaacttcagaagagggtattgtcggctccaaagtcattcgcgaccttcgcaagctgaaagataatgatgatgtgaaagccgttgttctccgcgtcaattcaccgggtggcagtgcttttgcctccgagcaaatctggtatgcggtgaaagaactgaaaacaaagaaaccggtaattgtttccatgggtgactatgccgcatcaggaggctattacatttcttgtggtgctgacacaatcgtagcagagccaacaacgctgaccggttccatcggaatcttcggtatggttcccaatgtaaaagaattgaccgataaaatcggtttaagctatgatgtagtaaaaacgaataaatatgcggatttcggcaatatcatgcgtccgttcagtgaaggtgaaaaagcattgctccaaatgatggtagccgaaggatacgacactttcataacccggtgtgccgaaggacgccatacaaccaaagaggcaatagaaaagatcgccgaaggtcgtgtatggacaggtgaggccgccaaagaactgggattagtagatgaattggggggaatcgataaagcattggatattgctgttgccaaagccagagtcggaggatacaccattgtgtcttatccggagaaaaaagacgtattgtcttctctgcttgatacgaagccgactaattacgtagaatcacaattactgaaaagtaagttaggcgaatattaccggcaattcggtctgctaacgaacctgaaagaacaatctatgattcaggcacgtgttccgtttgaactgaatattaaataaaacgcaaacatggacgatcactttatcaagatacacaaatggctttatcctgcctcctggctctatggaatggcggtaagggtgagaaacaagctttttgactggaattttttccaatcaaagaatttcgatatacctgtcatcagtgtaggtaatctagccgtaggaggaacaggaaaaactccccacaccgaatatctgataaagcttctttgtaatcaatataatgtagctgtattgagtcggggatataaacgacacacgaaaggttatgtgcttgccattccggaaagtacagcagaaagtatcggtgatgagccttaccagatacatcagaagtttccatccgtcacagtagcggtcgatgaaaaacgttgtcatggcatagaggagttgcttgcattggaaaagccttcaatagatatcattctgctggatgatgctttccagcaccgttatgtcaagccgggactgagcattctattaacagattatcatcgcttattttgtgatgacacattacttcccgcaggtaggttacgtgagcctgtcggcggcaaaaaccgggcacaaatcgtcattgtgaccaaatgtccgcaggatatcaagcccattgattacaatattatcgcaaaacgtctgaacctttatccctaccagcagttattcttttcttcgttcctatatgctaatttgcaaccggtatttccagcccagtcatcggatgcagagatggcttcggtgaacaaagagattccattatccgcattaacggatacgaatgtattactgatgaccggtatcgcttcacctatctctatcctcgaaaagctgaaagacagtgcaaagcagatagatttattggagttcaatgatcatcacgatttcagtagccgggatatgcagcgtatcaaagaacggttcaatgagctgaaaggggagcatcggttgattatcactaccgagaaggatgcaacacgcctgattaatcatccggctttggacgaagctttaaaaccatatatctatgccttgcctattgaaatagagattttacagaatcaacaagataaatttaaccaacatattatcgattatgttagagaaaatacaagaaaccgcagcttatctgaaaggtaagatgcataccagtcccgaaaccgccatcatacttggcaccgggcttggcagtctggccaatgaaattaccgagaagtatgaaatcagttattcggatatcccgaactttccggtatctacggtcgaagggcacagcggcaaactgatcttcggcaaacttggcaataaagatattatagccatgcaaggtcgtttccactattatgaaggttattctatgaaggaagtaactttccctgtacgtgtaatgcgtgaattgggtatcaaaaccttgtttgtatctaatgcgagtggtggtaccaatgcagatttcgaaatcggtgacttgatgattattactgaccatatcaattatttccccgaacatccgcttcgcggaaagaatatcccttatggtccccgtttcccggatatgagtgaagcatacagtaaagagctgattcgtaaagcggacgagattgccaaagaaaaaggaatcaaagttcagcatggagtgtatatcggtacacaaggtcccacttttgagactcctgccgaatataagctattccacattctcggtgctgacgctgtaggcatgtccaccgttccggaagtgattgtagccaatcattgtggtatcaaagtattcggtatttctgtcattaccgatttgggagtagaaggaaaaatcgttgaagtaacgcacgaagaagttcagaaagctgccgacgccgctcaaccgaaaatgactacaatcatgcgtgaacttattaaccgtgcctaaacaactatcccgaattatatgagaactgaaatagcatctctcggtgagttcggtctgatagaccgtctcaccggaggaatcgaactgaaaaatgaatctagcaaatatggagtgggcgacgatgctgccgttctctcctacccttccgaaaagcagatgttgataaccacagacctgcttctggaaggcgtacattttgacttgacatacgtccctttgaaacatttaggatataaggctgccatagtcaatttttccgatatctatgccatgaatggcactccccgacagataacagtatcactcggtctctctaaacgtttcagcgtagaagatatggatgaactttattcgggtatccgacttgcgtgtcagcaatacaatgtcgacattgtcggaggggatacgacttcttccctcaccggacttaccatcagcataacctgtattggtgatgcagacaaagataaagttgtataccgcaacggggctaaagaaacagatttgatttgtgtcagtggagatttgggagccgcctacatgggattacaactattggaacgggaaaaaaatgttttgaaaggtgaaaaggacatacaacctgatttctccggcaaagaatatttattggagcgtcagttaaaaccggaagcccgcaaagacatcattgagaaacttgcttctgcaaatattgtcccgacctccatgatggacatctctgacggtctatcttcggagcttatgcatatatgcaaacaaagtaatgtcggctgccgtgtttacgaagaacacatccctatcgattatcaaacagctgtgatggctgaagaattcaatatgaatctgactacatgtgctatgaatggaggtgaagattatgaacttctctttaccgtacctatcgccgaccacgagaaggtttcgcaaatggaaggtgtccgtctcataggtcatatcaccaaaccggaactaggttgtgcattgattacccgcgatggacaagaatttgaattaaaagcacaaggatggaatccattaaaggaggagaaataagaaacctctgtatataacaaaattattttcattccatataacactgataataaggtaactaactttttatcagtgttttttatttccagaagatttgtgtattccaaaagtttcactacctttgcaaccgcaaaagagaaataactgaatcaagttaactatcttggtgtcatagctcagttggtagagcaaaggactgaaaatccttgtgtccccggttcgattcctggtgacaccactttttaaagagttcaaagttgataaatccctgaaaattaaacatttcagggattttcttttttcctcaagcttccacattttcagcaaaacaggaatcaaatattaagaaaaaataaagagcaagttcctcttgcaaaggaaagcttgctctcttgtaggtcacccccaaatggtgtttatcgaatattcctaattacaagtcgggaaagataaagttttactgcttttccaagcaaatattaactgcattcatccctttcaccccacgttccaaatcgaatgtcacaatatcattttcggcaatacctggtgcagcattgttcacgtgaaaaaagtacttatcaactcctgaaaggtcctttataaagccaaagcctctcgattcattaaagaattcaactcgacctttcaaaattaccggttctgtttcctctttctttggagttgctatgattatttcatccggattaatctcctcctttttaatatcatcagtgggcggaattgaagttatcattccattctcgtctacataagcaatcatatcatcgaaactactggtacctgataattttctgctttctttcttcttgagtttttcttcccgtttagcgagtcttttcttttcattttcacgtttaccaactgtcatggattttgccatagaatctatatttaatttaatatttatattttaaaggattataattcgctgatttcaaatagcaaaatcagctttattcagtttctttcctgtcaatttttgaatgtcattaaccaatttccgttcttcctgcgagcaaaacgtaagtgctgtaccttcatttccagctcttcccgtacgaccaatacgatgtacataagtttcgggaacatcaggaagatcataattaataaccaacggcaattcattaatatcaattcctctggaagcaatatcggtagccaccattactttcgtcttccccgatttaaagttccccaatgcagactgtctcgctgcttggcttttgtttccgtgaatagcctgacttccaatccctgccttacctaatattctaacaattttatcagcattatgctttgttcgtgaaaagatgagcactgaccggtcttccgccttttgcagaatcgaaattaatagctggcttttttccttcttctccacaaaataaataatttgcttgattgaatctactgttgatgacttcggtgttatataaatcttcaccggatttttcaataacgactttgtcaaagcaataatactatccggcattgttgctgaaaaaaacagcgtttgcttttctttcggaagtttcggcaatattcgcttgatatcatgtataaaacccatatcgagcatacgatctgcctcatcaagcacaaaatattctatattagtcagatggatatgcccttgatttatcaaatcaagcaagcggcccggagttgccactaaaatatcaattcctttgcgcaacatatcaacctgcggacgttgattcacaccaccaaaaataactccgtgacgcacacgggtatattttgaataatcatcaatgcactcactgatttgcatagcaagctcacgggtaggcgttaatatcagtgctttgataccctgacgtttatctgtctctttatttgcctgcaaatgctgaataataggaattgcaaacgaagcggtctttcctgttcctgtttgtgcacaacctaatatatctcttttcgccaatgcggcaggaattgctttttcctgaatagatgttggagcaatatatcctttttcttcaattgcttttaaaatcggttcgattatatttaaatctctaaatgtcataaatagaattttttaaaatttgtagtaaagcctaataattcttctttagacatgaaaagatcaggatttaggatatccttattgcactacacggaggagtgagaattagcagaacttaattgttagatgattttcttttccggctatccgtttttataaaagcctccgcagataaatcataaaggcggatacaaagactttatagaaagcagaagaaatataaattcttccgctttcctaaagtccggatattaatatcttctggagttactataacctccatggcttccaccgtatgacggtttttcagcgcgaggacgtgcaacgcttaccgaaataaccttttggtcgtattcaacgccgtttaattcgtctattgctttttgcccttcttcatcacttgtcatttccacgaaagcgaatcctctggagttaccagtttctctatccataataactttagctgaagaaacttctccaaactctgcaaataaatttgtcaagtccgcatcatttgtgcgataacttaaacctgcaatgtaaatgttcatctaaaaacttttattaaaataaatactaaattggagtgaggaggataattaaagaagaggactacttactaacattatattaaaagaagaactatacgataacaattcgtaactcaaactctgcgtacaaaggtaatgcaataaattaaataagtacgtttacatccattcttttttataagaaagacgtttattatcatttattagcacgcaattggtgtcaaatggagaaatgccataaccttattcttgatattttatcacaatatgcctacctttgtcattgtacaatttttcagtgaccaatgaatgtcaaaatagaagaaagttggagacaacaattacaggaagaattcaacaaaccatactttgaaaagctggttgcattcgtcaaaagtgaatatgaacgggcacatatccttcctctcggacatcaaatattccatgtattcaattcctgccctttcgagaaagtcaaagtcgttattcttggacaagatccataccccaatccgggacaatattatggaatctgcttttccgttccggatggagtaaccattcccggatcattagccaatatttttaaagaaataaatcaagacttgggaaagccaatccctacctccggcaatttggaccgttgggtaacacaaggggtatttcccatgaattccgttcttaccgtacgtgcacacgaaacaggttcacaccgaaatatgggatgggaaatattcacagacgcagttatcagaaagttaagtgataaacgagaaaatctagttttcatgctttggggaagttacgcaaaagagaaacgatccttgatagataccaacaagcatctagtattgacaactgttcatccatctccccgttcagcggaatatggtttctttggctgcaaacattttagcaaagcgaacgctttcttacagagcaagggaataaaggagataaattggtaaatatatgatcccctaaactacaatttacagaatgaaaagtaagataatacttaaaatattgataattttctcttttacaggatgctataacagagagcaaaattccctccttaatgaagcggaagctttgttgcaaaataagccggacagtgctttgagtatattacagcaatttacaccgggaagccaacaagcggaacaggccaaatacgctttactttattctgccgctttggatcagaaccatatcaaaataacaagtgactcccttatccgaaaagcttggaattactataagcatcatccgaaagatttgcgtaaccaatgcacaactctctattattggggacgtatcaaattacgtgcaaatgataaagctggagcactacgcctttttctagagattgagaaaaagttgaaagatactaatgagccctattataaaggactcttatatagccagatcggtgaagtatattatgcacagatgaactataaccgggcttatcattatttccgggaatctcggaataacttccgtcaatccgaaaatctacgtgaagaaacagaagctacacttgatatggctgctgctacttaccactcaaaggatgttgagaaagcaacacgactctactcctccgcacttgatttggctgatgagcaaaaaagtgataaactggccaaatccagtctgaccaacctagcttctctctatgtaatatccggaaagaaacaaatacctcatgacctattgctacgaattgaactttccgcacgaaaagatacattatacggttatcatacactggttgatgtgcaactcctaaagaatcacatggacagtgcacgtcattatctaaaactggcagaaacacatacaaccgacattcgtgacatggcaaatttatactatactgcttatcggatcgaagctcaatccaaaaactttgaaaaagcaacagaaaatatacaccgctacatatatctgactgattccctgacgcgctcgaatatgcaattttctgccggtatggtcgaacgagagtatttccaggaacaatcggctttcgcggaatatcgcatgaaaaatcgtactattctagagatttcatccataattatagtcattctgttgtcaggtatagcttggtacataatccgacaacgtatgcgtctacaacgtgaacgcacagatcgctatctactattggtagaagaagctaattccgaatataaagctttgacagaacgcatggagggacagcgcaataccgaaaatcacttgaaaggattgatcgcctcccgtttcaacatcatcgataaactaggcaagacctactatgagcgggagaacacttcgtcacagcaagctgccatgttccaagaagtaaaacaaatcatcactgacttttcagaaaacggagaaatgttgcaagaactagaactaattgttaatacctgccatgataatgccatgcaaaaactacggaatgattttcctgcaatgaaggaaacagacatacggttactttgttacatctttgtcggcttctcaccacaagttatcagtctgtttatgaaagatacagtagccaatgtctacgcccgcaaatcacgtctaaagtcacgcataaaatctgcggaaacagccaacaaagacctgtttctatcactttttgaatagtcgttaggctagtgttagaaaattcaagcatccattcctacaaacgactgaatatcagagtttaccaatcaagagtgttagaaatgcgagactgcattgtaactctgaaaaggtaaaatctcgctacttttgcaagcggaaaacttgtaaaagaaaaaaattatgaaaaagattgttatgttattaaatctcatgctttttatggtagcatgcggaaaagaaagtgatgaatataaaaacaattcaccatccattgggcaatcatccgatatatcggaggctttgctcgaaagtttctcaatagaacagcttcccgaaaaaacgatctatacgctaggtgaaaagattgatttaaccggaattaaagtgataggcaattacgatgacggtcaacgacgacctgtaaatgtaactttggaacaaatcagcggcttttcctcttcaactcccgttgaaaaacaagaggttacagttaccatagaggggaagcaaaagacatttactgtgcaaatagcccctatacgtatagaaaatggtgtattaacggaagtagtgaacggttatgaaacaatcacgttgcccaatcatgtaaaatcaattgcgaaaaaagtgttttatggtagaaaaataagtaaagtaatactcaatgaaggacttgtggctatcggagaagaagctttcttcaattcaagcattcaagaaatcgtttttccttcaactttagaaaaacttgaagcagacatattttactattgtaagaacttgaagagtgtagacctaagtcagacaaagatcaccacacttcctgccagcacattctttttctctggtattgaagaaattaaactgcctctaacactaaaggaaatcggagcacaagcgtttcttggaacttcaaagctgagaacaattgaaatccctgaaaatgtaaagataatcgggatagaagcttttcgtgagagtggtattagaaagtgcaaagttactacaaaaaagtgaaatgcgga

SEQ ID NO: 11856 - DNA, 10260 bp, Unknown
  gut microbiota DNA sequence
caatcagatggatagtccctattttccattgaaacttgctcttttattagctataaaaacgacaattacgaacattatccaagtataccctatatacgattgtccataaatcgaattctgtaccattacatatctattggaaagacaacatagtatttgtcttaaaataatccattcgaagaagaatatccgacagtatccaacacctttccctttgggtcttcaccgaatccggaatattaactccacctgcggaaatccctgttctataagttgcaaaatcactaatttcattactaaagacactttctcccaaacctgtaaatgaataatctgtacatcccatcaaatccaacaaagaagggtatatatccacttgaccaataaccttattagtatgttccgaagttaatggagaattcaaaatgataaaaggcacaaaacaatcttctcctcttagctcttcgcgcccctcatattcattataaggaagagcatcatgatcacctgttatcacaataatactattatcatatatccccctttctttcagctgtattacaaatttccatatacattcatcaacatactgcaatattaccatataattttttacatcttcattctttatttccaaatcatcaagaagggttttcatatgtggtgatctaatccatggataatgagaggacatagtaacgatctgtgcataaaatggctgtggcaggtttaccaaaagaggaagtgtcttttcaaacaactgttcgtcagcctgctcaaatttctcagaatctcgtagccgatcatataaacgttcaaaatgataagcatgagacatcgcctcttgattccaatagtttttgtcatcccacaaaaaggaagcagtcatataacctttttctcgcaaagccgcaggaagagaaggaaatgtatttgcagcatagcaagcagatgcagcccctgtaagcaatggtagaattcctgtattaatgatcaactgcgcatcactagatctcccatcttttacctgaggcatctctttgggaaagtaaactgtcttattttgctttaataagaaatttatatgcggagtaatttcaaccccatcaatgcacatcccaattggccacgaatgcaaagattcgaccaatatcaaaattaaattccggccgctttcaactttcttttttgcacaattattcccattttctaaactacgcataacctccctcgcgtattccttttccttttcagaaacaccttgaaaaattccgatctgataaatccaataatgaacgaaaccaaactccttaaatgcccgtacgggttctatcgtatgaagtccattcaacgattcataaccgggagctggattttgtttacaagcataatatgttataattccaccaaataataataagccaaacaatgatgttctaacccttgtccataaaagaaaatttatctttttatatacaaaacaataatatataccccaaaaaacagaaggaaaaactacaaatatatccctaaacctagcaagtcgaaaaatgctaagagatagtccatctaagttataaaccatcaaataagatgacaaaggcattattgtagaataaacacgatagtaccaaacaatagacagaaaatataaattaatcaacaataaataagggaaagcaagaatcttttttcgtacaaataacaaaggaaaagctattaacattgcatccccccatctacggaacagcacataatctttgatataatgtatttgaatattatggtacacttctcccatactcaaataaagtaacatcactaatatcaaatagataacagttctgtcatacaaaagaaataataatttcttttctggaatattattcattattgtctatcataaattatctacatatgccatagccgtatctccataaataaatttccgttaaaaataaccaaaatatttcactgagcaaaatgctatcccttaattatcaacatttcaatattcttttcaaaaatatccattgtaaaattctcatcatatatttttctggcagccttccccaatattggcaacttctccttatataataccattttttctatagcttctgccaacgctaccggatcaccagcaggaaccttatacccatttttcccattctcaataaaacttgccgtaccagtattctcactcacaatcacccctttttccaaggccattgcctccgtacaaacaataggcatcgggtcatccaatgaaggagacaatgctatatccacattagcaaacaactgcaataactgttcatgttccaattcgccgacatactttacacatgaataacgacaatgtttaattgccttttctactttcttctctattgcagcccctgcaatatatatttctatctgttcacgaacttttttagataaaaagtccaaagcctgcaataaaataagttggccttttctatcagaaagtgttcctggcaataagaacttaatcttactattatctaaagttttatttgctaccttcatctcaacatcaggtattccatacaacaaaacacccaatttgcgtttatcgaaaatataaggatcagcaaaagatttagaatactcacctacagcataaattttatcaaatttggaaaataacatcgacaagtctttaaatctcgtccatcccatataagagtaacgtccttcatgcaaccaacaaatttttcttgcctcaatctctgaaaaatgttcaataagccatacagtctctaatgtattaaacactacgacatcaaaaacagacaaaaagcggaaaagagccctatgtcttaaaccacaattcatcaatagaaaaggttctaccaataatttaatatccaaatcggcaatttccttttccattggtccatgtttcaaagaaagaattacaggtcttattcctgatttttttagcattatagccatatttaccaaagcacgtggcgcccccgtcaaagacaactcatgacttataagcaagaccgttttagtatctttcttccattctttaacaatctcaatatctgattcctgtacttctaagagttcttccgttcccacaggaaaagctttcaatttttgcttcttcccataacgctcataatgaatcaaaggattaacattattcaaccacacatccacataattgctcaaataagcattgttattaaaagaagccgacggattacatccttttttccaacctactaacaaataatgtatcatgggatcgacgccattaagtaaaccagcatacttctcactgtagtaagtagagtcaaatagaagcgatttcttcaaaatctttaaattcttcaaaattcgccgcgacactttaaagccattcaccaaatcattcatgtaaataaaccaatcgcgttcagctgcatacttgtctacattacttataccattaaatgagttgtgctgtctccaatacgtaagtttatctgctgtataaaacaaaagttcacttttcagcatttgtcgatatagccaaaaatcaatccaagcaggaattggcgtattataatctaaattctgaaaaacatcttttctgatcataacagcagaaagtgtgggaatatagttcatttccttatgagcaccaagatcaagtttatttcctcctacggataaaaaagcatttaaatcttccacatattttttacgggcattgactgctttttcttcaccgaacaaagccacattattagatataatttttacatcttgataacgatttattatatccactttcttctctaaatgatgtgactcccaaatatcatcactttcacaaaatgcgataaattctccttgcgattctgctaaccctaaccgtattgtttcaggtagtcctttattgacatttcccgggtgagtataaagctttatattattattttcagacaaatacctttttataatatctgtagatccgtcagttgaaccatcatcaacaattacaatctcaaaattagtataggtctgcgacaatagagaatcaagagtttgaggcaaaaattccgcgtaattataacttgctacaataacactaatcaatggtctagcatccgtttttttagttttctcaatgccaatctgaccgacattaaaacacaaccgacctcttttctttccatgaaataaataatgctcaagaggattcatattcctgtattgtacgtctggataagcatataaatatttactcgtggaaaatttttcagatggattttttccttccaaccatccttttttcaaataatgtttaacaggattaactttaccaatttccggatattgactcaaataccactttttatcaaaaaggcgagaattagaaatactataatatacaaccttcttaacaaaagacttttttatcttcttaaatattttcatatatagtttaggaataaattaacatctacttacaagctctgcatgtcatttagtttcttataatatccgtttaatgcaataagttcttcgtgttttcctcgttctacaatttcaccttcataaagcacacatatttcatcagcattctttatagtactaagacgatgagcgatagcgatagttgtacgcgatttcatcaatcgttccaaagcttcctgaaccaaacgttcagattctgtatccaatgcagacgttgcttcgtcaagaatcaatatcggcggattctttaagatcgcacgagctatgctgacacgttgccgttgaccaccagacagacgaccacctcgatctccaatcatcgtatcataccccttttctgtctccatgataaaatcatgggcatttgcaatttttgccgcttcaataacctgctccatagtagcgttctctacgccgaatgtaatattattatagaaagaatcattgaaaagaatagcctcctgatttacatttccaattaatgaacgcaagctatgtattgacacagaatttacattttttccgtcaatcaacagttcaccttcccccacattatggtatcgaggtatcaaatcaaccaatgtcgattttccagatccggattgccctaccaaagctactgttttaccttttgctacttccaaattgatatgcttcaacacaggtcttccctcaacatagctgaagctgacatttttaaaacttaatttatcctcgaagttatccaaaggcaaaggattaacaggatctttaatgtgactttcagctttaagtatcatatcaatacgatccatgctagcaagtcctagaggtatgttgtaaaaagctttggagaattctttcaaaggattaattatactataaagaataaccaaataaaaaataaaagttgcggcatccataggagcgtaagaattatttaagatcaatgcgccgccaaaccatagtacaatgataatcacacacgtacccaagaattcactcataggatgagctgaactttgacgtatcaccatttcattcattgcgtccctgaattcattatttgttttagtgaaacgagctaacattttactttcagctataaaagcttttataacccgtagccctcccaatgtttcatccaattgagacataatatccccccattgagattgagcagtagccgactgccgtttcagtttacggctgacaactcccataacccatcctgccaaaggcaatatgacaattacaaacaatgtcatctgccaacttaccgaaaacagagtaataaaacatacaaccaacgctatcggattacgaataagcatatcaatagagctcgtcaaagaattttcaacagcggtaacatccgcactcatacgagcgataatatcacctttccgctcttctgagaaaaagctaagaggtaagcttaacaccttggcatacacctgaatacgaatatcacgtacgataccggtacgcagcggaaccattatggcagaagatgcaaaataaccggccgttttcaaaagagttgctatgattaatatacaccccatgacaatgagtacaataaatgcaccatgagattctatagattgatttatccaataggaagcattattcattagcacatccttattcaaatgtgctaaatccatcggctgatattcataaaccttagtatcaattttgaataatatattcaaaattgggattatagctaaaaaagaaaacacattaagccattgggacaagaagttcaatatcaaagagcccacaagatatttacgatatggttcaatatatcgcttcattaaagtaaagaactgtttcagcataaatttagttattatatatagggtgcaaaattaaccatttctaattactcagcaaaaaagaataagaaagaaagatataaatagtatttttttagcaatcagactaatcatattcaccattttagcagagatttacagttaatatatgcccccagaatcatatatttataatatcctgcaagaaaaggatttcttttgatacagtcactatatatttaaaccatttttatgcagacatgtacaatttaactctcgatatgctcaagaccgacctctgaattttcttaatgtatcacgaaaagctctgcaccaacgcctataccacttgtttctatatctatttattttctgtttataataccctagctccaaatcgtattgctctctaaaactttttagcctcgattcaaaatcttctgtagtacattcttgttccgaatcatagtgctctaatctgcgtaatccactaattgttccgccataatacatgaaatatttatcatgatgtttcatataaatatactcttccagttcctcccttcttttatcggcctcagtaatcatcgaaaccgcttttgttctataatagaacaagacctgaggtattttatgtactacactactctcatccaaaaaacgtataagaaattcccaatcttcataccccaaaagcattcgctcatcataaccaccaatttgcaaagcatcttctttcctataaataactgaacaaaataaagaatttctaatcaaaagagatttatatcccttgtatgacaagttccataatccagttctttcaccaaaaaactgccctagacaatataccagtttagtatccggattcttttgaaatgcattcacagcctcctccaaatattctggttgtataatatcatctgcatccaacggtaatataaactcaccaacagccaaacttattcctttgtttctagcagaagaaagaccgccattaggcttgtatacatatttaaaacgtgaatccttctcaacatattctaaagcaacctgcttggtattatccggagaaccatcatcaacaacaatcccttcccacaaattatatttttgcttcaacaacgaatctaatgtttcagacaaatagacagcctgattataacatggtataacaactgaaacaagtccccttttacattccataaccatagattatttatataataaattaacaaacgtcaattttaccaaatgccatcaataaaattcatcaatccacctgaatagaaggcattttacagtatatttaattaatgcttaatctaaatgtaattcaacggaatcacacagaacaaaaggtctaggactatgctttataaattttataaatacaaaattaattatttcaaactatttagcaaaaaaatgatagaaaaacaaactattaacaatcacatccataggcaggctctctacttgcaatatttaactttcagaatcggaataacacctaataatttataattccattttccgttaaagcatgtaacattcagaatttcaaatattccgaataaactatatgtataagtattcttttgaaacgacacttgaaatacagggataaaaccaaataaataataccttttcttctccggttgctttccaccaagcggattacgttttttcagttccgcatatacatagtctcgcccaaactcctccggaactttatgaacaagcgccagctgttctttatacgtttgctcggtaataaacttcagttgccagagctgaaaacaatcatcttcactcaagcctatatgacaacctatatgatgaaagaaagaagtagaatgatccttacgggactgagcatcataatgaaaagaatatccaccatatctgtatgttacaaagcaatgtggaacatactgatgtttatatcccaaagcataaaggcgaatcatcagatctgaatctgcagaaacacgataagacaaatcgaagccacccatatctcttaaaacttccgttttaaccaacatggtctggtggcaataatgttctccaacaagtaactttgacaaatctcctttccactgaaatttccggcccgacttcttaagaacacgagcatccgcataagaataatcagcatcattctcttccaacagtttaacactgattgcaattccttctggatcgtgaaaaaaatcatctgaatttagaatactaatatacttaccattagcctttaaaattcccttattcatggcatcatatatacctgcatccggttcggaaaacaattttatccaaccttgactctcatattctttaagtagtgataaagtaccatcattagatgccccatcaatgacgatatgttcaatatttgagtaatgctgattatgtacactccccaaacattgaataataaattttgccctcttattttcaatcaggttataagttgcagtaataactgtaaccaagggggtactttcattcttctgctccatatgtttaagcatatctcatatattttataatggcggaaatacaatttgtcaaatgcctccatgaaaaaggacgacacaaaaacatcttaaaaattttccttttaaacataatatcacagtctgattttaatacctgtctcaaaaaatcataagatgccaactcctcacatttacggatctttctttcagatatattaagatctgatgtctttattggcaataaatgcttccatttttcatgtaagcgtaaagttgtggagaaccaatttatatcactaaaatttccttgtgaaaaatgctctatcaacatctgattggagcaacacacataatttttataatttgcagttgctatttgtaaagagaaatcaatatcataacaatgaaatcctgttaacaactcctcatcaaacggatatttttcccaaatatcctttcttacccaaaagcctagaccatctaacgttattacctcttgaaatggctgattcaaatctgcattctctaccagaaataaagtcttcccttcttttattctttgatagaaataactcactttactcatatcgcaaaattgataccaaccactacaacacgagaatcttgctttgtctccaacaaaacctataactccacattcgggttcggctaacttaggaattataaattctccccacttatcagataacagccttgtgtcttcatgcacaaaaaacaaatatggatattttgcttgctgtgccccataattatatgcttttgctataggccagtgtttttcacgattgtcaattgcaataatttcatattccacacctatagtttgtgcaatattttgtttcaaatcttctaaaagcaaaggagaaacagagcaaataataattgataccatactttcaatataataattatacagaatcgttataatctatattataactaacccacaaggcacatgacagagcgtcaatccttttttatcaaacgagaccaaaatggataatactctttatgataccaagcatgacaaccaaaaggaagttgccgtttattataattaaacgcccattctgcgcctacttccattgaaaattgcagcgctttgtcatatcgaggagttcgcaaacgatactgtttcttcctaatttcaacaaaaagcaaaacatcctccggatagaaaggcttttcatcatccaaccattgagcaattttacttttatattcacgcgtaattgctatcattttagatatattccgcaatgaaaagccaccattcccgacttcatatgtaaaatatttccatcgtctcaattttggacttcctatcaacctgtaaaaaaagcgctttaacaaaatacatttgccattgcccatcttcccttccagtcgttccggcaaccacggagcgccaatataatcgtacc

SEQ ID NO: 11857 - DNA, 24399 bp, Unknown
  gut microbiota DNA sequence
attttattattttaggaatatccctagatagtgatacgcgactcgtagcccgcttcatgatggaagtggtctgcgagtttctctataatctcacgtaccgtacgtttcccatctatcagttcccatacagccgtaccgtgctcctccaaatatatccgatgctctttcgacatccctttcggtacaagaaagcgttgcatccacgaatacttaaaacggggaaaggagagcacaatagtctccccttcccgttctgctgttatatgttcactgcgacagggaataacctctaacaggtttgttttctctttggcagccatcgttttatttctgaatatttgcttcttccaaaccgtaacctttctttctgttctctgctttcaacatcaaagcaatgatcaaagccaatatgccaaagagagcaaaaatactcatcggcaatgtatagtcataggtttgcgcgccatctactaccggacctttacaataagaattcagtacccatccgatcaacaaaggcacacccatcaatccccaattctgtacccagaagatcaaggcataagccgtacccaattgtttttccggaatgatcttcggaacagaaggccacatggccgaaggtaccaatgagaaagcaaatcccaagataatcatgataatcgtagcaaaccaccatacattcaggataggcagagcgaacatggtatgcacgaatatcaacatgacagatccgataaccatcaatgtagcccccttaccgatacggtcatacaaggaaccgaacagcggtgtcaacacaatagcgccgatcggcagcagcccgggaatagttcccgccaatttcgggtccacgctatacttctgaaccatcaaatcggcggcatacttgatgaacgggaacacagccgaatagaacagcacgcacagaagggcaatcaaccagaatcccttgttggtaataatatacacaatatctttcatacggaacggctcttccggttccaatccttccgcatccaacgacgcatccagtttcttatcgtagaaagtataaatgaagaaggcggttgtacctacacacaacattatgagacaaaacaaaataggagcaggaatattggtatggaacgcaccgccttcgtccgtatatccgaagaagtccgccaaaggaacagtcatcaccatggccaaagtcgtcccgatacgtgccgtagccatttcaagtcccatagccaacgccatttctttacccttaaaccatttgacgataatcttggaaacagtgattcccgcaatctcgacacctacaccgaagatggcatatcccagtgcggcaagagtcacttgagtcttgaagccgaaaagcatggcgccttcggggaaggtagtagaaatggcgtagtatttcaatccacagccgaataccatcaacagacacgcccccattccggtaaaacggacccccatcttatccagaatgataccgccgaagatcaacatcaacaagaatacgttaaaccagccgtatgcacttgtgaagaaaccgtaatcaaggctatcccataataattctttttcaagcatgggttttagcggagacattacgtcagtgaggaaatagccgcatagcatagtaaaagcgaccaatgcaagaacactccagcgtaacactgcggagtcattcaatttcttttttaattgttctgtcattgttatatttaaaaagtgattaataatctaaaacaattaagcgcggattacactgaccacccggaacattgagaatccgtgtaatccgcgtaatccgcgcctaacaatatgttaatgtgacaatatgctaatatgccaatgtactgcgaaacgccgaacggaaactggcataacggcaaattattaattattctgctgcaggagcaggagtttcagtagctggcgccggagtctcggtagctggcgcatcagcagcaggagcttctgtttgcggtgcagctgtacctgcgggcaagttatacgggttagtctgttgttccttctgtgcctgttccaacactgcgtctgtagcaacagccgaactaggaaccacataagcggtagcaatgctcattacaaccataaagatagccaaaccccatgttgttttttcaagaaaatctgtagtcttgcgcacgcccataatagcgttagatgaagaaaaaccggaagcaagtccgcctccttttgagttctgaatcagcacgatgaagcacatcaacagggctgcaatcaccattaagataacgaataataagtacatttttagttattttgaattagcgttaataatcaatttctccaaaaatctgatttggtctgcaaagtaagcatttttttttggatatttcaagcttaattttttaattatttcaagagcttttgaatatcgttgctgtttaacatagattttagccaaagtttctgtaaaacagctatcatcctcctcttcttccccactcaccgtattcgattcatcactcattgcatccgattcctcccgcaaaggttttatatgcaacggagcgtcgctttcactcttttctatgaaatcatcaatcagttcaaatccctttagcttaggcgcttcttccgtcgattcatccgttccgggagtctcctcaagcagataggaagtatagtccatcgaatagtcgaagccggtttgggtggtcacttcctccggtgccgtagccaggaaagcgtcaatcaaagccaatgtacggtctaccgaaggctcatctttcagaacctcagtcaaaggaactccttttttccgcgactgaagatcgaaacggctgccttcaatcagttgaaacaacttccgtcggtcggctatatagagaacggcctttcgcagttccccgccaaaactgatatcatggagaatatacagatttttgagatacaacagacgaagcgactgaaaatacggatacctcgcaagcagattgcgcaactcgtacaaagtatccctattcagcgtctccggatgctgaatccattgttgaaagttaacagaagtcatttatattaccagtttgctacggttgcattgaatatttggtcggtgatctcttttgacatttcagctatcagcccgtcctgcacggcagtcagcaattggctggagtcgtaggtacggaaagcggagaactgctgttcaaagtcttcggcatgatttgtgttgttgacaaaacggacgttcaccgtgatggtcagcttcgtttccgaagaataaccatcggcggacaccgcctggttatactgattatatcccgtgatctcaccgtcaatctgcaagtccgcgttctgattcggcttcagcaattgcagacgggtctggcggataaatatatctttcagatcttcattgaacttcgtcgccaacggggcatacacatactccgactttatcgggaaatcggcaatggaaatcgtcttcaccttatcatagttgatagatgagccgttaaacttataggaaacagtgcacgcgatgaccgccaatggcaaaaccgccagcagcagagggcgtgttatctttttaatccaaatcatattcttttatttttctataaagtgtacgctcggaaatgttcaaatccttagccgcactcttccgttttccatgatgtctctcaagtgctttgcatatcatttctttttctacttcatccagcgacagggactcttccacatattcttccgtgtcctgaatatcgtcatcatctttgcagacagctggttgctgcaccggatgaataatggcaggaaccgaaggttgcgccgtcactaccggagtggcaaccaccgcactgaccgggcttacctgtccggcgcgttcagccatcagattgtgtaccatctttttcagttccgccacttcctgccgcatatcgaacagaacggaataaagaatctcccgctcgctttcaaaacccttgctctcacgtgtacccagcaatgcgggaagacgttgtgtattctgcgcgggaagataagtctgcaagatggcagcgttaatctccctgttagtttcaataatcgaaatctgctcggtgatattcttcaactggcgcacatttcccggccacggataggccagcaattctttctttgcgtcttccgtcaactgaatggccggcattctgtatttctctgcaaagtcggcggcgaacttacggaacaacagaagtacatcgtctccgcgttcacgaagaggcggtatctggataggcacggtattcaaccgatagtacaggtcttcacggaaacgtccctccgcaatggcttgcgtaagattgacattggtagccgccacaatacgcacatctgtcttttgtacacgtgacgaaccgactttgataaactcaccgctctccagcacacggagcagccgcgcctgagtaggcatgggcaactcccctacttcatcaaggaagattgtccctccgtcggcttctccgaaataacctttccgctcgccgatcgcaccggtaaacgcgcctttctcatgtccgaacagttcggaatcaattgtgccttccggaatcgctccacagttgacagcgatatactgtccgtgctttctccggctatattgatgaataatctgcgggaaactttcttttccgacaccactttctccggtaatcaacacagacaaatcagtaggagccacttgaatagcaatatcaatggcgcgtgataaagcttcggtattaccaataataccgaaacgttgtttcacttgttgtaactccgctcttgtcattactcttttactcttcgtctactgtatccagcttcagtttatcactatcatcccgtttctcgtaatactgtttccgcaacggattcgcacgggccgctttttcccgttgacgattgcggaatacatcaatggcaacatagactgcctgacggaaagagtcttcactcgccagcccctgccctgcaatgtcgtatgccgttccgtgtgccggagaagtgcgaaccaccggcaatccagccgtatagttcactccgtcgtccattgccagtgccttgaacggagccaatccctgatcatggtacatcgccagaataccgtcaaagtgagtataattgcccgaacccataaaaccgtcggccgcataaggaccgtagcacaggattcctttttcttccatttccttcatggcaggaatgatcacttcctgttcttccattcccagcaaaccaccatcaccggcatgaggattgagcgacagtactgcaatgcgcggagcaccgataccgaaatcctgtttcaggcaacgatgaaatatcatcagcttttcttgaatcaattctttggtaatcgttgtcgcaatctcccggacagggatatgcgttgtcaccaaagccacacggaaatcattcttcatcagaatcatcaatgacttattgccattgcccagccgttcctcgatatactcggtatgtccgggaaatgaaaactcttccgactgaatggtatgtttattgatcggtgccgttacaataacgtcaatcagcccctcacgatattcttcgatggcacgctccaatgcgcccaatgcagctttaccggcttcaggatccggtttggagaattccacttttacctcatcatcggtacagttcactacactcagccggttgtatcccgcttcggaagcactgttgattatactgaaattagcctgaacatccaatgctttccggtgataggcagccactttcggcgatccgtaaataatcggagtgcacaactccagcatagtaggatccgagaaagtctttaagatcacttcataacctaccccgtttatatctccttgggtaatgccgattcttattttgttatcttccatgtttttatttattagtttgttccgcttccttagtttcctctcccaatggaatctggttctgctgaacttcgttcggaagtttcagcgtatacagagaggcttccatctggcgaaccaggttgcgtttcattttatcaggtgaatagacaaatatttctgctgtaatgattcgttggttattctcgtcaagacgggtatgcgacacatacggaccacccataaagtcacctttcatgcgccacaacccgcgcgcttccatcgtgtagctgttctgcacattgatggggcggacatccgtcaataagctgtcggttgccatataaacgccttccttgaatccgggaatgttggctttcatcacagagtcacgtttatggacaaaatattctttggtaaacgtatccttatctgtataaggataagagtacatcacgaagttacggtcggcagtaccggtattggtagaagcccagaagaagtcttcccccgtctttgaattagtcagctcggcaggcagccagatatcgcaaccgaacaagctgtccaccttatttgaaataaagttgctgtgcttcttttcgagcgaagtgatctgacggttcatttccgcacgggtgaagaaattgattatcgtctgtctgttctccttcacaaacttctcgaactcttcttcgttcggagcctggatagtcaatatcatctgcggattggcatacacatctttcgcatatttgaaagaggcctttgtatatatatcctgtatatctacaataataatgttgcgtatcaacttcagcgtagagtcataatctttgggtgaagtgtacatgatacggaaagaaggttccgattgcggcaatccgggcatatcggaatcgagtgcatcatgcaaagctcttcctgccgcacgatcccaaacaccgtggtctactactaccaaaagctcgtatgcacgtccactagaagtgtggtttcctttcagaccacaagaagcaaagacaaaggttaccaaagcaatgctcaaataagaaaagtactttttcatgatgttcggttttatatattaactcttattattttcctcctgtttcgctgttgacaacataccgcaagctgcaaagatatcttcaccccgcgaagcacggatcgtagtgaaaagcccgtgcgatgtcaggtaatcgcggaaacgggtcatcgtatccatatccgctccctcaaggtttacacccggtatggcatgaaaacgaatcagattgattctgcaatccaatccgcgaaggagcttcagcaactctttggcatatatctgcgaatcattgagtcctttaaaaacaatatattcaaatgaaagtcgacgctgtttgctaaaatcatagttttttaacagttccaccatttcggtaatagagaacgctttttccgccggcattaactcggaacgctgggccgccaccggagaatgcaggctgatagccagatggcaatcgctttcttcgataaaccgccgcagtcctttccgcagtcctactgtagaaagagtgatacgcttcggactccatgcgtaaccgtaaggggcggtcagcacttccaatgccttaagtacttcatcgagattatcaagcggctcgcccatccccatcatcactacgttggtcagtttgtcacgttccggcaatgaatggatctgattgattatctgattggcagtcagattggcggtaaagccttgcttgccggtcatacagaacttacagttcatcttgcaaccgacctgtgaagagacacataacgtcgcccggtcgtcatccggaatataaactgattcaacaaaatggttatcgcccactctgtacaaatacttcaccgtgccgtctacagaacgcatttcatccacaggagggaatactcctacctcatagttctgtttaagcaactcacggtgtttcaatgacaaattagtcatctcatcaatcgaggttaccttcttttcgtaaagccaggacgcaatctgcttggcggcaaaactgggcattcccagtctttttgccaatgcttgaagctctacgagggtcattcctaaaaggggatatttagacattcttctttctgttgatggtttatatctgcaaatgtaaggaaataaagtcgatttccgtatagtgataatgtaaaagttaacaaaattcgcttattcaccacagaggacacagagaaataaatcaggcataaattatacgtattcttctgatacatataatttatgcctgattatataataacttcgagttctctatgttctcttcacatctctatattcttttcaccctcagtgtcttctgtgtcctctgtggcgaaataagttagaagaacaggaagcgtgtgtcctttacatttgctttcagatacaagtcgttcatcagacggctggcgaagcgagcgtgcatattagccaacgtagcttcttccgttttcgcatcaaatgtctcgttcagtttgtccttgccgtaaacttgcaatacaaatactccggcattacctttgataggtgtgctcaacttgttcatttcagcaacagaagcataggcgcctaccaacggttcactgctgcgcaatgcggaaacataagcaggagcggcgaaggtaaccatcttcaaagaatcgcttacagcgttagtcatagacttgtattggtcgaatgaagtggcatttgccgatttcatatccgccataatcttttcagccttcttgtcttttacgatttcagctctcaactgatcctgtacagacttcaaagagcgatatccttccggtttgatgctcaccaagcctacaaccatcatgtgatcgctttcgccacattcgtacaggccggaaacttcacccggttcagctttatcaaatgcccatctcaaagcttctttagtacctctcacaccaccgataccgtgttcagagctgttcaaatctgctctgtcaagcaatctgtatccggcttcttcagcgttagccaccatcttctcaacactaggattggctgcgataaactggctgaaatcattgtaagcacgattgtaagtttctttactgaactctacttcacgcttgacaacagctactttatatttatcttttacagctttcttgttggttacttgcagaattacgtttgcttgtcccatcggtaagttcaccaattcgttcacacctgtattattgatggcagagatgaatttcaggttatcaccgtcgatctgcgcaccttcgtactgagcggcagtcaaccaattagaatcaccggtctgaccgtattttttagccagctccacgaagttggcgccatctttaatcgcattgtagatactgtctgccaatgtctttgttttcaacgcgtcttccacgtatacctgaatctggcggaattcgacagagtcggcaacggcagccttagcaacaattttgaaagagttgattgtgttatcggcaccattgtagtaaggaccgtataccgcacctacggaagcagagtccaaacgtgccactacatccgacgggaaagcagtcttgttatagaacaagtctacgtacggaacatccgaacctaccgagcggataaaagaagtgtaatcgtctgttgtagtagccaactgagcagttgcctcgtccacttctttctggatagcagctctgtcctcagggcttgcagtcacctgtacatcgatgtacttgatgtcacgagtttcctgatattgcttgaattgttctttcttcttgttatacagttctttcagttccgactctttcacaacgattgtagaatctactactgaagagtaaggaatgcctgccagcaacacattgtattgattcactcttgcgtcgaaagcgtcctgagcctctaccgggttagaaagaagagctttagcgaccaaagcctggtatttttcagctaaacggctttgaatcaaagttttctgaataaacgaccagtatttatacatattattgtattgttcggcatactgtgtcggcatctgcgattcgttcatcttagcatattcaacaaggaacttgttcaacatatccttatcgaagttgcctgtttgtggattttggaaaggagtctgtctcagcagaggatgtacaccagctttcagaatatcctgaatttcagcagtggagacagtgagccccaaagcttttgcttccttttcgatcagtttattgtttacgtatgaacgccatacttcatcacgcacctggttggtttgttcgtcgttcaaggcgttcactccacgcatgagtttcaccacttcggtatattcttccaccaaattctgatactcctgagcggaaagagcgtctccgttcacctcacctacgtcatgcgcctgatgtggctgcatcactttccatgcgtcacccgcaatgaaagcaaacagcgccaagccgataacaatcaccaatagaggtcctttcgacctaatgttttgtaacgttgccattttgattaatatgatttatgtttattattatttctttcttttgtcgttttagcgcacgaagatacaaaaaatgctaatatgcttctatttattagctaaaaatttcttgattatcgtcattattccaagacttttaaacgaacaagttcgattttcgtcgccgtcaccttgattatcttgaattgataacgtccgatctgaatcacttcatgtaatttcgggaagctctgatattggctcaggatcaaccctcctaccgtcagataatcatccgattcgggcaagtcgagtccgaacgtctcattcaccttctctatttccagacgggcggccagcacatactcatgttcgtctatctgcttgcagatataggaggtattatcgtgctcgtcctctatatcaccgaaaatctcttccaccaggtcttccaaggacacaatgccggacgtgccgccaaattcgtctaccactacggcaatcgtcttcttctgctgcataaacagcttcatcagcttatgagccgacattgtttcaggcacaatcggcacttgcttcacattgtcgtgccagtctttcggggcacgaaacatttccgaagaatggatataaccgactacattgtcgatattcccgtcgtatacgattatcttggagataccggactctatgaaacggtttttcagttcgtccaacgaggttgtcagatcgacagctaccacctccgtacgcggaacaatgcagtcgcgtatttttatattcgagaaatcaagcgcgttctgaaatatttttacttccgtatccaactcttcttcattctcggcattgtcgatactactctgtacaaagtaatccagatcgacttttccgaatgcgatatcagacgcttccttattcaccttcatgccaaaaatgcgaaggaacaaacaagacagtccggaggacaatttggagacgggatacaaaataatgtaacagacaataagcggaacggcaaaaacgttcagtaccaaattgggattgatcttgaacaatgttttcggcaaaaactctccggttaccaggatgattaaggtagagataacggtctgcgccagtaccataaggaagtgattttctatgaatcccgacaataaattgtctccgataatctgtgccatcagaataccgtagataaccaaggctatattgttgcccaccagcatagtggagataaactcattcggattcttgaaaaagacagacaggatgcgggaagtgactccccctttgcgttccatttcaaagcgcagtttgtctaccgagacaaaagctatctccattcccgaaaagaaggcggagaaaaccatagtgataattagagagatataaatattcatagcttatttcacagaatcttttttcacggaatccggcaaggctttcagttccggctgcgtggtgcccgcttcatcatccacataaaaaataccctctatattgtgaatggtgtaaactgtcatttgctggttggagtcgaagccatgcccggtgatagtacggtccggctgctgaatacgtataaacttgtcagaatacaccttctgggtagcttcgttccaatataacaattccgtattgaaacgttcgcctttccggttctgtatatctacgttccctatcagcttccaaagcctttctttgtcatagtagtaggcagtatccgctttgatactggcttctatatgaaagatagagtcaaactgttccagatatactcctttttcaaatgcccaataagaaggtttctttcggtcgaacacctgccactcttccgtattcactctataacgtgtcactccggaatcggatataagggtagtgacccctagcgtactcatcatcggaagagaatcccgttcagtgatagcttcacctatcgctttcgacttgccgccacaggaaggaaataaaagaagcataacaattgtccccaggacaattgttatgctcatgcttttatgcaataaacgttttcttcgttttcgcaacatacatttatctaatcgttgtagtctctccgatccaaccgccgatagtgatgcggtcaccggctttataacctaacatgaaaaggtctttagcctgcggagtatgagcagaatatctgccaatcaacttgttcgcttcttcagccacactaggatctaccgcctttgcacgttgcagtttgtcaatcactgcaaaataagtacacttgttcagagcggattcatcgctccagttaggactcatcgcataaaggttggctatcagaatgtaaggagcaccataattttcgttgaagctgatggccttctggcaataagatctagcctgagacagtttcttggtggaagccaataccgctgctgccgcatacgccttttctgctttcttcaaattgtcagtctccaagttcactgcttcgtcaaagaacttcacagcactgtcgatatcacctttcttgaatgcctgatatgcacatcctgtggcagcttcggcagtaggttccattttataagcatagaatgatgcttgcaaatatgcttcactttcagtacatttcatcattttcataatatcaatgactttcttcaagtatgccagatccgtttgattagcttctaccttcggtccgtaaataccttgcaatgattcacaatcggcagttccgctattaacgaacaaagcgaccaagttatctttgatacccatataggctttcttctttgattccttagtctcggcagcaatagctgcatctgcatactcggaagcagccagataatcctgaatgaattgttccttatgagtaggatccgcttttaacttatccaatgacatctgcaagaaatagaacaaagtagcggcagccgactcacctttcacagcgttgacagactggcccaaccactgataagcctgattaacgtccaacttcggagcaaaagcgatataatctacagccttgatacccaatgcttcttcaggagaagagacctttactcccttagccaagaagtcaggcgtatatttgatacgcaaatcgtgcgtattcatcagttcattaaaatatttctgataatccggattgtttctgtctttgatttgccccatcaaacctttcagaattttatatccgtccgtaaaagtatagaaacgaagcgtcgggcaattttccaacacagctttccatggagtatacgcatctttaaagttacctgcacgcacagcttcatgcgagatactactgtttgaattacagttcgcatcctgtgctaccacagtagtcgcccctgctgaaaggaacaacatagccacaagcgttttaatcttcattgtatttaaattttagttgttattataaagtcgtctattctctctcactttgttgcaactaattattctacccggcgcttgaagaaccaacgttcgttgaacgtcaatccaatgctcacacggaagatgttttcattcaccatattcgtttccaatcctttgacgcggacaaactgcccacttatactgagaatggaacgcgaacgaggaacaggcaaaccgaaaccggcagtcacgccatattcgcgagaagccttttcaccgttgatcttataatacggagtcgtataataagctcccaaacgatatttaatatgggcaagataagagcgtcctatcaaattaggaatgtactccgcacccattgatattttatgacggtcacagtaagtatatgtttcatgcatatcattgtccacatcatcacccttatagtttacatcagcccatttctgaagactataatcaacacctaccatcaaatgcctattataattgtaagtaactcccacaccaaaagaattaggcaatcccaatgttgcatccaactcattgctaaccgttgtactagcctgcgtggttaccgttacatcgttattcaaattatgcttcggcgaataaaccgcaccgattgtcaccgaatgttttttgccaaagtcctgcgtatactgtgcgccaaaatccaacttataatcagaaacagacacagcattctgtctcacaaatgaataagaagaagatgtattcggataaagcattgtcaatgaacgagtgatatctccccaaaaataagaaacattgactcccaaagacaaattctttaaaaccttcactcctactcccgcatacaactggtgcaacccgccatctccggcaagagtctttgtatagtccggcgtcgcgtcattggcgccaggtgttgtttccgcagtaccgctatgactttccgacacattatatccgacacttgagaaaggcaatagccccacactcattgctattctaggatgcaagcggaattgcattgccagatagtcaaaactagagttcttagcgttcagcttcacaccgccgttattgacattcatattttgcagactgacacctccttcgaaaatgaaagtcagagagtcaatggctgtatacgaagcaggattcaatggattgatctgcgctccatcacggagtccaaaagcaattcctcccatcgccttgctatttccgaaactttgatcggacaaatcgccatagccatatcgtgtataaggagagtttgtattattttgagcaattgccattccggtaaccatcgtgagcaaaagcgcacatagtgtgtgtttaaatcctaccattattatagtttaaaattctatttaatcctttcaacactaaaaatctatctgcaaagatgatactttttacgctgctatcaaaagaaaattcatctccacccgttaaaaaaaccaaaagttcaggatatttatgcttcatagactcaatataacctgaaatttcgtattccatcccttttaagactccggcacgtatagccgtttcagtatcccgtcccatcgggagtttgcgcccgttggtatccaccagaggcaaacgtccggtgaactgctggagcgctttgaaacgcatttgcataccgggagaaatattaccgccatgatactgacctttcgagtcaatgaactcataagtaatacaagtccccgcgtcaatgactaatatatttctatgcgggaactgttcattcgcacctaccacagcagccatacggtcgtatcccaatgtttcaggagtttcgtacaagttgaccaccggcagaggtgtctcatgattcaaccaaagtaaaggaaactgcaaagcagccagatccgccaacacccgttcgttcaaatcaatgacagtagccacaatcccctgattcaccggatatttggcgcaaagtgttttcaagcaatccaatgactgattggattctgtgagcacttccaccatctccccgtcattgaagagagcgactttcgccatcgtatttcctatgtcgataattaaattcaatgcgttttttatctttagcgggcgcaaaggtatagtaaaaaaagaaaagatgaagcatacgaaaagaattatcttatcaaaaacgttgcaaaccattgaaatataagtaatttcaccatacttgtatacttgaaagctttatagattttcatacatttgacaagttccgattagctataatgaaaacaaaattagctataaagagatgaccactgtgcagcacagggtatcttgagggtaaaagcctatgattttctttatgtaataacgtacacggacgcaggcgcgagagaacacgctttttttctaataaatataataatatagagaaaacaataagtagtatacatcgattcttcgtatattcgccgccgaataaaaagaatttccccaaaagaaacgtccgatgaaacgatttaatgactttttccgctgtatgtcgccgcttgtgctattcatgttgttcttttccaccactgatgtgtccgcaatgaaaagcaacggtccggccgcagacggtcatgactccatccgtatcagcctgctgacctgtgctcccggcgaggaaatttattctctgttcggacatacagccatccgttacgaaaatccttcacaagggattgacgtagttttcaactacggtctgttcagcttcaacacccccaacttcatacttcgcttctctctcggagagacagattatcaactaggcgcaaccgattatgctcattttgcggcagaatacgcattcttcggacgtagcgtatggcaacagactctgaacctgaccgaaagagaaaaggccgaattaatccgtctgctacaagagaattatcgtcccgagaaccgagtgtatcgttataattttttttacgacaattgcgccacccgcccccgcgacaagatagaagaaagtattgccggaaaagtgatttatcccgcaaaaccgcaggacggctcacggtctttccgcgacatcgtgcatcaatattgcaaaggtcatccgtgggcacgcttcggcattgacttatgtatcggaagcgaagcagaccgtcctatcacacagcgacagatgatgtttgccccattttatctgatggacgcttttgccggagcgcaaattgagaatgactccattcagcgaccgcttgcggaagccgcccgactgattgtagacgccactcccgggacggatgaaagcggctggatattcactccgttacaatgcgccctgcttttatttatattgacagtcggcgctaccatctacggtatccgtcgaagaaccggactatggggagtagacctcttccttttcagcgcggcaggtatcgtaggttgtgctcttgcctttctggcttccttttccgaacacccggccgtcagttccaatttcttattgctcgtgtttcatcccggacaacttcttttccttccctacatcatttattgtgaccgaaaaggaaagaaatgttggtatctgaccttgaatttgatcgttttaacactttttatagtgctttttccgctaattccacaaagatttgacttagctgttgtacctttggcactcagtttgctggtacgttcagtgagcaacttaattgtgacatctaaaaagaaataatgaaaggattactgacttcccttatcgccgtacttaccttcaccgggctacaagctcagtcgttgcctgccgcacccaagctcgtggtgggactaacgattgaccaactgcgtacggactacttggaagcattctcatcactttacggggagaaaggtttcaaacgcctttggaaagagggaagagtgttctataatgccgaatatactttcagcggtgtagaccgctcgtctgccatagccgccatttacagcggaacgactccctccatgaacggaatcatctccaagcgatggatggacgcggctaccctacgtcctgtcaacagcacagacgacacggctttcatggggtactataccgaccagacgtgttctccttccaaattattgacttccaccattgccgatgagctcaaaatagcgactcaaggcaaggggcttgtatatgccatcgcccccaaatgtgacgcggcgattcttgccgccggacatgccgggaacggtgctttctggctcaatcccaacacgggaaaatggagcggaacaacttattacggagaatttccttggtgggcaagtcagtacaacgaccgccaagccgtcgatttccgtattgcgaatatcgtatgggaaccggtatttcctcgcgggatgtacacattcttgccagactggcgggatatggttttcaaatataaatttgatgacgaccgcaacaacaagtaccgccgtttcatcaccagccctttcgtgaacgatgaagtgaatgcgcttgccgaagaagcattgaacaagagttcaatcggcatggacgacattactgacttattggcactgacttattatgccggcaactacgcacataaatccgtacaggaatgtgcaatggaaatgcaggatacctacgtgcgcattgaccgtagcattgccaacctgctcgaactgctcgacaggaaagtgggcttgcagaacgtgctcatcttcgtcacttccaccggatatacagacagcgaatcgtctgattcgggattatacaaaattcccggaggagagttctacctcaaccgttgcgccgctttgctgaatatgtatctgatggctacgtacggagaaggaaagtatgtggaaacttatcacaaccaacagatttatctgaatcataagttgctggaacaaaagcaactcaatctgacggaagtacaagagaagtccgccgaattcctgatgcaattcagtggagtgaatgaggcatattccgccaacaggcttctgttgggttcgtggactccggaaatccacaaaatacgtaacggatatcatcgtaaacgctcgggggatctggtaatcgatgttcttcccggatggtcaatcgttgacgagaacagccacgagaacaaggtggtacgccattcgttcatcccctcaccgctgattttcatcggtcactcggtgaaaccggctatcatacagactcctgtaaccattgaacatattgcgcctacactggctcatttcatacgtatccgggctcccaatgcctgcaactccgcccctattaccgacttgcggtaaaagtttactcataaaaacagggtgcaaaacataaataaatcagcattttaatgtaactttgcagggattatccaccatggattccacagattcactcagattgaaaagaaaaatctgtgtcctgtataaaagatccgtgagaatctgtgaaatccgtggtgcaaaaaagataaataataaactaaataatagaacatgggatttaatgaatttttaagctcgattttcggaaacaaatccacacgagacatgaaagaaatcaagccctgggtggagaagattaaagctgcctacccagaggttgagaaactggataacgacgcactccgcgcaaaaacggaagaactcaaaaaatatatccgcgaatcagcaaccgccgaacgtgcgaaagtagaagaactgaaagcgagtatcgaaagccttgaactggaagaccgcgaagaagtatttgcgcaaatagacaagatagaaaaagaaattctggagaaatatgaaaaagcattggacgaagtattgcccgttgctttctccatcgttaaggcaactgccaaacgttttgccgaaaatgaagaaattgtagtgactgccacggaattcgaccgccagctcgctacaacaaaggattttgtacgcatcgagggagacaaagccatttatcagaatcactggatagccggtggtaacgacacggtgtggaacatggttcactacgacgtacagttgtttggtggtgtcgttctccataaaggcaagattgcggaaatggcaaccggtgaaggtaagacattggtagctaccctcccggtattcctgaacgcattgaccggaaacggtgttcatgtggtaaccgtgaacgactatctggcaaaacgtgactccgaatggatggggcctctctatatgttccacggtctgagtgtggattgtatcgaccgccatcaaccgaactccgacgcacgtcgtcaggcatatctggccgatatcactttcggaacgaacaacgaattcggtttcgattacctgcgtgacaatatggctatcagtccgaaagaccttgtacaacgtcaacacaactacgcgattgtcgatgaggttgactccgtattgattgacgacgcacgtactccgttgattatttccggtcctgtgccgaaaggcgatgaccaattattcgaacaactccgtccgttggttgaacgtctggtagaagcgcagaagatattggctaccaaatatttgtctgaggccaagaagctgatcgcaaccggtgacaagaaagatatggaagagggattcctcgctttgtaccggagtcataaggcattgcctaaaaataaagcgttgattaagttcttgagtgagcaaggcatcaaggccggtatgctcaagacagaggaaatttatatggagcagaacaacaagcgtatgcatgaggtgactgatccgttgtatttcgtcatcgacgagaagctgaacagcgtagatttgacagacaaaggtgtagacctgattaccggcaactcagaagacccgaccttgttcgtactccccgatatcgccggacaactctcggaactggagaatgtgccggacctgactaacgaggaaaaacttcagaagaaggacgaactactgactaactacgccattaaatcggaacgcgtacatacgatcaaccaattattgaaggcgtacaccatgttcgagaaagatgacgagtatgtggttatcgacggacaagtgaagattgtagacgaacagaccggacgtatcatggaaggccgccgctattctgacggactgcatcaggctatcgaagcaaaggaacgcgtgaaagtggaagctgctacgcagactttcgccacgattactttgcagaactacttccgtatgtatcacaagctgtccggtatgaccggtactgccgagacggaagcaggcgaactttgggacatttataaattggatgttgtggtaatcccgaccaaccgtccgattgcccgcaaagacatgaacgaccgcgtttacaagactaagcgtgaaaaatataaagccgtgatcgaggaaatcgaacaattggttcaggcaggacgtccggtgttggtaggtaccacttcggtagaaatctccgaaatgctgagtaaaatgctgaccatgcgtaagattgaacataatgtattgaatgcgaagttgcaccagaaagaagccgaaatcgtagcgaaagccggtttgagttgcgcggtaacgattgcaaccaacatggcaggtcgtggtacggatatcaaactaagtccggaggtaaaggctgcgggcggtttggcgattatcggtacagaacgtcatgagtcccgccgtgtagaccgccagttgcgtggtcgtgcaggacgtcagggtgacccgggttcttctgtattcttcgtatcactggaagatgacttgatgcgtctgttctcttccgaccgtatcgcaagcgtaatggatagactcggtttccaggaaggcgaaatgattgagcataaaatgatttccaactctatcgaacgcgcccagaagaaggtagaagaaaacaacttcggtatccgtaagcgtttgttggaatacgacgacgttatgaacaagcaacgtacggttgtctacacgaaacgccgccatgcgctgatgggtgaacgtatcggtatggatatcgtaaatatgatttgggatcgttgcgcgaatgccatcgaaaataatgactacgagggttgtcagatggaactgctccaaacgttggctatggaaactccgttcacagaggaagagttccgcaacgagaagaaagagaaattagccgacaagactttcaacattgcgatggagaatttcaaacgcaagaccgaacgtctggctcaaatcgctaatccggttatcaaacaagtatatgagaatcaaggacatatgtatgaaaacattctgattcctattacggacggcaaacgtatgtacaacatctcttgtaacctgaaagcggcttacgaatcggaatcgaaagaggtggtgaaatcattcgagaaatcaatcctgctccacgtgatcgatgaagcatggaaagagaatttgcgtgaactggacgaactgaaacattcggtacagaacgccagctacgaacaaaaagacccgttattgatttacaagctggaatccgtaacgctatttgacgcaatggtgaacaaaatcaacaaccagactgtgtctatcctgatgcgtggacaaattcctgtacaggaagctccggacgaaccgtccgcacgccgagtagaagtacgtcaggctgctccggaacaacgtcaggacatgagcaagtatcgtgagaacaaacaggatttgaacgatccgaaccaacaggctgccgccaaccaggatacccgcgaacagcagaaacgcgaaccgattcgcgccgagaaaacggtagggcgcaacgatccttgtccatgcggaagcggtaagaagtacaagaactgtcacggaagaaatctttgatcaatgaggtaaggagcagacgacagaatttgtacccggcgctccctatcttccgattataaaagaaagccttaaacggttaaaaactgtttgaggctttcttttgttctttcaaaatagtacttttgttcaaactactaaatgtattaaattgtattgactatggcaaaatcttattcattggcattcgtttctctgtttctattgctattcggcagctgtcaaagtatagaacagatttccattgattatctgcaacctgccgatttgagttttcctcctcaacttcgtaaagtggccatcgtaaataatacaagtaatgcaccggacgataagctgactccccaaactaaaaaatcgaaagacaatagagttgaaataagccgtgccatagcttatgccaatggcgatcctaaggttgcgacagaagcgatggcggaagaaatagcgcatcagaactactttgacgaagtggtgatttgcgactctgccttgcgggcaaacgataaaatctcccgtgaaagtacgctttctcaagaggaagtccgccagctagcttccgatctgggagtagatctgattattgctttggaaaatctgcaattcaaaataacgaaaacagtacgttacttggaggaattcggatgttatcaaggtgcaatagatgcgaaagtctatccaacggtatccgtatacctgcccgaacggagtaaaccgatggctactatccgtctcaatgacagcattttctgggaggatttcggaatttcacctacagaagccgccgcacaaatcatccccacaaaagatatgctgaaagaggctgctgagttcgcaggaaccgtacccgtaaaatatattgtccctatctggaagaacgggaaacgttatctgtataccggtggctccgtccccatgcgcgatgcggctatttatgtacgcgaaaattcgtgggacgaagcatacggactttggaatcaagcctaccaatcgactaaaaacgaaaagaaaaagatgcgtgcagctcttaatatagctgtttattatgagatgaaagatagtctggcaaaagcggaaaaatgggctactaccgctcaacaacacgcccggaaaacagaattgaaaaagaataccgacaacaataaaatcaataccgacgaagcaccgaattacttctacatcagcctctatttaaccgaattgaaggagagaaacgcccaattatccaagcttaagctacaaatgagccgatttaatgatgatttttaaagaaatcgtgtatcaaatcttattttttttatacctttgagctaacaaaaagaaggaatccatgaaattgagcgaacaatcactatctattatcaaatcggctatccaaaaggcagtcgctaaatacacctgtaactgtgaacaaacagcagtaaccgatatccacctccaaccggaccagacttcagggcaacttaatgtttacaacgatgatgatgaagaattagccaacgtcatgatagaagaatgggctacatacgacggtgatgattttttggaaaatgtagaaccttctttgcgcagtatcctgtgcagaatgaaggaggcgggggacttcgagaagattaccatcttgaagccttactcattcgttctggtagatgaagaaaaagaaaccgtagccgagctattattaatagacgacgatacgatactggtaaacgatgaacttctgaaaggattggataaggaattggacgatttcttaaaagagctgttagaaaaataaactccttcactaattacaattctttctatcaagctggaggatgtaaattaaactgtgtcag

SEQ ID NO: 11858 - DNA, 12742 bp, Unknown
  gut microbiota DNA sequence
aatctccttgtaccataatctctccgtctttagccgatccgcctactccgcatttgcttttcagtagcttacccagctctttcaagtcgttttccgtacctataaatccggtaattaatgtgaccactttaccgcaccggttctttttgtcaatggaaactcgcaggttttgtttgtttttgtcgagaataacttgctcttcatcgttgtccatttcatagccgaagtccggattcgtggaatatactacgtttaatctatctttccaatcattctttttcatactcgtcatatttatttcttctcaaaagtatcaaacttatggaaaagggcaaaatttgagcctgttttccttgttttgtttaatctctattaaggttttctgttatagggttgtcagtctcaaaaaataatgtacttttgcaaaataccaaattttgtaagaagtatgagcacttatatacgaaaagaggcggataaagtgccggagcctaccttgcgcagacttccctggtatctgtccaatataaaactaatgaaagaaaaaggagagcaatatgtctcctcgacacaaatctctaaggaaataaatattgacgcttctcaaatcgccaaagacttgtcgtatgtgaacatatcgggacgtacgagagtgggctataatattgatgcactgattgaggttttggaaagctttcttggatttactaatatgcacaaagcctttttgtttggtgtaggtagtttgggaggtgcgttactccgtgacttgggtttgcgtcatttcggtctggaaatcgtggcggcttttgatgtcaatccggaattggtagggaaggacttaggtggaattccaattttccattctgatgactttgaagcaaagatgaaggaatatgatgtgaatatcggtgtgctgacagtacctattaatatcgctcaggaaattacaaataagatggtagacggaggaataaaagcagtgtggaactttactcctttccgtattcgcgtgccggaaaatattgtcgtacagaacacttctctttatgcgcatctggccgttatgtttaaccgattgaattttaacgagaaataatgaagattatcgcagtaggaatgaactacgctcagcataatcaggagctgggacatacacaggtaaatacggaaccggtcgtttttatgaagccggactctgccattttaaaggacggcaagccgtttttcattcctgacttttctaacgagatacattatgagacggaattggtagtccgtatcaaccgtttggggaagaacatcgctcctcgttttgctaaccgctattatgacgccgtgactgtgggtatcgattttactgcccgtgatcttcagcgaaaattccgtgaacagggaaatccttgggaactttgcaaaggcttcgattcttcggcggctatcggagattttgttccggtagaccgttacaaggatatccgacatttgaacttcaatctgttgattgacggtaaagaagtgcaaaaagggtgtacggcggatatgcttttcaaagtggatgacatcatagcgtatgtcagtcaatttgtgacactgaaaataggtgatttgctatttacaggtacacctgccggtgtaggtccggtcagtatcggacaacatttgcaaggatatctggaaggggaaaagctattggacttctatgtccgctgatggaggaaggtaaattatgaggataagagtaggctttggtttcgatgtgcaccaattggttgaaggacgtgagctgtggcttggaggcgttcttctggaacacacaaaaggattgctggggcattcggacgctgatgtgctattgcacgccgtctgtgatgcattgctgggagctgcgaatatgcgtgacatcggttatcactttccggatacagcgggagaatttaagaatatcgacagcaaaatccttctgaaaaagaccgtagaactgattgcttccaagggatataaggtcggtaatattgacgcgactatctgcgccgaacgcccgaagctgaaagcgcatattcctttgatgcaggagacaatggcaaacgtgatgggtatcgatgttgatgatatttccattaaagcgaccactaccgagaaactcggatttactgggcgggaagaaggtatctcggcttatgccacagtactgatagaaaaggattaaactgtcgtggtcataacaagtttgacgtgactgatacgggtatactttgatccgtaactttcgtatcggcgtgacacccgcgcagatgcgacataaatgatttctcccggtcggtattcatgttctatcccggatagtgtgcatgaaaccgcactgggattttttgacggtatactcatgataaccaggttgccgcttgcatcggccaatgtcagtacctgctttacaaaaaattgtggtacagtaccatttattcttgtcttatacggatcatcttccaatcgcacccgtatgacttttaatctgaggtccgtgagtttctcccctagttcacccaaataccggcttactgaatgtttctctttcgacttcctttgcatgaggtctaaatgtacggagtgataagcttgcgctatcttgacgaaacgttcctgtttggggattctcggtgtaaacttataggctatccaactcaaataagccggatccactttcaatatctcatgtaggaaatgtccccgatacttcccgaaaaagataaggtcgtcgccattgctttgcattctcttttcgttgtaatctacaagaatcaggcatcgccttgaataatagaacatagtacttgccatgcggagggattcgttgatgtccggtgacaaatcatgtatgtaaaggatggattgtttttccggtagaggagaataaagccataacgaatagttgggtttacctggtcggggtaataccaccaagtaaactcccgcctctttgaaagaggccctgcctcggttgtattcattcagtttggcatacaataaggcttgctcattttcggaaatgcccggtaatcttgggttagccataattgttcttgcttttgtatatctcaaatataaggattttcttccggaaaagcaagaattctctttgaaatctcgtacatttgtatccatgtaacttttcaaagatcagatgaaagaacgaaataagagagtgctggtgggtatgagtggcggtatagacagtaccgctacctgtcttatgctgcaagaacaaggatacgaaatagtgggagtcactatgcgtgtgtggggagatgagccgcaggatgccagagagttggctgccaggatgggtattgaacattatgtggcggatgaacgtataccttttaaagagactattgtaaaaaacttcatagacgaatataagcagggacgtacaccgaatccttgtgtgatgtgcaatccgttgtttaagttccgtgtgttgacggaatgggcggataagttggattgtgattggattgctaccggacattattcacggttggaagagaaaaacgggcatatttatatcatagctggagacgatgataaaaaagaccagtcttattttctttggaggttgggacaggatgtgctgcggcgttgtatctttccgttgggggcttatacgaaaataaaagtgcgtgaatacctggctgagaaaggctatgaggctaaatcgaaggagggggagagcatggaagtatgtttcattaaaggagattaccgcgactttctccgcgaacagtgtccggaattggatagcgagatcgggccgggatggtttgtcaactccgaaggtgtaaagttggggcagcacaaaggggcgccttattatactataggtcagaggaaaggactggaaatcgcgcttggaaagcctgcttatgtattgaaaatcaatcctcagaagaatacggtaatgcttggcgatgcggagcagttgaagacggattatatgttggcggagcaggataagattgtggacgaacaagaactgtttcagtgtgagaacctgacagtacggattcgctatcgcagtcgtccgttggcttgtcgggtgagacgtcttgaagacgggcgtttgcttgtccgttttcttgaaacggcttcggctatagctcccggacaatcggctgttttttatgatggaaagcgagtgttgggaggagccttcattgcttcacagcgtggaataggtctggtgattctggaaaacgaaggattttaattgataaaataaagataactgatgaagaagttcatactattgattcttactttaactgtgtgcttgggtggattcgcccaatttactcccggagataccttgaagtatcgtatcagtctgaaagacaaggctgctaccgattattctttgcaaaaaccggaaaagtacttatccaaaaagtctattgaacggagaaagaaacaggggttgaagattgattccaccgatttgccggtatgtaagaaatatgtagacgctatccgtcggaaaggagttcacatacttgtgaccggaaaatgggagaatttcgttactgtctcttgtaatgacagtgtgttgatagatgagattgcccggttgccttttgtgcgctctgcggaaagagtatggaaaggtaatatggaaaaagctacccgaagagattcgctgattaataagccgctgcgtacagacagcctttacggtcctgcgtgcacccagattgagatgagcaaggcgaacctccttcatgatgcgggtttcaagggaaaaggaatgatgattgcggttattgatgcgggattccataatgtagataagattgaagcgatgaagaatatcgatattcagggtgtgcgtgactttgtaaacccggaggcggatatttatgcggaaagcagtcacggtatgtctgtcctttcctgtatggcgatgaatcagccgaatgtcatgatcggtacggctcccgaagcttcttattggttattgcgcagtgaggatgagtattcggagaacttagtagaacaggactattgggcggcagctattgagtttgccgatagtgtaggtgtggatttggtgaatacatcactcggatattattcctttgatgatccgacaaagaattataggtaccgtgatctgaacggacattatgcgttgatgtcacgtgaggcttcccatgcggccgataaaggaatggtcgttgtttgcagtgccggaaactccggtgcgggttcgtggaagaagattacccctccgggagatgcggaaaatgtgatcactgtaggcgccattaataaaagaggtgagttggctccgttttcttccgtaggaaatacggcggacggacgggtgaaacctgatgtggtggctgtcggtctgggatcggatgtgatgggaacgaatggcaatcttagccgtgccaacggtacgtctttctcttctccgattatgtgtgggatggtggcttgtctgtggcaggcttgtccgaagctgacggcaaaagagataatcgaacttgttcgccgttcgggtgacagagccggtttccccgacaatatttatggctatggcatacccgacttatggaaggcttatctagactcctcctctaaggaaaagaaataagatggctgctgtatgataaacactatgaatcagtcgaaacggtcagcccccttctcttcgggggagggtggagaaagactttctcttttggagctgaatgcgcttgtccgccgtagtctggagcaatgcctgcctgatgaatattggatacaggctgagctgagcgatgtccgttccaatacgacaggccattgctatctggaatttgtgcagaaagatcctcgcagcaatagtcttattgctaaagcacgcggtatgatttggaataccatttatcgtttgctgaaaccctatttcgaggaaacgaccgggcaaccgtttacatccggcattaaagtgctggtgaaagtgaccgtccagtttcacgaactttacggttacagtctgaccgtgctcgatattgatcctgcctatacattgggagatatggcccgtcatcgtcgggaaatactgttgcagttggaggaagaaggtgtactgaccttgaacaaggaattggaaatgcctcagcttcctcaacgtattgcggtcatctcttccgctactgcagccggatacggtgatttttgtcatcagttgcagcacaatcccggagggttcttcttttacacagaactgtttcctgcattgatgcaggggaatcaggtggaagaatctgtgttggctgcattagaccgcgtcaatgcccgtattgatgattttgatgtggtggtcatcattcgtggcggaggggctacttccgatttgtccggtttcgatacttacctattagctgctgcatgtgcgcagttcccgcttcctatcattaccggaattggtcatgaacgagacgatacagtgcttgattcggtagctcatacccgagtgaaaactcctacggctgcggcggaacttttgattcatcgggttgcggaagtggcggaccgtctggaggatttgtctgttcgcattcggcaaggagcatatatgctgttggagcgggagcggagaagattggatacactgcaggctcgtatcccgaaccttgtacagcggaaactgacagagacgcgttttgccttgctgacagcccgaaaggatctgtcgcaagccacaatggcgttattgtcccgccagcgtcaccgattggaacttttgcaacaacgcattgccgatgcttctcctgataaattgttaagtcgtggatacagcatcacgctgaaagatgggaaggcggtaacggacgcatcctcattgaagtcgggagacagattggtcacccggttctcgaaaggggaggcgcaatctgtggtagagcaaagccgtcttatcggaactgataaaagaaacaaatctcattaactcttaataaatataacgatcgtggcagcaaaaaaagaaacctatcttcaagcaatggaacgtctcgagaagattgttcgccagatagacaataatgaattggatattgacatcttgggtgagaaaatcaaagaagccaatgaaataatagctttctgcaccgaaaaactgacgaaagcagataaggaagtcgaaaaattattgcaagaaaagcggcaatctgaagaataaaagctatttttgcgaatcaatacataagaaaaataaactaatacgttacaatatgaaagaaatagactgggcgaatctgtcgtttggctacatgaagacagactacaatgtgagaattaatttccgcaatggagcatggggagaactggaagtgagcagtgacgaacatctgaatctgcacatggcagctacgtgcttgcattatggtcaggaagcgtttgaaggcttgaaagcttttcgtggaaaagacggtaaagtgcgtattttccgtttggaagagaatgcagcccgtctgcaatctacttgtcagggaatcctgatggctgaacttccaactgaacgtttcaaggaagctattctgaaagtggtgaaactgaacgaacgtttcattcctccatacgagacaggtgcttctctttacattcgtccgttgctgatcggaacaagtgctcaagtgggggtgcatccggcaaatgaatatatgtttgtcgtatttgtgactccggtaggtccgtacttcaagggtggtttctctaccaatccgtacgttatcattcgcgaatatgaccgtgccgctcctcacggaactggtatctataaagtgggtggtaactatgccgccagtcttcgtgccaacaaaaaagcgcatgacttgggttattcctgcgaattctatctcgacgcaaaagaaaagaagtatatcgatgagtgtggagctgccaacttcttcggtatcaaaaataacacttatatcactccgaagtcaacttccattctcccgtctatcacgaacaagagcttaatgcagttggcggaagatatgggtatcaaggttgaacgccgcccgataccggaagaagaactggagacttttgaagaagccggtgcttgcggaactgcggcagtaatcagcccgattcagcgtatcgatgatttggagaatggaaaatcatacgttatttctaaagacggaaagccgggaccgatttgtacgaagctgtacaataagttgcgtggtatccaatatggtgacgaaccggatacacacggatgggtgacaatcgtagaataatacagatttcaccacagattacacggattaacgcagattatttcttctttttaatctgtgttaatccgtgtaatctgtggtgaaaataatcctcttcttttttctttttgccgattacgtcaaaatcagtacctttgcagcctaatcaggattgatatgggtaagaacaaattagaaaagtttgccgatatggcaagttatccgcacgtcttcgagtatccttattcggcgatagataacgtgcctttcgatatgaagggaaaatggcatgaggagtttttcaaaaacgatcatcctattgtactcgaactaggctgcggacgtggtgagtacacggtcggtttgggaaagatgtttcccgagaagaattttatagcggtcgatatcaaaggagcccgtatgtggaccggagctacggagtcattgcaggcgggaatgaagaatgtggctttcctgcgtaccaatattgagattatcgaacgcttctttgctgagggtgaggtgagcgaaatatggcttactttctctgatccgcagatgaagaaagcgacgaaacggctgacttccacttactttatggaaagataccgcaagttcttgcgaccggacggcattatccacctgaagacggacagcaatttcatgttcacttatacaaaatacatgatagaggcgaaccggcttccagtagattttatgaccgaagatttatatcactcgggattggtggatgatattctcggtatcaagacctattatgaacaacaatggctcgatcgtggtttaaacatcaagtatatcaaattccgtcttccacaggaagggaagctgcaggagccggatgtggaaatagaacttgattcttatcgcagttataaccgcagcaagcgtagcggactaaatacaagtaaatagaactgcataaatatggatcggacctacgcatctcctcctatcactcaaggagcctgcgcatctccctctttaatatttaatatttaatttttaattgacatgactctttatcctaaattaatattggatgcattggcaacggtgcgctatcccggtacgggaaagaatttggtagaagcggagatggttgccgataatctccgtattgacggtatgtttgtcagtttttcattgatctttgagaaaccgaccgatccgtttatgaaatcaatggtgaaagctgccgagacggctattcatacctatgtgtctccggatgtgcaggtgacgattgcgacagaaagtaagcaagctccccgtccagaggtgggcaagatgcttcctcaggtaaagaatattattggtatctcttccggtaaaggtggagtaggcaagtctaccgtgtcagcaaatctggcagttgctttggcgaaattgggttataaggtaggtttgctcgatgcggatattttcggtccttccatgccgaaaatgttccaggtggaagatgcgcgcccgtatgccgagcgtatagacggtcgtgatctgattattccggtagagaaatatggagtgaaattattgtctatcggtttctttgttgatccggatcaagctactttatggcgtggcgggatggcaagcaatgcgttaaaacagttgataggtgatgcggcttggggagatttggattatttcctgatagaccttcctcccggaaccagtgatattcatctgaccgttgttcagacattggctatgacaggagcgattgttgtcagcactccgcaggcggttgccttggcggatgcccgtaagggaatcaatatgtttaccaatgataaggtaaatgtgcccattctcggtctggttgagaatatggcatggttcactcctgccgaacttcccgaaaataaatactatatcttcggcaaagaaggtgccaagagactggctgaagagatgaatgttcctttgctgggacagattcctatcgtgcaaagcatctgtgaaggaggagataatggtactcctgtcgcattggatgaagattctgtgaccggacgtgcgttcctttccttggcagctagtgttgtccgtcaggtagatcgtcggaatgtggaaatggctcctaccaagattgtagagatgcataaataagagtttgtaaaagaactgtatcgtaatgaataataaaacgcagattaacgcaaattatcgtagggtatttcaattatatatttatcaataacttgtaaaattgcttctacgatatttgcgttaatctgcgtttcgtttattcattatgacaatcctcttctggatacttcaaaacccctttcataccatattcggaactatttactcaaagttttcagtaactgctttttcatcgtttctactcccggaaatcctgtcttcttataagtgatattgccctcagaatcaatgataaaataggtagggactccctctatgttaaggttggacatcagaaaattccattgttcgttggttacgcggaaatgctcaccgtgaatatcggaaatcatattttcccatgttcctttgggagacgtttcgcctgtgatgtaaagatagataatgtctttctctttcaattcctctttcatcggggcgattgctttattggccattcggcaaggaccgcaccaggttgcccaaatatcaaccagtaaagtgtgtccgcgaaacttggaaaggatggatgggaacaaatcttcattggagacttctcccgcttcattgatagtaaatccactcttccttttgttcaattctattttctttattgtttctttgttcgtttgagtaagcatttcggtatacgccggagaagacaacttctttatttctatctcctgatctgctgtcaatggaatgaaatctttgatagaatggtacagttcgttgaatcttatataatcaaataatggcccttgattcgttcctaacgtttctttaagtattttccgatagttcggcataaaactgatcagatagattgttgatgcatactgcctgctgtataacgctttgagggtattgatggaagtaaattcctttaatatgtcatagtatccttcgggaatatcaatatgcgtattggaaaaatattcgtttgctttttctctattcaacttatttacagcaatataagcagattttagctctctgtctgtcatcgcgatttttccggttgctgccagatctacctgtatgtttaatagttctttgcatgcattgctataggaagattgttctatcgctttccggatggatggaagacgttccaatacgtaggctttatattcatctgcgcttttccctgcaatggcgttgtacatatccatgtagaaaacactttttaatgtgatatcaatatctactgaagccagttcttgttgcaagctggccagatatccgttgaagtatacaggttctccgaatgttttatccttcttttgcagatgtgtctgcctacggcaaagttcttttgtgttgataatgagagatgtttcttcattgggggctatcaggcattccacccagccgaaaggcatctccaatgcaacgcttgtgacggacgctacttttacttctgcttgaaagctgccatcctcctcgatttttataatattctgttcgttgtggatattcgatgcgggactttctatatgcatccgcatctgtttcatcatatctttctgataatcgaggattttccctttcaaagtagcggtagcataagctaacttaggggtgggtaatgccgcttttttgtttattttgtgcttgaccgcttctttaggaagtttttgcttgtaaaatgcgtttctatctagttgtattccccatatcttgtacgctccgtcaaaatctccttccgagaaatcaagactagttacattttgaggaatgggaggaaacaataattggaattcggcttctcctgattccggcatccagaattctttgtccaatgtgattccaactcccttgcggatagggtaaagcattccgttattgtctcttagaaaactgcctgtcgcaatttttatccaatatttagggcgataataagctttgatgtatagggtggtaactgtatctcccataacaattttatcaatctcaatgctattggaactccaggctagaaaaggaggacgttcaatcactctgtcttgggcttgtacaccgtaaacggtgcaaagtagcaaaccgataatccatgcgaaacttctcatatctatataatgtttcttaatacaacgaacaaatataagaatattcttgtgactacctgttggtttataataaaatatgtgtgtttgttgcaagaatgtttcaatgacattatttcgacaaaattattaagcacgaaaaatgataggataaacactatttttgcctaaatagtcacactttaatctgattatccgtttatgcacctgttatattcg

SEQ ID NO: 11859 - DNA, 37541 bp, Unknown
  gut microbiota DNA sequence
ctactgttgatttggaccgtggttctcgtccgcgcactactaaaatccgtgtggaatggatgatgaacccggatttcgatattcgtacggctaaaattcatttcacaccccaaaaggccgatgatcaactggaacagcctgccgtggtgacagtcactcagaaggcttcaccgaggattgaagataaccgttcgggcgactcattggcattgctcactatcagggaacgtctggaagtaggtaataactggaatccgggagaaaatatgaggtattgggacaatgtcgtattgtgggaagaagatgacaaggatcttccgaaaggggaaaatgtcgtgggacgcgttcgctccgctactttcaatatgattaataccaaagaatccattccgcaggaagtgcattacctgacgtatctggagagtctgactttcttcggcaacacgaatacggcaactaagagcattacgttggaagcggatgtatgcagtaatttaaagtatctgaagtcattgactgtcagcgcttacgggctgatagcgctttcggacgattttgtccaactaggcgatcggctcgagacgttggacttaagtagtaacaactttaattccgtacctgcagttataacgaaagagaacttcccgaaactgaagtcgcttaacttgactggcaacagaagatcggttctttccgaccttagagaagccaaggatagcagcaagtatccggatggtatcggtctgttctttaatacgaaagaggataatacgcttcgcagattattcctgtgggataatctggaagagttaagattgtcttacaattttattgaaggtacattgcccgactttaaaataggagaggaaggagtgaccggttactcacaggacgatgtggatgcatttggcggtgataccattcaatatctggtaaacgaaggtgtcaacattcccaaaatccttccgaagatgaaacggcttagtgtcaacctgaacttctttaccggcaatctgcccgactggatgttgtatcatcctcatctgatagattgggatccggagatattgatctacaaccagatggaaaaaggattgaattcggaaggaaaaatggtaaggtttgataacgaaccgtctacattcgacgcgtattttaaagccttccctaaattcaaggaaaaatatgaactcaaagaataggatatgaagagaatatatatttatgtaataacagcgtttgcattgctggcgggagcttgtagtgacaacaacctgaacgatgacgctccggtggttcccgctactccggacatagtgataccggaaggagctgccgaaggggagttattgattaagttcgttcccgaaatgactgaaattctcgaccgcacgatgaaaacacgtgcggcgggagcctccacccggtcgggcattccctcaacggacgaggtgctctctatcttgggagcgtatgactttgaacgcgtttttccagttgattcgcgcaccgaagaaaagagccgtgaggcgggattgcatctttggtatctggtacgttttgataaaaatacggatttgaaggaggctatggaaagattgtcaggtttgggtgagatttccaaactccagataaatcctgccattcagcgtgcctataatcccaagaagaaacctgttccggtgtcggaagcagcccttaacaggatgagaacccgcgcggcagcagacaatggtttcaagttcaatgatgctttgttaccgcaccaatggggatacatcaaccgtggagcgtatgactttgcaacagagaaggctcctgctattgttggctccgacgttaattgtgaggaagcatgggaactgtgtacgggtgatccggaaatcattgttgccgtgcttgatgaaggagttatgtatactcatgaagatttgacggataatatgtgggtgaatgaaaaggaacaggttggttctgaccaggataatgacggcaatggttataagggtgaccgttatggttacaatttcgtgaaagataacgggaatatcagttggcaagctgccgaagataccggtcacggcacgcatgtggcgggaacgattgctgccgtgaatggtaataatataggagtctgtggcattgccggaggaaacggaaccaaagggggagtacggattatgtcctgccaggttttcgatggcgatggtcaggtgaggatggttaatgaggcaagagctatcaaatatgcggccgacaacggtgctgtaatccttcaatgcagttgggggtacaattctgcttattccaatccgatgctaggatatgtgcctggtcctgccacagacgaagaatgggcaaaaagttatcctttggaaaaagaagcgttggactactttattcataacgcgggttctcctaatggggtaattgaaggcggactggctatttttgcttccggtaatgaatattcgtatatgtcttcctatccggcagcttacgagggatgtatttcggtagcttcgatcgcagccgattacacaccgtcgtccttcagcaactatggtgcggaagtggatttctgtgctccgggcggtgacagtgaatatcattgcgtcccgggaaaagatactgatggtaatgatgtgagcattgaccagggaatgattctctctacgttggtagtggaaggcaaacaagcctacggatataatgagggtacgtcgatggcttgtcctcatgtatcgggagtggctgcattaggcttgtcgtatgctttgcagcaacgccgccacttcaaagcacaggagtttataaatttgatgaagcagacagcgagagaggtggattcatattacaaaggctataagacctattattatttgcataactctccgggatggtcggcaacaaaaatggatctgccttcttacaggggtaaaatgggtaagctggtcgatgccggtgctttgctgcgtgctattgccggaagcgggtcggatatgaaaataccgaatctgtatgtaggaaccggcaaaaccgtgaaaatagatctgagacgttatttcttgaatggggaagaattgacatacgaatgtactattaacgatacgtcgaaggctgttgctacttttgaaggtactgtaatgactgtaaaaggggttgttacgggcatgacaaacgccacattgaaaacaagcggcggtaaggaacaatccttcaccattactatccgcaataatgcgaatgataatggatggatgtaattgggtttgacagatagatgaacaggaaacggagatattgttggctttactggctgatagccttttctcctgcacattatatgggtgcacagggagttggctatcagtctgtagcagtcgattcgttggtcaatcctcctttactggaagagggcggacaagtattttgcttcgattctctccatatgcatatcggtaatatacctgataccgatgcaccccgggtctgcacattcccgttccgcaatatcagtggcagggaggtacggattacgaaaattagcacttcgtgcgggtgtacggcagcggcattcagttcggaaactcttgtcccgggaacggaaagtacggtgacgttggtatatgatcccaagaaccgtatcggaacagtagaaacctatgcatttgtgtatacggatgtatcggataaacatccggtagcccgtctggtgctgacgggtgaagtgatctgttctgacgagtggagctatcttcctgtcgtggtgggagtgctgcgcatgaaacgcaaacaggtcgtcttttcggaaatgacctccggcattcgtccttcagaacgtattttgtgcgccaataccggaaagaaacctttgaagctttctgcacggatgcttcccctgtatgctgcttttcatacggaaccggcagttatacagccgggacaggaagcggacgtggtaatcacggtagatggtagtaaattatctgatattccggacagcagattgcagttcaattttcttgttgaaggagttgatgcaccggtaacggatcgcttagtcaaagtaactgtcaaacgtttgtaataatatttttgattaacattttaaaaactataatatgagaattcttttcagaataataccgttatgtatgctcttgcttggctttgtggcctgtgatgatgaagatgaggcaaaggtggaaacactggaagtgactcccgccaatctgaacggtacctggcaattagtggaatggaacggagagtcccttgcagaaggtacttattgctatataacttttgtccgcagagataaaacttttcagatgtatcagaaatttgatagcatgtatgcccgtttcttcagcgggacattcgaaattgaaaaagatgatgatctgggatatattgtgagtggtaagtatgattacagtttgggtggtcgttggaacaattcatatgtcgtaacagatcttttaccttcgggttctatgatttggactgtgaaagatgatatgggagatgtgtctaagtatgtacgctgtgacggagttccttctgatattgtagaagaaactgaagttgatacgggtaattaaatctgataataccggtcatgtcataaaaaaagtcatgaattatttggaaataagataaagggtttctatctttgcattagatttatagttgtaatgaatacaagtttggaaaggaagggataaatgatgaaaccatacgaacgattattagatcataatatcaaaccatcagtacagcgcattgccattatgcaatacttgatggaatatcccgtccatccatcggcggatgatatttacaccgcattgtctccatctatgcctacgctttcaaaaactacggtttataatactttgaaactgttttcggagcagggagcggcacagatgctcacaattgatgaaaaaaatactaattttgatgcggatacttctctccattctcatttcctttgcaaatgttgcggacatatttatgatttgcaatgtcccgaagcggtgaaagatgtggaaagtatggaaatggaggggcatcaggtagcggaagttcattattattataaaggtatttgcaagaattgcttaagtaaagataaagaaacacgtattgactaattaatttaaaattgagaagaaaatgaaaaaatttagatgtactgtttgcggttacgtttatgaaggtgacgcagctcctgagaaatgtcctttgtgtaaagctcctgccagcaagttcgttgaagttgttgagactgaaggcggtgcactgacttttgctgatgagcacgttatcggtgttgcaaaaggttgtgatgaagaaatgattaaggacctgaacaaccacttcatgggcgaatgtactgaagttggtatgtatttggctatgagccgtcaggctgaccgtgaaggttatcctgaagtagctgaggctttcaagcgttacgcttgggaagaagctgaacacgctgctaaatttgcagagttgctgggtgactgtgtatgggataccaaaactaacttgcagaaacgtaaagacgctgaacaaggtgcatgtgaagataaaaaacgtatcgcaacccgtgctaaagctttgaacttggatgctattcacgacactgtacacgaaatgtgtaaagacgaagctcgtcacggtaaaggttttgaaggtttgtacaaccgttatttcggtgataaataatcaagcctcataataactcttaaaaggtctgtgttctcatacgaatgcagaccttttttgtttatatttgctcatcaacttttaaatgccgcaattatgagaaaagtacaactgttgttagtttgtttgatgttttctgtagtcgctttggctgctgaaaaagtaattaagttgccgaaacccaacttggaccgtacaggttcggtaatgaaagccttgtctgaacggcattctactcgggaatttgctgcaaaggctttgagcttgtcggatctttcggatttattatgggctgctaatggagttaaccgcaaagactcgggtaaacgcacagctccttctgctttgaacaaacaggatgtgaatgtgtatgttgttttatcggaaggaagttatttgtatgatgcccaaaatcatcagttgactctggttgctgaaggagattatcgtagcgcagttgcaggtggacaggcttttgtgaaatcggcgcctgtctctttggttctggtcagcgatgtttctcgtttcggagatgcaaagaatgcccgtaaccagttgatgggagctatggatgcaggaatcgtttcacagaacatttctgtcttttgttcttctgctaaattggctacagtgccacgtgcatcgatggatggcaatcagttgaagaaagtgctaaagctaaaagacggtcagattcccatgatgaatcatccggtaggatattttaaataagaaatgcggggatataaaaaagtgacgatatctttatgagataccgtcacttttgattttactttaatagaaattcatcaattgcttttttgtaggttgctttatcggcagctccacggaaaagctgtggatctcctttcatggggatgaatacgaacaaagggatacttgttgcattgaacagggctgccagttctttctgcctgtctacattcactttatagataattatcttccctgcatattcctttgccaactctttcatgataggagctgtctgccgacatggtccgcaccagtcggcataaaggtcaatgatggcaggcttgtcgcctttgtatttccacttctttgatttctcataatcgaagacgtctttcagaaacatttccttgttcattacgacgacttcaccgttatctgttacttcttttttaccttgattggtttcagctttgtcattgaaagcgtatataatcacgcttaccatgacgaaagctaccattgctaatactttcttcattcgttattttgtcttttatgtataatgtttctcaattaccccttgcagttcgctactgtggattacacctgaatgtctccagacagcttctccatctttgaacagtataaaggtcggtactgcttgtatacggtattttgtagccagctcttcatgctggtcaacgtctatctttacaatacgcgctttatcacctacattctgtttcacttcttccaaaacaggtttcatcgctttacagggtccacaccattccgcaaaaaaatctactaaaaccggcatcggcaactttattaaatcttcaaacttttccataaatctttcctttcttaaaattaactgtcagtcattgaagactgcaaatataaactctgttttatatatataacggaaaaatgccgtttttgttcacaaaatagtaattgtagagacatcctattgtaatgtgaaacaaggaattttgcgtatcgaaacggaataaaggttgaactaaataatgatagcctatgaaattcttatttattgttcaaggtgagggtaggggacacttgacacaagccatcaccctcgaagaaatgttactgcgtaacgggcacgaagtggtggaagtgctggtgggcaagagttcgtcacgtaccttaccgggatttttcaaccggagtattcatgcaccggtgaaacgttttattagtccgaactttctgcctgcagcagatagtaaacgcccgagtttgaagaaaagtgttttttataatttgcggaagataccggaatactttcgtagcatgtgctatataaatcagcggatcaaggagacgggtgcagagattgtcattaacttctacgaacttttgacgggacttacatacgcttttttccgtcctgccgtcccgtatgtatgcatcggacatcagtacttatttctgcatcgtgattttgaatttccggagaagaacttcgttcaactatggatgttacgtttctttacgcggatgacggctattaggacttcgaagaagctagctttatcttttagaactatggaacaggatgatgtacatcggatagttgtagtaccacctctgattcgtcaggaagtggcgtccatccaaccggaagaggggaattatattcatggatatatggtgaattcaggtttttccgatagtgtggagaagtttcacatttgtcatccggagataccactgaaattcttttgggataaagcggatacggaggaagtgacaaaggtggatgagacgctccgtttttatcagattgatgatatcaagtttctcaacggaatggctggttgccgggcttatgcaagtacggcagggtttgaatctatctgtgaagcgatgtatcttggaaaacctgtcttgatggtgccggcacatatcgaacaagattgtaatgcttatgacgcgatgagggcaggtgcgggaattatcagtgattcttttgatttggaatcgttgcttcgtttcgccggaagatatactccgaaccggaactttacctcttgggtgcgtagctgtgaacggcggataatttttgaattggaagaaacaatgaatgtggtaattgatgaaatgtatatggtagaaagctttgtctgattgacgtggaatgagcaaagaaaaatggataatgaagtcagatgattcaatcatcattcattatccatttattctttataactgtttaggctctttattcctcaatagtcaattcatcaatgatgtgggaagctcccgcatatttatctataataaagagtgtataacgaatgtcgacacaggctgcgcgctgtgatgacgggcggaaagcaatgtcgcccgtcaatccttcaaagttacggtcgaaagcagttcctaccagttggcctttaccgttgaagaccgggctgccggagtttcctcccgtattgtcggtgtttacaataaagcaaacgggcatttcaccattcttaccgtaacgcccataatccttggctgcgtataactccttcaatttctgaggaactacaaattcccaattgccttgatcttctttttccatcactcccttgagggttgtgtgagcgtcataaacagctccgtcgaacggttcgtaagaaagtacctgaccataggttagccgtaaagttgaatttgcgtccggataaataggaattcctttatcctttctcatatccatcataccttttacccatactttgtgggctgcattgtaattctgattcgcttccttcatggcgatagcagttttcagtatgccgtcggtaatggagtatttgaataatatcatccagtcatatcctatcttatataggcttggctttttgatgaacttctcaaagtttttgggattaccgaagatggaatgttcgaaacattcgtcgataaatgcatctatacttcctttgaagcgtgaattgatgatttcaaagatattgatccgttgttctgccggaatataattagcataggttttcaacatttcttttcccaccatccgttctacttcggggaaaggaacagatgcgaagtatttttcaccttcctttttcagtttttgagtcgcttcttttatctgccccttgtctttcgatttcaaggcagctaccaattccatagtggaaggaatacgcatgaagtcaagagctgtcaccaatgcttcattcaaggcttgttgatggtagagcgcatcacgacgatgagctacaatggaacggatttcatcgaatgctttttggtaagagtcatctcctttttcacgaccgcgtgccaggagttcttcttgttgtgcacgcttggtatctaaaaccttgagccgtaccaaaccttcgttcataccaattgcatttttccaatagttggcagatgacgcatatttgctggcataatgaatacgtacggcaggatctttaagcatttgctccataagtaccttttgacgtgctccacgtacatgttggcgcatgaaattggttgtttgcatccgttcctccacttcatcggaaatcatgtatcgccagttacgtcccggaaatcccatgacaaaggtaaaatcaccttcttgtacaccggccagactgatggtgagatgcttcttcacttttaacggtacattgtctttcgaataggctgccggttttccgttcttgtccgcataaatgcggaacagcgaaaagtcacctgtatggcgcggccacatccagttgtcggtatccgctccgaactttccaatggaagaaggaggggcaccgaccatacggatatcactgtacacggtttttatgaacatataatatttgttcccgccgtaaaaggctttgagctccagtttggtagcgggagtaacttctatgttttcagctttggcaaaacgttccgctactttactaagatagctgggggacaggtaattgattccgtcaggatccggatcttttttcaactgctcgttgacgtaatccgtcacatcaagaatccgatcgatataagtaacggtcagtcccggagtagggagctccgcatcgcggttcatcgcccaaaagccttctgtcagatagtcgtgctccacgttgctgtgttgctggatggctccgtaaccacagtggtggttagtcagcaccaatccttcggaagagataacctctcccgtgcatcctcctccgaagtgtacgactgcatctttcaaagaaagaccgttggaattgtaaacctcttcaataggaatctcaagtccaagctcgcgcatggcaacttcattctgtgttttcaagtcggtcagcatccacataccttcgtcggcgtggatactgagcgttgccaatgaaaagactgcaaataggatttgttttttcatttattctacaattgtcatttcgtttatcagatgtccgcagtttcctaatttctccaagatgaacaggacatagcggatatccagattgatgcaacgttgcaggttgttgtcaaagttgatatcaccactcagcgattcccagtttccatcgaatgcacaaccgatcagttctccgttctcattcagaaccggactgcctgaattacctccggtgatgtcattggttgaaaggaagcaaaccggcatatcaccgttcggcaaagcataacggccgtagtcctttttttctatcagctctttcaacttggcaggtacgacaaactcacgatcttccggattttccttttccagaatacccttggtagtagtgtagtagttatagtgtacaccgtctttcgggtcgtaaggtttcacgttaccgtaagtcaggcggattgtaaagttcgcatccggataagaaggaacaggtaatttcatttcacccaaaccacggatgtaggttttgtgtaataaagccaattccttgtccatatccttcaactgtcctatgagttgttcgagtaaatcatatttggactggcaatattgcaaagccaggtcgttatcaatagcttttacagtcggtttcttgataaacttctcgaagtttgcacgattggcaaaaatggaattgtcatacatgtcatcgataaatttattatagtcgcctttatatttctgttcgataagtttgtagatagacggacgttgctctgccggaatcatttccgcataaagagggaacaatgctttggccaccttacggtctacttcgtggtcatagtctttgttatgaatctcatcatatgtctctttcagagcttcgatacgtactttaaccaaagaatcgttcttttctaccaatgcttcccgagttttggacagcagggtacttccgaactcgatagctccgaagaacgtttctcttaaacaagtgtactgatagttgagaggagctgtcttagctaccaagtcatctatcttcttcactacctccgcataatcggtattgttctgctttttggcaaattcagcgaatttggcttcctgtgccgcttttgtgcctagtacatcattatcgataatagccttgttcattccgatagaatttttccaatagttgctggaacctgcatatttgttggcatattgaatacggatcttgtcactggcgttcattacttctttcaaaacagctagacgggctccacgaatgcggatgcgcggttcgttttccgattccatgcgttcttttacttccgatacggtcagataacggcttgtacttccgggaaatcccataatcatggcatagtctccttctttcaagcccttgatagaaataggcaaatgtttttttgttttcaagggagtattgcttgtactgtattctgccggctctccgttggcatccgcataaatacggaacatagagaagtcaccggtatgacggggccacatccagttatctgtttctccgccaaacttaccgatagaagaaggaggagctgccaccatacgcacatccgggtatactttcttatagaacatatagaatttatttccggcatagaatgggagtgcctgtggcacgattccttttttgtctttcagatcactttttgcatacagctcttctgccagtttctggagaaacgcaccgctgaatgattcagtctcagtgatttctttagcagcaatcttagcattgacaatatcagtgatatcttcgatacgttcgataaatgtaaatttcaatcccggagtaggaagttccatctctctggaagtagcccagaaaccatccgtcagataatcgtgttcaacgctgctatgttgttggatggaagcatatccgcaatggtgattggtcaggatcaatccttccggtgagataatctctccggtacagcctcctccgaagataccgacagcgtcttttagggaaactccatgagggttatataaatcttgcgcttccagtttcaaaccttgttttttcatcatgtctatagaatgctgctgttgcattagctgcaataaccacataccttcatccgctttagcggaacatacgattagcgcagtcagcgccaataaataaagttttagtctattcattctttaatgctgataattaaaatatttatgattctattttgtcttttccactctcaactctccacttctcaaagcttccatgatattggcaggcggacgttggttcattagttcattcttcatgaaatccatataaggcgctacgtgcttaaagaatttgtaatatcctttgcacagataattcaagccgggttcgccttccgatgtacggctgaagcgattcttcggacattctccgttgcaggcaaacaggaattcgcattccttgcactgggtggggagagattggtatttcatgttgccgaagtgatgttggcgttcactgtgcatcatttctaccaatgtctgattatagatgtttcccagtttatattcggggaaaacgaagtggtcgcacgaatatacatcaccgttgaattccataacaccggcgtgtccgcaagtttttgccatcgtacatattcccggctgttcacccatccagtttgccagagtggagtcgaatatctgtatgtagtagttgcctacgtcttctttcacccattcgtcaaaaagagtacacaggaaattgccccattgctccggagtgacggagaaatcggccaattttccttccttgtcttcggcaagagaggcgagatgccgtccgtcttgatgcggaagaatacgttcgacgataggagcaaactgtatataatgacaatctatctctttgaaaaagtgatagaagtccagcggatagtcagcgttgaagtcattgacaacggccattgcattccattctacattgtgttttttcagcagattgataccctgcatcactttcacgaaggaaggtttgcccattttgtttttacggtattcgtcatgaaactcctgtggtccgtcgatagaaactcctaccagccagttgttgtcgtgaaggaaccggcaccattcatcggtgagcattgttccgttcgtctgaatacagttgtcaatggtacgtccgcgtgcatatttcttttgcagttccatagcctttttatagaaagaaagcggacgcatcagtgtttctcccccgtgccaggtgaaaagcacctgtggcatggtttgtgagttgatatactcgtcgatgaacttttccagaagctcatcgctcattacgtgtttcggattatctttgtatagatttgccttttccagataatagcaatagtcgcaagccaggttgcatacggcacctaccggctttaccatcacatagagaggtttggcaaaaggggcgtaagttgatgttttcatagccgcaaaattagataaactaaatgaaaaaaaaagccttctccatatgtttataaggattattaaagaaaagagacttacaagatttaaatattgataaaatgtttctctgaaaaatgaatcggttgtacctttgcacgcagaatcaaatgaatagacgaacgtgaataaacttttatctttattgtttttgctcccgtttctggcttcctgcactaataagtacaagatcgaaggaacatcttctgtgaatagtctggatggaaaaatgctgtatcttaagtccttgcgtgatggtgaatgggtgaaactggattctgctgaggtagcgcacggtctgttctccatgaaaggcaaagtcgattccgtacagatggtgacactttatatggatgatgaaagcatcatgccgattgtgctggaaaatggaaaaatcaaggtaaacatcagtaattcggatatcaaagcggtgggtactcctttgaatacggcactatacgagtttattgagaaaaggaaccgactggaggaaagtatcggagagttggaacagaaagaaacccgtatggtgatggacggaggtgatttggatgagattcattcacaattggcagtggaaggagattcactgatgaaagagatgaatcaatatgtgaaaactttcatttccaccaactacgaaaatgtgttgggacccaatgtgtttatcatgctttgcagttcgttgccttatcctattatgactccgcagatagatgacatcataaaagacgctccttattcttttaaaagcaataagttggtaagagagtttctttcgaaggcgaaagagaatatgaaactgatagaagagcacaagcgtctggaagaaaatgcttcggtaaagaagtgaatataacttctctattatcggtcttgatcttcgttctttatcattcccttatgtttctccggtaaagcactttcaacggcggcgtatgcttccgccatagtcgctttgatattttccataccttttcctttaggcggaataggctcatgaatcgtgagaatcatgcggtgacggtgtatccatttgcctgtacgcgggaggatctcaaatgagccgtcaatggtgacgggcactactgccagttgtaagtcatccgccaattgaaaagctcctttcttgaaataccccatgtgtccggtgaaagtacgagccccttccgggaaaacgaccaaagatactccgtctttcaaagagtccttcgcctgccggatcgtttccaacactttcttcggaccggaccggtctacaaaaatgtgccctgcgctttcgcaggcttttccaacgaacggtagtttacgcagactttttttcatcatccatttaaagtttcttccgataaaaccgtagatcaggaatatgtcgaatgaaccttgatggttaggtacaaaaatataggaagttttatcatgcaacttttcacgcccttgaatctttacgggaatcagcaggaacagacagattaattgtgaccatatctttcccggataatatccccagatgtgggctcctcccaaaagagaacctacgatggtgacgagtgccgtaaggatagtcaacactaataatataggtaaagcgatgcaaatctgataaatataataaagtatcttcatagggttggatttttacattgcaaatatacatgattattgtaaaaaagagatgcggataccatataatcttttcgattgtgttatttttgtctctcgttattagagatagctgttaaaaatatgatacgtatattacatactgccgattggcacttggggcaaacgttcttcggttatgaccgtacagaggagcatgaggcgtttttagattggctggcgggagaaatcctccggcaggagattgatgcattgattatagccggagacgtgtttgatgtttccaatccttcggctgcttcccaaagtatatattatcggtttatataccgggttacggcggagaatcccaatctgcaaattgtgattgttgccggaaatcatgattcggcggcacgtctggaagctcctttacctttgttgcaggctatgagaacagaggtcaggggagtggtacgtaagttggaaggcggagcggttgattacgaccatctatgcgtggaactgaagaaccggcagggagaagttgaattactttgtatggcggttccttttttgcgtcaaggagactatccggtagtgcagacagaggggaatccatattcggaaggggttcgtgaactttatacgcagcttctgcgaaagttgtggaaacgccgtaagccgaatcaggccattcttgccataggtcatctgcaagctaccggttcggagattgcagaaaaggattatagtgaacgcacagtgataggcggactggagtgcgtgtcaccggaggcttttcccgaacagatcgcttatacggctctaggacatattcataaagcgcaacgggtatccggccgggagaatgtacgctatgcgggaagtccgattccgatgtcttttgccgaaaggcattatcatcacggagtggtaatggtggcttttgacggagggtgtgcggtagacatccgacggatagaatgtccgaaatcaatacctttgataagtgtgccgagcggtgagccggaattgcctgaaaagatattggagatgttgggcgaattgccggagacggaaggaaccgctccctatctggaagtgaaggttttgctggaagagcccgaacccatgctccggcaggagatagaggatgttctggcggataagaattatcgcctggcacgcattgtctcttcttaccgtaccggtgcggaaaatgtggagaaagaggagacagactggaaaaaaggattacaggagatgtcaccgttgcagattgcacagtctgcatttgagaagatttatcagtcagaaatgccggaggatttggttgatttgtttcaagaagcctatttggttgccacccgtaaagaagaggaggaaagatgaaaatattagctatacgattgaagaatcttacttccattgaagggacggtggaagtggatttcaccgctgagccattgtgctcggctggtatattcgctatttctggtcctacgggagcgggaaagtcaaccttgttggacgcgttatgtctggcgttgtatgataaagcgccccgtttcgccgcttcggtggaaagtgtgaatctggcggatgtaggggataaccggattaatcagtccgatgtgcgtaacctgttgcgtcgtggcacaagtgacggttatgcagaagttgattttctgggagtagacggacaccgttaccgctcttgttggtcggtgagacgtacacggaataaagtgagcggctctttgcagccgcaaatgatggaggtgaaggagctggatacggggaaagaatttcaagggacgaaaaaggagttgctggcgcaattggttgagttgatcgggttgacgtatgagcagtttacccgtaccgtattgttagctcagaatgactttgccactttcttgaaatctaaaggagcggctaaggcggagttacttgaaaaactgacggggaccggagtgtattctttcatttcgcaggaagtgtttgcccggaataaggcagcgcaggaagaggtagctttgattcataataagatgagtgtgattgaattgattccggaagaggaacagcttgccttgcagaaagaaaaagagttgttggctgaaaagcgttcggaaggaatcaaattgctggcggaacagaatgcgcagttgaatgttgtacgttcattgaagacgcaagaggagctccggacaaagaagcagaaagaggaacaaggagaacaggccagactaaagaccgctttggacatattggcctcgcaggaggaaggtttggttcgtttcaaagcccaatgggaagctatacagccagacttgaagcgagcccgtcaactggatgtgcagatacagtcccaacaagagggctatatacagtctcaacaactattgcaggcagcccgcaagcaggtgcaggagcaggacaagagaaaacggatggttgaggaacagttgcatttgtcttatcagaccttacgtcgtctattgaatgttgcagggacggaagacagtctgcgtcttgaacaggtggaagaaacgttacggcaggaagagggaaatttgtctgccggaatagaaacgaacgaaaaacgcctggagcggttgaatgctttcggatatccgtcgttagctgaagaacaggtcaagttgcagaaagaattggcacgtcagcagaatatccggcaattgacggaagcgttgaagaaggcgatgtcggaaatagagcatttggaaaaagaggcggcagattgttcgaaggagctttcggaacgggaagttgccttgaaaacagtacaacgtctttatgaaaacgcccgcatggcggtagggaaggatgtgaaagctttgaggcggcagttggaggaaggagaagcctgtccggtttgtggtagtacttcgcatccgtatcatcgggaacaggaagtggtggatactcttttccggaatatggagcaggagtataatgcggcaacagcggtttatcagcaggtgaacaaccggagcattgccttgcaacgtgatttggcacatcagaagatgattgcggggcaggtacgtgaacaattgtcggctttccaaaaagaaagcaccgacaccggaaatgaggaacagatacaacaacgcttgggagaactggcgaagcttattttagaataccgtaatctgtatgcggaatggcagcggggtgatgaagagataaagaagctgcgttcgcattatgaagccttgcgtgagaatgtttcccgatgccgtttagccatgcaaaaggtatcggctgccaatgaacagtcggtgctattacagaatgccgcgattgccgaacaaaagcgttttgaggtgatagagaaagcattggatacacttcgtcgggaacgttcgggcttattgaaaggaaagagtgccgatgaggcggaagccgccgtagcaaggcgggaaggagaattgaatctggcgttggagaaagcccgtaaggaggtagagacggctcaaaacggactttccggcttgcaaggagagctgaaacagattgcttcgtctattgaagagttgcaagtgcggcagaagcaaattgaattccccgaacagcttccggaagcaataaagaaacaacaggaggagaatctgaatacggaacgcagcctttccattattgaagcccgtttgttgcagcaggctaagaataaagcggcggtggagcagatagcaaaagaactttcagagaaacaatcggttgccgaccgttgggcaaagttgaataagctgattggcagtgcagatggagcaaaattcaaagtcatagcgcaaagttataccttgaatctgttattgcttcatgccaacaaacatttgtcttatctttccaaacgctataaattgcaacaggttcccggtacattggccttgcaggttgtcgactgtgatatgtgtgatgagatacgaacggtttattccctttccggaggcgaatcattcttaatctcgctggcattggcattgggattgtcatctttatccagcaataatttgaaggtggagtcgcttttcatagacgaagggttcggatctttggatgcggaaagcctgcgtacggctatggaagcattggagcaactgcaaatgcagggaagaaaaataggcgtgatctctcatgtgcaggaaatgagcgaacggatttccgttcaagtgcaggtacacaagaaagtgaatggaaagagtgtgcttagtgttgtaggataagcacactctttcctctttattatctgaattcgtttaattcgttcagattctttttgatttcgtggatacggtttaggaacttcttgcggtaaatccataagatcagtcctagaccgcctccccataacaggacaaaaaaggaaatcatgcctataccgtattgccatacttgccagtaaatgaatgaaagaacagccaataccagaaggaaaaagatggcaaacagacgctctctgatggtccatcggtggatgcggttgacacggctgattacttctatcaaaggcatttcgtctattcgggtccgttggaggtagcgggtagtgacgatatcccagcaaagtgcgggaatccaggctagaaggataatgatatagatagggttcagcctgttgtgcaacaggacttccgccaggaacaggatcagtatcggcagggaaatcagaatcagctttatgttcagattggcaatggcatgaatgcccttgccggtatgtcccagcaatttcgaaagttcctcttctttaatgagctctttgtctttcaggtgctcatcgagtgcattccaggatttcttcaattcttccagttccatatatctttagtcttcctttttcattttttttagtttgtctttgatgcggcttaacttggtagccacattcgttaccgtcagtccggtaatctccgcaatctcctcgtaactcttctcttcgagatagagcaggatgatggatttgtcgagttgccccaattgattgatcatccggtaaagctgtttcagcatttcattgaccggatcatgcgcttcgatactccagtcaatctctttggtgaggctgacaatttccggtatattcttttccttgcgataaaaactgatgcaggtgttgagggcaatacgataaatccatgtcgatattttacactctttcctgtattttggataggctttccaaaggttcagcacaacatcctggtaaaggtcgttgagaggggcattgggattggcgtacagataacacaccttatagatcacccgttcatattcacggatgactgacaagaattcttgttcaacaggtctgtctgtttctgccgactgttccctcatgagcgttattgtaaattggcagccaggaatttgcgtatctctgccacactcttattccggcggcgggcataatcttcgagttggtcttctccaatcttccctactgaaaaatattcggaagccggatgtgagaacataagtccgcagacggacgcgtgaggatacattgctccgttttcggtcagtgagatacctatccgtttcatatccaatagttcgtccaataggaaattgacggattggtcgggcaaagacggataaccgaccgccggacgaataccttgatatttttcaactagcaaatcctcaatgcttaaattctcatctttcgcatatccccatacttcttttcgtacatactcatgcatcttttccgtagcagcttcagccagacggtcggaaagagtttggacaagcaaatgtttgtagggatcttgctcgtaaagcccttccatatccgcatcgatggaagcggcgaaagcgccgatcgtatcggctatgccggaagatgacgggcgcacaaagtcacttaaacaaaggaatggactgccgtctcttttaggtgtttgctggcggagtaaaggaaacgtgatgtattggttttgttccttttcaatcaccagattgtctccgtcggagtttgctttacagagcttgaagattgtctttacttcgtaatccttgtcgagcagatccagcatacggttggcctctttgaaaagctgcatggcttcggaggctttattccgttcttcttccggaaaagtggtcagccatacggcacggcaggcatcgcatccgtgaatgttggtgatagccgcgaaacgcggttggaacccccatgcgtggaaaaagtaaatccagttgatgtagggggcgaccgtatgtattttataagataagactgtaggttgcataatgtggcttgtttttctgtttgagaaattcacttactatctgaaccttaactcttgtccacgatagttctcgtctatctctccgttattacatagcagatgcccgtttgcaaaagtcttttctactctccaattgaatgtatgtccctccaacgggctccatttgcatttacttaaaatgcagtctgccgttaccgtccaattgctgtccggacgtactaacacaaggtctgcctgataacctttccggatgaatccccgattctgtatttcgtacatttgggcaggagcatgagccatcttttctaccactttctctattgtaaatactcctttgtccactagttccagcatactgaccagtgaaaactgaatcattggcattcccgacattgctttcaatgctcctccttctttctcgcttagtaggtgcggagcgtggtctgttgcgatggcgtctatcaaaccgctattgacagcctcctgcagggccttccggtcttttgctgttttgatggcggggttgcatttgatgcgtgcgcccagtgtccggtaatcttcctctgtgaaaagcagatgagaaacacaggcttctgccgtgattcgtttttgtgacagaggagcgtttgagaacagactgagttctttggcagtagagatgtgcatgatatgcaggcgggcatttgtttcacgtgccagttgtatcgccagctccgaagaacggtaacaggcttcctccgaacgtaggagcggatgaagggacagcggggcatcttctccgtactctttcttaaatttatccgtattttctttgatgattccctgatcttcacaatgggcggcgataagcaaatcggtaccgccaaagatattgcgcagactggccatccggtctaccagcatattaccggtacttgaacccatgaacagtttaacgccacagacacggtgtttgtccaactttgcaaactgagtgtaattgttgttggttgctccgaaataacaggaatagttgacggcggatttctcgcttaataaagcgaatttctcatcaagagcttccaaagtggtagtctgtggattggtattcggcatatccatgattgaggtgacgccacccgccgcagcagcacggctttcggtgataatatccgccttatgggtaagaccgggatcgcggaagtgtacgtgctcgtcaatggcacccggcaaaagataacatccggttgcatctattatttcatcacagggggcagacgctttttcttcaccaaccaatatctcggcgattttctcgtcttcaatcacaaccgaacccggaacagttcttccttcgttgacaataatggcattttgaatcagtgtacgtttcatttcttttgcgggaatttatggaaccaactatttacttttaatttaatcacaccgaatatggcttctccaaagatactgctattcatcttggaagtacccaattcgcgattgatgaatattaccggaacttcaatgattttgaagccgcacttataagccgtgaatttcatctcaatctgaaaggcgtatcctttgaagcggatgtggtctaaatctatcgtttccaatacctggcgacggtagcagacgaatccggcggtagtgtcgtgcacggggattcccgtgataaaccgcacatacttggaagcgaaataggacatgagcacacgtcccatcggccagtttactacgtttaccccactgacgtaccgggaaccgatggatacgtcgcctccctgttccgcacaggcctggtacagacggggcaaatcgttcggattatggctgaaatcggcgtccatctcaaagatatattcgtatgtatgttccaatgcccatttgaatccggtgatgtaggcggttcctaatcctaacttccctttacgctcgatcataaacaagcgttcgggaaactcttgttgcagggtttttacaatagttgccgttccgtcgggcgaaccgtcttctattaccagaatatggaatactttgggaagtccgaaaacggcacggataatattttcgatattctctcgttcgttataagtaggaataattacaatgctgtctgatgtctgcatatagatactataatatttaagaacaaaagtagttcttttcctttagttatagatgaactaaggaatatttaacgtgttctgcggctcattatggataactccgtacctcaccggaattaagcccacaccttacgggaggtaagcccacgtctgactgatactaagcccacgcctgagcgatactgagcccacgcttcaccgagactcagcccacgtctcaatggcgctgagcccatagctcggtaattcttactgtgtatttcttgataatacttccatttttaaagtatgtactcccaatcttttttgtacttttgcggtgaaattttataggtatgacaataactgagttgcaacaacaatatgctgcccaccccaatacggcagtaatgaagcgcttgttgaaggacacttctgttcaaactgttttttgtggaggactgtatgcgtctgctgcttcccttttttcttctgtattggtgcaagagggtggttgcccgtttgtgtttatcttgggtgatcttgaagaagccgggtatttttatcacgacctgacacagatattaggctcggaaacggtgctttttttcccatcttctttccggcgttccatcaagtacggacagaaagacgcagccaatgagattttgcgtacggaggtgctgagccgtctgcagaaaggagagaaaggattgtgtatcgtcacttatcccgatgcgttggctgagaaagtggtatcccgtaaggaactgagcaataagaccttgaaactgagtgtgggtgaaaaggtggatactacttttataacggatgtgttgcatagttatggttttgaatatgtggattatgtatatgagccgggacaatatgccgttcgtggcagcataatcgatgttttctcttttgcttcggaatatccttatcgtattgactttttcggtgatgaagtagagagtgtccgtacctttgaggtggagtctcagttgtcccgtgagaagaaaaaggaagtgtctatcgttccggatttggcagtgacgggagaggtaaccacttcttttctggattttattccgaaagaaaccgtgctcgccatgcgtgactttctttggttgcgcgagcgaatccaagtggtgcatgatgaggcgttgactccgcaggcaatagccgttcaggaggccgaagagaatgggggaattacgttggagggaaaattgatcgatggcagtgagtttactgtacgcgctcttgatttccgtcggttggaatttggtaacaagccaaccggaacgccggaagccaatgtctctttcagtacatccgcccagcctatctttcataagaatttcgatttggtggcttcctctttcaaagagtatctggagaaaggttatctgctttatatatgtagcgacagcacgaagcaaacggatcgtatcaaggctatttttgaggatcgtggtgataagatacaatttactcctgttgagcgtaccattcacgaagggttcgttgataatacgttgaggctgtgtgtgtttacagatcatcagttattcgaccgtttccataagtataatctgaagagtgataaagcccgttcgggaaaggtggccctttccttgaaagaattgaaccagtttactccgggcgattatgtggtgcatacggatcatggtatcggacgtttctccggtctggtgcgcattccgaatggagatactacgcaagaagtcctgaaactggtttttcagaatgatgatgtggtatttgtttctattcattctttgcacaaagtttccaaatacaaaggaaaagagggagaggctccccgacttaataaattgggcacgggtgcgtgggagaaactgaaagagcgtacaaagagtaagataaaagatattgcccgtgatctgattaagctgtattcgcagcgccgccaggaaaagggcttctcttatagtccggatagtttcttgcagcgtgagctggaagcttcctttatttatgaagatacaccagaccagagcaaagcgacaattgatgtcaaggcggatatggagagtgatcgtccgatggatcgtctggtctgtggggatgtgggatttggaaagacagaggttgccatccgtgcggctttcaaggcggttgccgataataaacaggtggctgtgcttgtgccgactacggtgcttgcttaccagcatttccagacattccgcgaccgcttgaaaggattgccttgcagggtggaatatttgagccgtgcacgtacggccgcacaatccaaggcagtattgaaaggattgaaggagggggatgtcaatatactgataggtactcaccgcatcttgggaaaagacgtccaatttaaagacttgggattgctgattgttgatgaagaacagaaattcggagtctctgtaaaggaaaagttgcggcaactgaaagtgaacgtggacacattgacaatgaccgctactccgattccccgtacgcttcagttctcgctgatgggtgcgcgcgatctgagtgttatctctacgcctccgcctaaccgttatccgattcagacagaggtgcatacctttaatgaggaggtgattacggatgcgattaattttgaaatgagccgtaacggtcaggtgttctttgtcaataatcggatagctaatttgccggaactgaaagcgatgattgagcgtcacattccggattgccgtgtagctatcggtcacggacagatggagccggcgcaattggaaaagattattttggattttgtcaattatgattatgatgtccttttggcgactaccattattgagagcggtattgatatcccgaatgcaaatacgattataatcaatcaagcgcagaatttcggcttgagcgatcttcatcagatgcgtgggcgggtaggacgtagcaataagaaagcgttctgttatctgttggctcctccgttaagcagtcttaccgcagagggaaagcggcgccttcaagcgattgagaactttagcgatttgggaagcggtattcacattgccatgcaggatttggatattcgcggagccggtaatctgttgggggcggaacaaagcggatttgttgccgacttgggatatgagacgtatcagaagattctcagtgaggctgttcatgaactgaagaacgatgaatttgcagatttgtatgcggaagaaatcaaaggggaagggcagatcagcggtgaaggatttgtggatgaatgtcaggtggaaagtgatttggagttgttattaccggcgaattatgtgaccggtagcagtgagcgtatgttgctttatcgcgaattggacagtctgacattggacaaagacgttgcagctttccgttctcgtctggaagaccgcttcggccctgttcctccggaaacggaagaattgctccgtatcgttcctctgcgccggttggcggcacgtttgggagcggagaagatattcttgaagggtggacgcatgacattgttctttgtgtccaatccggatagcccgttctatcagagccaggctttcggaaaggtgattgattatatgatgaagtatacccgccgttgcgatcttcgcgagcagaacgggaaacggagtatgctgattaaagatgtgtcgaatgtggagacagcggttaatgtattgcaggagattgttgcgttacctctttctgtatagcttatctatcaaatccccccgtccgatacgtctcaattcattaatgatatttttccgttcttccggcttgtaccagaagaagaattgacgttgtgccagtttttcccgttgagtctttgcgctgaatatcggttccagcgtgtagggatggtatcctgtgtaccatgcttccgtggctactgtcataggagtgggggtaaagtcctgcacttgttccaaatgaaaatccagccgtttggtaataacggcaagttccgccatatcttcttctttgcatccgggatgcgaggaaataaaatacggaatcagttgctggcgcaggttttcctctttattgattcggtcgaatatccttttgaatgtttcaaactgctcgaaaggaggtttgcgcattacggataatacccgttcacttgtatgttccggagcaactttcagtcggccactaacgtgcttgacaatcaattcgcgggtatattcggcggtactgcggttgatggcctcatctttactacgatgcaataataagtcataacgtaccccgctgcctataaatgatttcttaatgccgggcaaggcatctaccgcgtgataaatatccaataacggacgatggtctgagttcaggttcgggcagactttcggatggatacaggacggacgcttgcatttcttacagatagactcatctttccctttcatctgatacatattggcggaaggaccacccaaatcgcttaagtatcctttaaagtccggtaactgagttacctcttttacttccctcagtatggattctttgctgcggctgacgatgaattttccttgatgtgcggaaatggtgcagaatgcacacccgccaaaacatccccgatggatattgatggagaattttatcatatcgtatgccggaatccgcttccctttatatttgggatgaggcatacgggtatagggcaaatcgaaagaacggtcaatttcttcctggctcatcgggggataaggaggattgacgactacgactttgtttccgacagcttgcgtgatgcgtgaagccgcatatttattggactcttcttcgatatgccggaaattgcttgcctgtttctttttgtctgcaaggcattcctcatgcgaatagagttgtatatcttccgtatcggaagtccactcagaggcacggcaaagataggctgtttgaggaatcgttccgatgattgtttttaaatcgttgacagtgcatacggcgtcttctgtcggcagcaaaccttttattttacgggttaattcgacaatcggcttttcgcccattccataaataagcaagtccgctccactatcgcataaaatgcttttctgtaccttatcctgccaataatcataatggcttaaccgcctcatgctggcctcaattcctcccaagatgacaggaacatccggataaagtctcttgagaatctgactgtaaacagtagaaggatagtccggccgcatatccggacgcccgtccggtgtatacgcatcttcgctacgcaatcgtttgttggcggtatatttgtttaccatcgagtccatgcacccgccggaaatgccaaagaacaggcgcggacgccccaactttttgaaatcgcgcaagtcatcgcgccagttaggttggggtacaatggctattttcaaaccttccgcttcgagaatgcggccgataacggctgcaccaaaagaagggtgatctacgtacgcgtccgcactgaaaaggatgatgtccagttcattccatccgcgaagttctatttcttttttggtagtaggtaaccagtcagtcaatcgatattctttcatgctgcaaagatacgcattatacggtgaactgtactgtcatttgttctccgtcataaatttcgcggaaaccgatgccttgttcggacagatattccttcagatcctgaaacgcatcggcatggttcatgataatctccagtgtttcaccgggagacgcattacacatcgcttttattgcaggaatcagcggactataggctgtgattccgcaagtatttactgtaatcattatgcctcctcttcttccgtttccggactggaaagccacgtcagatagagcttgataagctgttgcaagccgaatgccttcatattattgtggtaaatcacatcaatacaaaggtccagcaagtccttgctgtcttcttcctgactggcgatgagggaacggatgtttagtttcaacttgtccaaaaccgcttcgtctacaatgccggtactatcaatgagatggcggaacaatgcatatttctcgatcgttctcagattctcattagagacctctatgctgcgtgtaccgctgggatttgcttgtatagtatacatcttttctagttttaagggttattatagtagcaaagatagaacttaaaatgaaaagcagattaaaaaaagggatattttttatctctgcgtaaagaatcccagtatacctgccatgatagttgcccggtcggcttccgattgtatgctttcaaaaggaaatcccaatacaaaggtacggtagtttcctttataagcgatacctgcgctttggttgccgggaacgtatgtaaagacaggaaatgccgtatctaccggaacgatacagtcgggagcagggacggcatagctggtttcattaggtgctctcggtatggtaatcgtacgtcccaacccgttaatgcggtttgaactcttgtccgtcatgctgctttgataaccgtattttaagatcttctccgtaaattcccggttcccctgtgttccactcatatcgcttcccacgtatgcaccgctgacaaatagatttcctcccgactggcaataactggtgatgatccgttgcatggccgaagaaaatgttttgtagtatactttatggaccggatcttctttctccattcccaaaatgtagtccacaaccggataatcttccagtgtgactgtaccgttttccacagcctcgtcgctgcatgacacgaaactatatttgccagcggcttgaatcgcttttccatgaatgaaaggatagtcgaatgtgttacctgctattttcattccctccaactcgcttccgctatatcccagactgccttctccttctttcccggcctgtgcccggtcgaatcctatttgcgctccactgaatgagatgtttgataaataaggaactccgggatcttgttccaggtcgaatcctgctttgtcaaacgtattaatgacagccggtccgctgactctgtcgaatccgttgattatcaatactctttcccgctcgcgtttggccttataagcagagagtatctcggacgggaagctttcaccaccccggtttacggcagttactttaaaggaataaacgagtcccggttctattttgacggtatgggacgtcttgctgactaatgtaccgttgtcgaaaccaccatagccaatgcgtgtgtatacaatgtattcacgtggctgtgcggtgggttcttgcggatcgttttcacctttccacgaaagctccaacgtattctttttctttccgaagcggatagtaaaattgctgacaggaagaggttgcactacatattctttgtcatgctggccggcaacaaactgcaagatacctttatagatggcacgtcccaccgtaaacttgaaattcggatcatgtcccaactgcatatcggcaaagttctgatgggaaagtaattcgataatggtagaaggagtagccggaagacgcgtctcgctgtaattgcggttccacatactgcgtcgtgtccaagacagattataacttgaatatatatctttctgaatctgagtgagtagaatatcggccaaatcccgtgaggcataccggtcgattcctgtgttcagttttccattattaaaatcagtggtgtatatccccaatgagccgatcagctcatccgttttgctgcatcccgcatcgctatgcagcgccattgtcatttccaaaggaatacctaaaccgggttgttgcggattatagacagaacctccggataaataattaattgtgttggagcgtgtattgatgtcatccgcataatcattttcacctttccgccccgcatatacctcgtatggcattcccgcccattgggcagagtagcgtgccccttccagataacggggcaaaccgcttgtctttcctcctcgctcaatatttcccattcctcctccgaaacgtaccgcatctgcgcatactacgccgtgctcgctactctcgttgcttagcactaccatgccgtaatcgttattgcctttgtcaaactcgaatgtgcccagataaacccaagtgcctccgcctatcttttgattcactttgaattcggtcacccctccattgtggaaaacaagatatctggcgtcgttcacgctattaggcaatgtccggtaagagacataaaccgcgtattctccttttgccggtagggtaggcacccattcggcgaaagcctggtctttattcttcttctttctttcggtcggaataaagcggcaggtcccatctgtgaagggattttctccatctctataaatcgccttcttttgagcgaagccttttatcggagcagtagcccaatgtgcttttttgcttcctacttccagataaagagaagcattaggtgtatcgttgtccacaatgatctcatttttctgagtatcccgttcgcggggagtgtagacgattgcacctgcgttttccaacatcgggattacgtacggaaggacaaacgactgtgtgaacagatcttccgttgtgcaaaacagacgggggcgttgccatccccattcattcttgtcgttcttgaaataattgccgtgactttgccagattgcgatatggcggtcttgcaatcctcgtgatatttcattggggcgtgaaatgttctttacccacgctttgtctttataatcggttttcaaggacatccgttccttatcctttttcttgttccgataaatattcgggataagttcctcaatgggctttccatctgcaaagatagtgagtcgatagtagtggacaggtcccggaagcagctccttcacttgattgtaaacagcttctacagtctccggtcgaaaaggctgataagcaaaactttccgaagcatggatagcaatcgttttgcgttcataatctatatcaacacttttcagcttaggtgtactgattttcgccgttgtggtatatctgccgaaataatctgtcaatcgttcttttacattcctttcaatgtcctgagcagaaaggaaatttactcccaatgtaaggcataggaaaaacactattatcttcatacttgctgcttttttatactcaccacagaggaaaggaggacacagaggggtaaatgtggaaactacataattcttttatttatgaagtcctctgtgtcctcctttcctctgtggtgaattactccgcaaaaataaacaaaaaagagcgagaagtatcccacttcccactcttcttttattgttttatattctcttaatcaagaataccttctttccttatagcggaatgtattcaacaaacgcttccattgcctcgtatgaagccaagcccaatttgtcatacaatgcagctgtaccgcgattacggtcctcgctgcgttgccagaacagacgttcatcgttacccaagaaaggagcgctttccatctgcgactgatgcttcaagatagaattacgttttgcgcgaagttcttccgggctgataggcactgccatttcaatgttctcaatttcccattcggcccaggcgccgcgatacatccagatacggcagtctttcagccacttggcaccttcttctttttcaaggtcgatggcagcgaatactgcatccgtacatacacggtgagtaccgtgcgggtcggccaagtcaccggctacgaaaatctgatgaggtttcacttcacggagcaggttacgtacgatttctacgtcggcttcgctgatcggattcttttgaatcttacccgtttcgtagaaaggcagatcaaggaagtggcaacgttccaatggaatgttattatatgtacaagcagtacgggcttcaccgcgacggatcagacctttgatagtcagtatgtcacggctgtccatatcaccgtctttcttcgctttcaggaaattacgtatttctgcgtacttttcattgataacctggtcctcactattgttgaagatctggttgaatccgttgatgaagtgcatgaaacgaattacttcttcatcacctacagcgatattgccggaagtttcgtatgccacgtgtacttcatgtttctgctctaccagacggcggagagttccacccatagagataacgtcatcatcaggatggggagagaaaataatcacacgtttcgggtagggttttgcacgttcgggacgataggtgtcgtcagcattcggcttgccgcccggccatccggtgatggtgtgctgcaaatcattgaagatcttgatatttacattgtatgcagaaccataaagagccaacagttcactcagaccgttttcattataatccttgttagtcagtttcaaaataggtttgcctgtcaactggcacaaccagacaatagcgctacggatcaacttgtcattccattcgcaggaagttaccagccacggacgttggatgcgtgtcagattcatggctgccgaaaggtcaagcgctacatgtgcattgttgtgagtttgcagataagaagcaggaatagtatcggtgatcgcaccttccacacattctttaatcatagctgctttgttctcgccccatgcaagcagatatactttctttgcactgagaatggtagctactcccatcgtgatagaactgatcggagtattatccattgttccgaaaattctggatgcttcattgcgcgaggcgttatccaataaaatcagacgggtggtagagttcaagcgtgaacccggttcgttgaatgcgatgttacccacacggccgatacccagtaaagcaatatcaatgcctccgaaactttcgatacgttgttcgtagagacggcaatattcaaagattgtatctttggcaatacttccgttgggagtgaatatattctgcttgtcgatgtcgatatgatccaacagcatattcttcaaagcgttgaaattgctgttgactgcatcaggagccaatggataatattcgtacatattaaatacgatcacattacggaagctgagtccttcttccttgtgcatgcgaataagttccgtatatacgtgtctgggagaatctcctcccggaagagccaatacgcagaaacgtccggctttttgtttttcgcggatggtttgtgctatttcgcgggcaatgtagttagcgccttcttctacagattcgtaaatgtccgtaggaattttttctagtcttgtcaagactgatttttcaaaagcattctccggtctgtaatatctgggggagacccggtggagactgatttgagaactaagatttgttttcataaagttgttaattaagttatgtaagattagaattcttacgactgtattttcacgacaaagatacaaaagaggtttatataattaactacctgctttgcggtattgttgtcgttttaattggtttttaacatttgtttgatagcaactatgacagatgaaattcgtctgcatctttccataccggaaatttttctctgaattgacggagagcggacaggttgagagttgccgtagctattccttcccggccgtcgggcagcgaggctatctcttctccgaaagctgaatagattttacttcctccattatactccaaatggtaaccgtcggttcctgtccggttgacaccgcatacatagcactgattctcgaacgctcgagctcgaagcaacgtatcccataccggacggcggggaataggccagttggctacatatatcaataagtcatactcattgtttatatttcggctccataccgggaaacgaaggtcgtagcagacttgcagacaaatgttccattcgaggtagggaaggataagccgtttcgtgccggcggagaaatgttcggcttcccgtcccatgcggaacaaatgccgtttgtcgtaatagaattcttctccttccggtgtcagaacaaatgcccgattgtagaacaacccgttatccgttgcgatataacttccgcagatggctatctggaattgcctggcccatagtttgagagtggtaatggtttcaccggaattaggttctgccaatgttttgctctgcatactgaagccggtagaaaacatttccggtaaaacaacaatctccgttgttccacagagactttgcagtttcttgtggagcagacggagattttcctgtttgttttcccaaacgatatcggtttgtactatggaaatacggattgaatccacactgtttagtgattaaatctcgccaagggcaaaattctcaggatgttttccttgaaagtccttgaaataaagtttgatttctctcatgtctttatcaatatctcccgacggcatgatggctttcgttgccgaaatcatctttttgctgtaatcgataccgatcaatacgatgggtacttgcgctttcaaggcgatataataaaaaccctttttccaatttggatttgccttgcgggttccttcgggcgtgatagccaaatgaaactttttgcattcgttgaaatgtttgaccatctgatccaccaacgaagtttttcgactacggtctacgggaatcccaccgactgctttgaaaaaaagtccgagtggaaagaaaaaccattctttcttcatcatgaaactagtcttacggcctaaagcaccgtaaaatagttttccaataaataagtcaaggttcgtagtgtgtggagcggcgcaaatcacgcatttatcataattggttaccgtaacgtttgtcttccaccccaataggcggtaatagataaagctataaattgctttcttcattctgtttttttagttcaattttccgatcgcttcaataatctcgtttacttttgcattaaagtctgcacggaatttcttataaaaacctttcacatttcccggttcggtgtgactgatgcggcatacaaattcatcctgcattttcaacacttccgccattagctcgtcggccttacttttgtcagtaccaggtataaacatactgttgattaaacactcggtgaacaattctcctgcgatatagtttacattctttttgagttctcttctacttgccataatctttacatttaatggtgaataataaaaaatatttttggtaaagatagttactttctttgatttaggcgaattatacggggaaaaaataagataagggagttttttaatatcttttttatatgt

SEQ ID NO: 11860 - DNA, 7870 bp, Unknown
  gut microbiota DNA sequence
gtgcttatttcacctcctcaaagtcagcatcctgtacattatctccatgcttgctgttatcttgctgaccagcaccaccattcatatcaggaccagcctgtgctccaccttgcgcaccgctctgtgcatacatttcagcacttgcagcctggaaagcagtattgatttctgccatagcagtatcaatagcagccaaatcttgtgccttgtgagcatctttcaatttctgcaaagcagcttcaatcggagctttcttatcagcaggcaacttatcacctaattctttcaactgattttcagtagagaagattacgctgtcagcctggttcagcttgtcgatcttttcacgttctttcttatctgcttcagcattagcttcagcttcagccttcatcttttcgatttcttccttgctcaaaccgctggaagcttcaatacggatagcctgttctttaccggtagccttatcttttgcagatactttcaagataccgttggcatcgatatcaaatgtaacctcaatttgaggaacaccacgacgagccggagcaatacctgtcaagttgaactgaccgattgatttgttctgtgcagccatcggacgttctccctgtaatacgtggatagtaacttccgtctggttgtcggcagcagtagagaatgtttcactcttacgtgccggaatggtagtgttagcgtcaatcaacttagtcattacgccacccaacgtttcgatacccattgacaacggagtaacatccaacaataccacacctttgatttcatctgtcaaaacagcaccctgcacagcagcacctacagctacaacttcatccggattcacgcccttagaaggagtcttgccgaagaaatcttctaccagcttctgaacagccgggatacgggaagaaccacctacaaggattacctcatcaatatcggcattgttcaaacctgcatcgctcatcgctttcttacatggttcaagacaagcctgaatcaatccgtgagccaaagattcaaatttagcacgagtcaacgtcttaaccaagtgcttaggtacaccggctaccggcataatgtacggcaagttgatttctgtgcttgtagaagaagaaagttcaatcttagctttttcagcagcctctttcaaacgttgcagagccatcggatcctgagtcaagtcagcaccttcatcattcttgaattcctgtaccaaccaattgatgattacctggtcgaagtcatcgccccccaagtgagtgtcaccatttgttgaaagcacttcaaatacaccaccaccgaattcgaggatagagatatcgaatgtaccaccaccaaggtcgaatacagcaatcttcatatctttgtgagccttatccagaccgtaggcaagagctgcggctgtcggttcgtttacaatacgttttacttccagaccagcaatttgtccggcttcttttgtagcctgacgttgagagtcagagaaataagcaggaacggtaatcacagcttctgtcacttcttgtcccaaatagtcttcggcagttttcttcatcttctgaagaatcattgcagaaatttcctgcggagtatacagacgaccgtcaatatccacacgcggagtattgttgtcacctttcactactttataaggaatacgctctacttctttctgtacttgatcccaagtttcacccatgaaacgtttaatagagaaaatcgtacgcgtagggttggtaatagcctgacgcttagcaggatcacctaccttacgttcaccaccatccacaaaagcaactactgaaggagttgtgcgcttaccttcactgtttgcaattactaccggttcgttaccttcaaatacggcaacacaagagtttgttgttcctaagtcaataccaataatttttcccatgatcgttattttttatttattatttattctataatttcttttgtccggttgtttttccatccttttcctagggtgtaatcccaaacgaacgtttattaaaagacaaaccgtatgccaaaaagaaattatacgaatgcttgacataatatctgccaaaaagacagtttcaacaaataaaacactactgacacaatcaaacccggacactatcagcaactgactcattaaacaaatacaggcggttctggttcaatgccaacaaaaaaatatgcctatgtcatcatgtgcgacacaggcataccttaattattatatatattattcttacttattacttttccaagacgagcactaatgcattatttgcgtcatacaaaccgattccgccacctgctaatacatcaaatgacttcacctcgttcaaggctttcagaatcttaccttccgtttccatatccggacaagccatcatcgtgcttgccactcccggaaaagagattgatttagcattgcttgcgctggtttcaaaaccaccgtttatcaagttacatccggcattgccatgaattgttttctttttcacatcaaaagcgatgaaaggttgcttttccatcccagaagggattgcttcgccattcgcttcctttattttccattctccattcaaaacagacaatttcacattagcctccttcttttcaagaaccacaaccggacgattggatgcattgcaaagatacattttatctttaccggctttcttatatccttttacttgtgccaaagcacccaatacatttctctcagtagtcatatccggacacatcatcttcgtacccgccatcgcgcccaacgaaaggcttcccggtttcgcatttacatcgaaactacccatcatacgattacagccgctattaccggacacacgaccggttgcagtatcaaaagtaataaaaggaagggttctgctttcgcctggagtcactttcgagccattgacctctatgatattccactcgccattgattgatgacaaaggcattgccttctctactgaacggcatgaagacattgcaagtgctgtacctgcaatgcaaattgaaactagtactttattcatattgttataacgtttaagttaaattgaggacaaagataacaaaaaaattgagaatagacttcacaaaggtaaataaaaagagagcgagacgaatgattatctaaaaataatcacgtatatttgctccataaacaattctaatattcttaatttttaattcgcaattaaagaaaatgggtagagttcttattatcggtgcaggtggtgttggtactgtcgttgcacacaaagtggcacagaatgccgacatttttacagatataatgattgccagccgtacgaaagagaaatgcgataaaatcgtcgaggcaataggtaaccccaatataaaaacagcaaaagtcgatgccgacaatgtggacgagctggtagctctgttcaatgatttcaaaccggaaatggtgattaacgtcgccctcccctatcaggacctgactattatggaagcgtgcctgaaagcaggagtaaactatttggatactgccaattacgagccgaaagatgaagcacatttcgaatacagttggcaatgggcatatcacgaacgtttcaaagaagcagggctgacagccattcttggttgtggattcgatccgggagtaagcggtatttatacagcttatgcagctaaacattatttcgacgaaattcagtatctggatattgtagattgtaatgccggaaatcaccacaaggcatttgcaacaaacttcaatccggaaatcaatatccgcgagattacacagaacggacgttattatgaaaacgggaaatgggtaactaccggtcctctggaaattcataaggacctgacttatccgaatatcggtccacgtgattcataccttctatatcatgaggaactggaatcattggtaaaacatttcccgactatcaaacgtgcacgtttctggatgactttcggacaagaatacctaactcatttacgtgttatccaaaacattggcatggctcgcattgacgaggtcgattataatggggtgaagattgtacctctgcagttcctcaaagcagttctgcctaacccgcaggacttgggcgaaaactacgaaggcgaaacttctatcggctgccgtatacgtggtctgaaagacggaaaagaacgtacatactatgtgtacaataattgcagccaccaggaagcatacaaagaaacaggtatgcagggagtgagctatacaacgggagttccggcaatgatcggagctatgatgttctttaaaggtgaatggaaacgtccgggcgtaaacaacgttgaagaattcaatccggatccgttcatggaacaactcaataaacaaggccttccgtggcatgaagaattcgacaaagatttggaattgtaagagtagtcctgttcgataaaaagaaagttatgataaacgtaggagataaagcaccggaaatcttgggtatcaatgaaaaaggcgaagaaatccgtttaagtgcttataaagggaaaaagattgtgttgtacttctatccgaaagacaatacatcggggtgtaccgcgcaagcgtgtaatctgcgcgacaactactccgaactacgcaaagtcggctatgaagtaatcggtgtcagtgtagacaatgagaaatcacaccagaaattcatcgagaaaaacaatcttcctttcacgctgattgccgatactgacaagaaattagtagaagagttcggtgtgtggggagaaaagaagctgtacggacgcgcttacatgggtactttccgcactactttcctgattaatgaagaaggaatagtagaacggattatcactcccaaagaggtgaagaccaaagaacacgccgcacagattttaaatcaataaatctattaattatagaataaggtatggcaaagaaagacgaacttaattttgaaacagataataaaatggcatcaagcgaaaaactaaaagccttacaggcagccatggaaaagatagaaaagagcttcggtaaaggttctatcatgaaaatgggtgacgacagtgttgaacaagtagaagtgatcccgacaggctccatagccttgaacgtggcacttggcgtgggaggttacccaagaggtagaatcatcgaaatttatggtccggaatcttccggtaaaacgacattggccattcatgccattgccgaagcacaaaaggctggcggtatagcagctttcattgatgcagaacatgctttcgaccgtttctatgcatctaaattaggtgtaaacatcgacgacctgtacatctcccagccagacaacggggagcaggcattggaaattgcagaacaactgatccgttcttccgctatcgacattatcgtaatcgactccgttgccgcattgactcctaaagctgaaattgaaggtgacatgggtgacaataaagtaggtcttcaggcacgtttgatgtctcaggcattacgtaagttgacagcagcagtcagcaagacacgtacaacttgtatctttatcaatcagttgcgtgagaagatcggtgtaatgttcggcagtccggaaacaactaccggtggtaatgccttaaaattctacgcatccgtacgtttggatatccgtccgggacaaccgatcaaagatggtgaagagattctgggcaaactgactaaagtaaaagtcgtgaagaataaagtggctcctcctttccggagagcagaatttgatatcatgttcggtgaaggtatctcccattccggagaaatcgttgacttgggtgccgatctgggaatcatcaagaaaagcggttcatggtatagttacaacgacacgaagctgggacagggacgcgacgctgccaaacaatgtattgccgacaatccggaactagcagaagagctggaaggactgatctttgaagagttaaagaagaaataatcacttccaccttacagtttttcaaagctgtaatcggaggagtgagggttgtacaaaaaaagtgggagaatatcgtacgaaacgaacattctcccacttcttttatatattacctaatccttattcttacttatgcaaagtaatagatatatgccaatgtactcaaactaatgactacccataacgctattccctgcaataacggttttacgccaactgctttcagaacatctatcgaaagagaagcaccaataaagaacatcgtaattgtcaatgtcttacgagcaattccattaatagcatttccaatttccggcattccatccagcaaataagtatttacgatcatcgccagtacaaagtagaaaataaaccagggaatactaatcttttgtcccttactcttaaaaatgaatgaagtagcgaaagctatcggaataatccaaagagcacgagtcaatttgatggtagtagccaccttcaaagcctcctctccataagcagcaccggctccaaccacagaacttgtatcatggatagcaatagccgcccaagtaccaaactcatgttcgctcatgttcagagcatgaccaatcattggaaatatgaaaagcgcaatagcattcaaaataaagatagtacccaatgccacagacatttcactatcttttgccttcaataccggtcctactgccgcaatggcactaccaccacaaatagccgttcccgaactgatcagataagaagtatttctatctatcttaaatatcttgcgtccgataaaccaacctatcgccaatgtacctaccaccgaaataatagtaaactccatcccttccttaccggaagccaacgctgattgcagattcataccgaatcctaatccgacaacggagtattgcaatagatatttagaagtctttttattgaatttcggatgtgcctgcccgcaagtcaatgcaaaaataagtccgaggaacagagctactggaggagtcacccatgcagaccatgcctgcaaacccggaatataatccaaaaataagaaaagagtcaaagtagaaagcagggcgacataaatagtcttattttttgcctgcaatgtttttgtagctgttgaaatcatataatatatctttaattgtttttctggagcgcaaaggtatgacaaacaatcaagacacgctaatcgtttctaattatacgttataacttttagttatagctctaacctcttctttatcaagattaccttattacacttctacactatcttttccaaaaggtgataacgctaatgcagtcaagcaacaaccataaaagattcattaaacagcccatataaaagtctgattttatttctatctatcagtctaataataccggataaaagtactttacccacgctacataagtatcttgagcagagagacaagtatctagcaaatatccacgagtagtcgcgaactccctaagtccacgataataaaattgcttatggcgctcatctataataaatggaacgatattatgacgaaggcattcacgaaccaaaatgattggatgtctcaattatatcatcaaccggtacacctattagagtattttttacttgcgttctaaatttagataagcgattaccatataaagaaaaagcgcgggaatctgtacagtacactttttaaagtatgccaaatatataaacatactccgcagccaccctttcctacttccactttatcctagtactttccatacaatctattaataaataaattcctttttattaatgctaaacttctttttctcaaatataaaacctacctttgtacaagaggaaactataaacgaaggctttgtttttataaccaaagctttcgtttttataaatgaaacaaagtgttttttcaagatgcgcaaat

SEQ ID NO: 11861 - DNA, 35909 bp, Unknown
  gut microbiota DNA sequence
ctctgtttaccctattcagaggctctgttttagaagtgagttatattctttcttattcttatacatcaaacagttgatttaatccctcactcatactgggatgcgtgaagataaaatcgcgcaagaatgtagaggtttgccctgtttttatcgccatagctacgatattgatgatttctgaagcgtcagcgcaaaataaggtacatcccataattttcccattatgattgttgatgattgctttcagcataccgtccgtctgttgcaatgtacgtgaacggacaacggaagttgccggaagtcgggatactttgaacgaataacctcttttcagtgcttcttcttcagtaatgccgatatgcgccaaaggcggatcaataaatacggcatattgaacaggatccctatctccgatatcacgtttcttatctccgaagagttgatcgcgtataatccgaaaatcatctagtgaaaaataagtaaattgtggtccgccttttacgtctcccattgcccatacgtgaggaatggtggtgcgcaattgatcgtttacaacaattgctccgtgtgcatctacttttacacctgctgcttgtaaattcaatccttcgatcatcggtttccgccctgttgcgataagaattgcgtctccgtctacaaagtaaggagtgcggtcagatacatccgaataagtcagtgtcactccgtcactcgtatcatgaatagactgtgcgcgtgtattcaaatgaatctcaatgccttttttctccattacatctttgacattgttagcgatatcttgatcgttgcgaggcataaaacggttgcctccttcaagaatcgtcactttactgccaaatccggcaaacatcgaagcgaactccaaaccgatatatccgccgccgacaataattaaatgttttggcaggacattcatatccaaaagtgtggagctggtatacacatacttactttgttgaatcccgtcgattgccggaatgatcggagtggaaccggtattgatgaaaatttcctttccttgcagttcaatatctccgttgggaagtactacttttatagtgttaggtgatacaaaggaagctgtccctgtataaatagtcacattcgggcgcttgcttagattctcgtaattagtttcccgaagaaaagaggttagcctgttcttacgggcaatagtctgcttatacatattagtctgcttcagaaaatccccatggtatagcagtgaagacatctctgcttcatgtatcaatgcctttgtcgggatgcaggctatgttaggacaagaacctccgtacatcatgttggagcgttctacgatggcaacttgccatcctcgattggaaagttcggcagccaggacttttcctgccttgccgaatcctataataattgcatcatactgtttcataacttctttgattaacgatttgtattaggctatataacacagggtaaagcctatttgtttcgttatctcaagaagtcggaactccttacggagtcagattagtcttttttaattattttgagtacgcgttgtgacgagtcggataataatactacagcactggccaggatcacaatgtctttaatcaccagccgccctgcaccggagagtaatggaaagccgaattctccactacccagattaggaacccatacttcgggagtcgtgacgagaaaggatagtgtgccgagtgtcatgataatggctaatgtgtcgcctatcagtcctactttcgggaaaaagattcctagaaatactagaatgccgatactcatgatgagcactcccaatccataggagaaagtatatgtattgtttgcttcgtgccatgtacgattctccggtacgaaagcgccttccggatttttgtattctttgtattcgggtgcgtctttagcatagaagaaactcatgaaaggactgttggcaacaaacgggacaatcccgtcggcctcatagtgaaaatacttcaatccgccaatccatacgaatactactaagatagctacgcggataaatttgataccgaaattcttcagaccggatgtgaaggttagtagagtgataaatttctctttcatcttgttggggctttattggtttaacttacaccgcaaagatcgtacttttccaatattttcccaatggcaatacttccgtatcccttatcaatttttcctttcttgtgtatttctaaattgtactgcactctgtccgcttatatttttaaagaaacggctgaaagaagcctgatcctcaaaacctagaatatcagcaatctcctttgcgcttttgttgctgtaaagcagaaggcgtttggcttccgcttctactctctcgtgaatcactcggagcggagaggggagtttgcatgtggaaaagatattcgatagtgttttgggggatttgtgtaacatatcggcataatcctgaacctgtttcttcgtacggaaatgctcgtcaactagattgtagtattggcgtacgatttcaaagccggattctttttcgcgggtgatattcatacggttgcgtgcaatgcgcgtacattgaatgatgaaccgtttcagcaggatacgcaacatttcttcctgcaaactgtcagttacggtgaactcgttttccaacgcttcggtgatggtatccaattccttgcgttcttgctcattcagcatgaagcggatcagatgggacgaaccgttgaataggaaaccgctgcatgatacttcatgatcatttccataaatacaatagaagttgctgttgaataggagggtcaggtattcaccgtcgattgatttgaattcgaggtgttgcagatgggtaagtgagattacctcatccttgaccaataccatttcctggtggtcaatttctaccgtgatacttccgttgcgcacccatataaacttatagagtcctttttctctttgtaacgctttctctgtcagataagaatccgtgagtgcaagagtgccttttagttttgtgtgatattgttgtaacatacttattcctccatagctgatgcatcaaatgatagcggtagcaaatcacctatattctttatttcgtaaatacattctttgccgtagagcaagatacgtattggttgcccatagcgtttctccgtttccagaatcacttgtcggcaggcaccgcacggaggaatcggtcggtctataaaatctttttccgttcttgctgcaatggcaagggtaacgaccggttggtcgggatattgggaattggcatagaacagcgtggtacgttccgcgcaaagtcccgacgggtaggcggcattctcttgatttgttcctgttacgacaattccgttgccgagaagtacggcagcgcctaccgaaaaatgcgaataaggggaatagctgcgtgctgttgcatctttggcggttttaacgagtgcctggtcggcctcattcagctcatcatattgatatactttaatcactgcggtaattatgaggtctttcatacgcgttacggtattggtttctacaattaatgttacaaagttaggaaagagattgatattcccaattatttttcggatttttgtgtccttataatacatatctgaattaaaatggagaacaaactgtatagacttgtctttttagccgtagttttcttctttgccatagggatgcaagcgcagaggcggaatgcccgctatgtagaatatataaacaagtatagcgagctggctgttgaacaaatgaaacttcataagattcccgctagtatcacgttggcgcagggattgctggaaagtggtgcaggatatagtcagttggcgcgaaagagcaataaccattttggtatcaaatgtggcagcagttggcgggggcgcagcgtccgtcatgatgacgatgcgcgcaatgaatgttttcgtgcttataagcgtccgcgtgattcttacgaagaccattccgattttcttcgaagaggagcccgttatgccttccttttcaaacttgatattaccgattataaaggatgggcgcgcggattgaagaaagcgggatacgcaactgacccttcctatgctaaccgtttgattacgattatcgaagattacgatctctacaaatatgaccgcaaaggtgtttattcggaacgtaagttacgcaaaaatccttggctgatgaatcctcatcaggtatatattgccaatgatattgcctatatcgttgcccgtaacggcgatacctttaaagatttaggtaaggagtttgatattagttggaagaagcttgtgaaatacaatgatctgcaacgtgattatacgttagtagaaggagatattatctatctgaagagcaagaagaaaaaggcttccaaaccttataccgtatatattgtaaaagatggagattccatgcacggcatctctcaaaaatacggtatccgccttaagaatctgtataagatgaatcgtaaggatggcgaatatgtccccgaagtaggagaccgtttgcgtctgcggtaggttactgtttgataaaaaagaattgccgaatgactatccggatatgcctagcagcctgatgcacatatatttgatagaagcgggaccgagattacttgccgggatgtcggaggattcgtcattgcacgcagaaaaatttcttcgtgagatggaagtgaatattttgctgaataaacgagtgatagactatcgcgaccataaagttatactcgaagatggaatagaaatcgctacacgtacttttatttgggtaagtggtgttaccggagtaactatcggtaacatgaacccatcgttgataggtcgtggcggacgtatttggggctctatggcgacagtaggacgtaatcgtgctgttgcggaatttagtaaagtgcagatgcaaggctggttggcttgggttatgtgattggtagttcatctgcgttccattcttggagtgcgtaacaaggtggtcgtgcttcttaactggatatggaattatttcacttatgatcaatctatgcgtatgattgtctatgtgcgaaaagcaaaagaaattcgtgaccgggaaaaggtggaggcaactactcattagggcaggatttgctgtcggaagatcagtagcctttccatcatacataaccggatacagctttgtggaaggaataaaaatatagggctatttgcattgttttcaatataataacttatctttgtacgcataatattgaaaacaacgctggcttttgcttatgaatcgacgatattgctgtttgtttgtagttctcttttgggctgttcttattcaggcggcagctacggaacgtacattcaatatactttttctacaatcttatacagcgcagactccttggcatagcagcctaaaccaaggattggcaaaaggattcagagagagtgggataaaggtgaatattacaacagaatatctggatgccgatttttggacattccggtcggagaaggtaatcatgcgccgcttttgtgaacgtgcccgtgaaaggaagaccgatttgattgttacggcaagtgatgaggccttttacacgctttttgcctgtggcgattcgttgcccttgcagattccggtagtgtttttcgatattaaatatcctgatgaaaaattgattgctgcccatcctaatgtttgcgggtttattgccaatcctgactttgatgtgattctccgtcaggctcagaaaatatttcctttacggaaagaagtgctttgtgtgatagacaatagttttctgagtgcaagggggcttaatgactttcaagaggagtgggacatctttcagaaagatcatccggattatgatatgaaaatctataatacccagaatcatacgaccagtcatattattgcagctatttgttatccgcgtaacagtcacgggcgtcttgtcatagctcctaaatggtctcctttcctctcatttgtcgggaagaattctaaagctcctgtgtttgcaagccagaatgtggggctgactaatggtgtattctgtgcctatgacagtgatgcttatacttcggcattattggctgggcaaaaggcttctcaagtattgaaggggacatctccacaagaaataggagtaacggaaagcaagcagggatttatatatgattataagcaattggatttcttctacgttgatcctgataaggtagcctcaagtggaataattgtcaatgaaccttattgggagaagtataaattcctatttattcttctttatccgtctattttggcgttgttggttgtttccgtcgtatggctgatgagggttaaccggcgcgaatctaaacggcggattcaagcacaaacccgtttattggtgcagaataagttggtagaacagcgtaatgagtttgataatattttccattctatccgcgatggggtgataacgtatgatactgatttgcatattcattttacgaatagttctctgctgaaaatgctccatttgcctagcgaggcgggaggacgtgtttatgaagggatgatggcaggcagtattttcaatatatataatgaggggcaggatattcttcataagatgttgaaacaagtggccagcacaggggagagcgtgcagatacctcagggttcttttatgaaagaggtgcatagcgataagtatttcccggtgtctggagaaattgtacctatccgttcaaggggtatgattaccggtatggcgttttccgcccggaatatttcggatgaagaaatgcaaaaacgtttttttgatatgacgatggatgaaagttccatttatccgtggcaattcgatgtggaaacaaattgtttcatctttcctcaaggctttttgacacgtctgggatatgaagaatcggttacgataatttcacgtgaggatatggagcggacggttcatccggacgatttgaaggaagtgaaactgttatttgacagggcgctgaccggagaagatacgaatacgcgcctgaacttccgtcaacgtaacgccgatggtgaatacgagtggtgggaataccgttcttccgttatcacaggattgacgcaagactcgctgtataatatattaggtgtctgtcaaagtattcagcgatataagacggccgaacaggaaatgagggaagcgcgtgataaagctcttcagaccgataaactgaaatcagccttccttgccaatatgagccatgagattcgtactccattgaatgctattgttggtttctctgatttactgagtgatacaagtgggtttacaacagaagaagttgctcagtttattgcgactattaataaaaattgtggtttgctgttggcattgattaatgatattcttgacttgtcccgtatagagtcaggtacgatggaatttatctttgcggaacataacttacctctgctgttgaagactgttcacgattcgcaacggttgaatatgcctccgggagtggaactgctgctacgtatgcccgaaggggataaaaagtaccttcagacagataacgtacgcctgcaacaggtagtgaataatctgattaataatgcggctaagtttacattcagcggttctatcactttcggttatgaagaagaggaagagcccggatatacccgtatctttgtagaagataccggagtcggcatttcggaagaaggtatccggcacatctttgaacggttctataaagttgataatttcacacaaggggcaggattgggattgagtatctgtcaaacaattgtcgagcgtttaaaaggaactatctctgtaacttccgaagtgggtaagggaacccgtttcactgtgcgccttcccgattattgcgaataaatcggactgttcttctttgattgtgtcaaataagaacacttcttccgtcaaacagacctttttttgtccttaaatacctgtacctttgtcccgctcaattcaataggattttaaggtatgagactaatcgtaaaaggtacactgacgctctttcttttattgttaatcagtattcctctaagcgcacagtatgtagtgcaaggagtggtgactgattctctgacaaaagaacctctaccttatgcatctgtacgtttgaaagacacgactgagggaactacgaccggcagtgatggacgcttttatttcaagaccaaccgttccgaagcaattcttgtgatatcggtcatcggctataacgaaaatagtcggaggatttatccagcccgtaatttatcctacaaagtagcgcttgcacctactgcttatgacctttctgaagtcgtggtaaaacccaaacgagaacgttaccggaaaaaagataatccggcagtggagtttgttcgtcggatgattgagggtcgtgataattattctccaaatgaaaaagatttttggcaacgcgaacgttatgagaagactactttcgcgctgaataattttgatgaagagaagcagaagaaatggttatatcgtaaatttgattttcttaccgagtatatagatacttctgccgtcaccggtaaacctattcttaccgtatcagcccgagagttgcttgctacggactattatcggaaatctccccgctccgagaaacaatgggtgaaaggacgcaaacaggcgggtgttgatgagttcctttccaaacaagggatgcaggctgctatcaacgaagttttcaaggatgtggatatttacgaaaataacatttccctgtttaccaataagtttgtcagtccactgtcccgaattggtacgggattctataagtattatctgatggatacattgcagatagccggtgaaccttgtgtggatctggctttcaccccatttaactccgagtctttcggattcaacggacatctgtatgtagtgctcgactctacttattttgtcaaacgtgccgtgttcaactttcccaaaaagataaacctgaattttgtagactatatgttgctcgaacaggaattcaaacgtgccgaagacggtacgcgcctactcgatcatgaaagcattacggttgaatttaagttgaccgaagggcaggatgggatctttgcccgtcgtgtggcggattatagcaattatacatttgcaccgactgcagaagccgacaaggctttcaccaagccggaacgtatcattgaagaaacggaggctttggcgcgttccgaatctttttgggcggagaatcgcccggaagccgctatctcgcaacaagaaaattcggtagatcacttgatggcacagttgcgcagttatccggtctattattggacagagaaggtgctttctatcctctttaccggatatatcccgacctctaaggaagcgcctcttttctatattggcccgatgaacgccactattagcggtaatacactcgaaggtccccgtattcgtgccggagggatgacaactgcctggcttaatcctcatctgtttgcaaaagggtacattgcgtacggttttaaggatgaacgtgtgaaaggattggcggaactggaatattcgttcaaaaagaaaaaagaatatgctaacgaatttcctattcactctttgaagttacattacgagtctgatgtcaaccaatatggacaaaactacctgtatacgagtaaagataatgtgtttctagctttgaaacgtgaaaaggatgaccgtatcggttatttcaaacaggcggaaatgacctataccaatgaattctattcgggcttttctttccaattgacagcccgcaggcggacggatgagtcttcgtatctgattccttttctgcgaaaagaaggcgacgtttatactccggtcaagggtttttctaccagtgcggctgagttgaagttgcgttatgcccctaatgagaagtttttccaaactcaatggaaccgtttccccgtttcgttggatgcacctgtctttaccttatcgcatactattgccggtaagggtattttaggtagcgattatacatataaccatactgaggccggtatccagaagcggttctggttttctgctttcggctatacggatattattctgaaagcgggtaaagtgtggaacaaagttcctttccccttgttaatcatgcccaatgccaacctttcttataccattcagcctgaatcttattcattgatgaatgcgatggaatttatgaatgacgaatatttctcatgggatgttacctatttcctcaacggttggttattcaatcgtattccattgttaaagaagctaaaatggagggaggttgtctcatgtcgcgggttgtatgggcatttaagtgataagaacaatccggccttgagtgatggcttgttcgcttttccgatagcgaacacacagtcaatggggaaaacaccatacgtggaggcggggataggtattgaaaatattctcaaggtattacgcttggactatgtgtggaggcttacataccgtgatgcacccggaattgacaaatcaggattgaggataagtctccacatgaccttctaaaagttaaatcctgctaattgccatgtttatatgacaaataaagctcgttttaataattaattaatcttatttttgcaacaattttagtttaattttaatagaatagaaatgaaacaagaaattaagcccgctaccggacgtctcggcgtgttggtagttggagtgggtggagcagttgctaccacaatgattacgggtacactagcctctcgcaagggactggcaaaaccgataggatctatttcacagttggctactatgcgcatggaaaacaatgaggaaaaacttatcaaagatgttgtacctttgacagatttgaatgacattgttttcggaggttgggatattttcccggataacgcatacgaggctgctatgtatgcagaagtcttgaaagaaaaagacctgaacggagtaaaagacgaattggaagccatcaagccaatgtcggcagctttcgatcacaattttgctaaacgtctgaatggtacttatatcaagaatgctgctacccgttgggacatggtagaacaactccgtcaggatatccgtgactttaaggctgctaacaactgcgaccgcatcgttgttctttgggctgccagcacagaaatctacgttccgttgtctgacgaacatcagtcactcgctgctttggaaaaagcaatgaaggagaataatacggaagttatttctccgagtatgtgttacgcttatgctgctattgcagaaggtgctccgtttattatgggtgctcctaacttgtgcgtagatactccggctatgtgggaattctctaaaaagatgaatgtgcctatctcaggaaaagacttcaagagtggtcagactttgatgaagactgtattggctccgatgttcaagactcgtatgttgggtgtgagcggttggttctctaccaatatattgggtaatcgtgatggtgaagtgcttgatcagccggaaaacttcaaaacaaaagaagtcagcaagctgtctgtaatcgatactatcttcgaacctgaaaaattccccgatctttacggagatgtttatcataaggtacgtatcaactactatcctcctcgcaaagacaacaaagaagcatgggacaatatcgacatcttcggatggatgggctatccgatggaaatcaaggtaaatttcctttgccgtgactctatccttgctgctcctatcgcgctcgaccttgtattgttcagcgatttggcaatgcgtgcaggtatgtgtggcatccagacttggttgtcattcttctgcaagagcccgatgcatgattttgaacaccaaccggaacacgacttgttcactcaatggagaatggtaaaacagacattgcgtaacatgattggtgaaaaagaacctgattatttggcttaaataggaagatataatagaatgaaatatgcgttaatagccgcagggcaaggttctcgccttgtctctgaaggggtgaaggttcctaaaccgcttgtacaagtgggggggactcctctattaagccgattatttcgcattttccttgataatgatgcagagtctatctgcatcattattaatgaagaaatgtccgaagttcgttgttttttggaacaacaacagcgacaactacccatacctctgaatgtgattgtaaaatccactcccgattctttccatagtttttatgaactcatgccttatctgcaaggcgaaggaaaattctgtctgacaacggtagacccgatctttcgtgaagcagagtttgctgattatattcgtacttttcgtgctgatgaatctgctgatgctttgatggctgttacggattatattgacgacgaacgtcctctttatgtcaagacagcggataatttgcggattacgggatatgccagtgaggcttatgacggcttgcgttatatatcgggaggaatttattgtatgaatcagcgtgctttggcacagttgcctttagcgatggaggcaggagtttcccgtatgcgcggtttccagcaatatctggttgatgccggtttgcagttgcgggcttacccattctcaaaagtaatagacatagaccatgcggcggatgtgaagaaagccgaactttttttagatgaacaactgattaaatgagatccttgatttttgcgggaatacagcgatattctcttttttcacccaatcatgtcggcaatgatgccgccatcttttcggctgttgcccagtatttgaaagaaaatggtcatcaggtgaatatgtatacggaacaggaattcctgactaattcgttgaaaggcgagaagtatatatttaccatgatgcgtagtaaggcttctgtgcggaagttgcagaagttggaagaaaaagaggattgctttgcggtcaattccggacatggtatcgagaattgcacacgtgagcgaatgactactctgctgcttgaaaatcagatttctcaccctcgaagtttgatatgggatacgaatgatggtgtccccgaagcattgataaaacctgtatttgagccttgttggttgaaacgtgcggactttcatgccattcatcgtgaagatgtaacgtttgtacgtacttctgccgaattgcaggaggtcattgcagaatatgctttgcgtggtatcgaacgtgtggtgattaatgagcatttgaaaggtgatttggttaaattctatggagtagccggtactgatttcttctattggttttatccgcaggagggtaatcatagcaaatttggccttgaagagattaatggtgctccgtctggcattcctttctcggaagaggggttgcatcaactttgcagtgatgcggcgaaagtgctggatgtgacggtatatggtggcgactgtatcgtagcaccggatggaacgattcgtatcattgattttaacgattggcctagttttgctccttgtcgtcaggaagcggcgaaggcgattggtggaattatcataagaaaagtagagaacgtaggattatgaataatgaagtaagtgcaaaagggctggaggcaaccttgaagtctactgatacggaagaatggatcgacttgttgttctaccgtcctatcggttatcgttgggctcttctgtttcgtcgtttgggagttactcctaacgctatcaccatagcttctatctttttggggatagttgccggtatattgttttattataatgacctgctgataaatataataggtatgtgtttgctcgtttgggcgaatatgtatgacagtgctgacggacagttagcacgtatgactgggcaaaagtctgaaattggtcgtattctggatggagtatccggtgatttttggtttatttctatttatgtagctatctgtttacgactgacaccggaatgggggtattggatttggctattggctgcggtagcaggattttcgcatagtaagcaggcggctatggcggattattaccggaatgtgcatcttttcttcttgaaagggaaatacggcagtgagttggataattccgtgcaacaacgcgagttgtatctttcgttgtcatggaagaaagacttggtgcggaaaacattcctttggttttatacgggttatacgcattcgcaggaacaattctctccggctttccagcgtttttttgcagcgttacgtgcgaaatatggcgaagtatatccgcaagaggttagaaaccgttttcgtgaaggtagtcttccattaatgaaatacaccaatattctttcattcaatacacgtgttatcgtgttgtttatttcgttattggtcaatctgccttggatttattttgtctttgaactgaccgtacttaacggattactgatatatatgatatgtcagcacgagcggttgtgcagacaaatgtaccaaaacttataatatttatgaagagtcgttttagaaacattttccttgtgtttggcattgtagctgttgttatcatgcttttcacttttgatgtatcttatgaggagttgttgaacaatctgaagcgtgcggggatttatctgccgttggtgttgttgctgtggctggttatctatgccattaatgctctttcgtggtatattattgtgcgtagcgggggaaaagtatcttcattgactttctctaagttgtataaatttacggtctccggatttgctatcaactatgttactccggtgggactgatgggaggggagccttatcgtatcatggaacttactccctacgtaggagtggaacgtgctacttcgtcggtcatcctttatgtaatgatgcacattttctcgcatttctgtttatggttgagcgctgtcgtaatttatgcggtgttctatcctgtcagttgggaaatggggattgtgctgggattggtaacggttttctgtttgctgttgagtatcctgtttgtgaagggataccgtcatgggatggcagtggcttgtgtccatttgggaagtaaaataccgtttctgaagaaatgggttatccgtttctcggagactcataaggcgaaactggaaaatatagatagccagattgccttgttacatcgtcaaaagaaaagtacattttatagtgcgttgtttttggaatatctcgcacgtgttgttagttgtatggaagtatggcttatattgaatgtgcttactactaatgtcagttttgtgagttgcgttttgattttggcattctcttccttactggccaatttattgtttttcttgcctatgcagttaggaggccgtgaaggcggatttgctttggcggtaggtggtttgtccctgtcgggagcctatggtgtatatacagcactgatcacccgtgttcgcgaattattctggattgtgataggtcttgcattaatgaagataggaaataaaaaatgatagataaagataagataaaagcggttgcttttgattttggcggaacgcttgactcgccttttttgcattggatggatatttacattcatctttatacgatgaagttgaatcttcctttgacaaaagaaaattttcgagattcgtatgtgtatgcggagcggatgatggagcaattgcaactagtaaagcccgaacattccctgcttgagacgcaggcatttaagaccgacttacagtttaaaagtctgatagaacgtggcgttttgccggatacaccggagaatagggaggggttgcctttaaaagcagcccgccttgtgacggattattcatcggattatgtggtcgcatcccgtactgtacttgatgagttacatcgctcatacaccctgttgcttgtttccaattattatggaaatcttaagaagattgtaacggatttgggaattgtatcttattttcactctatcacagattcgacgcttgaaggtgtacgtaagcctgatccttccttgtggaaacgggcaattgaccgtgccggatttgcctatgaagaagtgctggttgtcggtgactcgatgaaaaatgacattcaaccgggattgtctcttggttgtcaggttgttcaaggttgtccggaaggcagaacaggagaagtcggtataccttttattacccgtttatcggagcttccggcattgctttctatatagtttcaataataaaacggcgtctcgttgcaacgaggcgccgtttctctgtctatttgatttcgatttcttccttcatatcgatttcctctccatgtgtatcgtagaatacatattgtaggaaagcgagtttctgacttggaataaccttaataccgaatccgtatttcatctgccatttccgtttcagagaaacgagtccctgattgatataggcggcaacatacggatggacatgtaacgagaatttcttaaccttcagtttgttgaccaggtagtcaattttactctccaaagtgtccgtaaagagaatggacgatttgatagtgcccttgccgaagcaagtaggacaagtttcggtcgtgttgacgtccattgccggacgcacacgttggcgtgtaatctgcatcagcccgaatttgctgagcggcagaatattatgccgtgccctgtctttttgcatattggcacacatacgttcataaagcttctgacggttttcggcttcattcatgtcaatgaagtcgacgacaatgataccacccatatctcttaatctcaattggcgtgccagctcatcggcggctccaagatttacttcgagtgcgttaccttcctgcccgttggcattcttggtgcggttgccgctattcacgtctactacgtgaagcgcctcagtgtgctcaataatcagataggcaccactcttgtaagagattgttttaccaaacgatgatttaatctgtttggtgataccaaaattgtcgtaaatgggaagttggcctttgtacagttttacgatattggcccggtcgggcgcaattaatgttacgtaatctttaatttcattgtacacggcctcgtcgttgacgtggatgttctcaaaagaagggttgaagaggtcgcgcaacaaacctacggcgcggctggtttcttcataaatcaacgtcggatacttggtggctttctgtactttcaccattgcatcttcccaatgtttgatcaggactctaagctctccgtcgagttcggctacgcgttttccttctgctacggtacggacaatgacaccgaagtttttcggcttgatactcatcagcagttgtttcagacgggcgcgttcttcgctcgatttaattttttgtgatacggaaaccttgtcattgaaagggatgagtacgagatagcgccctgcaaacgaaatttcggatgtcagtcgcggtcccttagtggagatcggttcctttacgatttgcaccactacttcttgtcccaccttgagtgtgttggatacagtcccatccttgtcgaggtcgggaagcagggttgccttgctgatggagttcagcttctttttgtcgcttaaagtctgctttacaaacttttcgagtgagttaaattgaggacccaaatctaaataatggaggaaagcgtctttctcgtaaccaacgtccacaaagcatgcattcagtccgggcatcaatttcttgatacgtcctaaatacatattgcccacagaaaaggaaatatttcttccttcgctttgaagttccaccaagctcttatcttcgagaagagcgatggaaacctctttaggctgtacgtcaactactagttcacttgtcactgttttgtttccttattattgattgaatctcatttgtacgaacaactattttaacaaattgttcattttgagttaactacttaaacaaagaacaaacttgaaagacattagcttcgcaagtttgttctttatttctgtgtgatccagacctaaaaattattttttgcttttatgtctgttctttcttaatctttttttacgcttgtgcgtagacattttatgtctttttttcttttttccgcttggcatagcttcacattttatgggttaatactcttgtttattatttctttactgaaattgtaaatgtcttagccggtttgaaagccggaatgttgtgctcagggataatgatagtagtattctttgaaatattacgagcagttttctgtgctctttttttcactacgaaactaccaaatccacgtaaatacacattttcatcgttagacaaagaatcttttacggcatccatgaaggcttctactgtagtaagaactgtctgcttatcaatcccagttttctttgtaatctcgtttacaatatctgctttagtcatttttccttaaaaaaaatattattactatgttattgctaattttttggactgcaaatatatagctttttaagctcctaaaaaaatatattctacacatttttctaaaaaaatggttgcatagaggtttcttagaaccaaaagagttacttttgtcggaaaaaagatatactgatgtgccaatatgctaatatgtttacggaaacgattatagaatggtataaagaaaataaacgtgatttgccgtggcgtgattcttctgatccttatttgatatggatttcggaagtcattcttcaacagacgcgtgtagttcaaggatatgattatttccttcgttttatcggacgctttcccgatgtatctacattggcggatgcggaggaggacgaggtgatgaagtattggcaggggttgggatattattcccgtgcccgcaatcttcatgcggcggcaaaaagcatgaatggtgtttttccgaaaacgtatccggaggtactggctttgaaaggagtaggggaatatacggcggctgccatctgttcgtttgcatataatatgccttatgcggtggtggacgggaatgtgtatcgtgtactttcgcgctattttggtattgaaacaccgattgactcgacagcagggaagaaactgtttacagaattggcgaacgagatgttggacaagaaacagcctgccctgtataatcagggaattatggatttcggggcgattcaatgtacaccgcagtcacccgactgtctgttttgtccgttatctgtcggctgttcggctttatcgaaagggctggttaccgtgcttccggtgaagcaacataagacgaagtcaacgaatcgttacttcaattatatttatgtacgtgcgggcgcgcatacctttattaataaacggacggataatgatatttggaagaatttgtttgaactgcctttaatagagacttcatcctctttgccggaagaagagtttttggctttgccggaatttcagacgttgtttgcccccggagagcaacctgtggtgcgtccggtatgcagagaggtaaaacatatattgtcgcatcgggtgatttatgctaatttttatgaagtgatattgcccgaaggaactgcttctttcggtaaattccaaaaaataaaagctgaggaattggagcgatacgctgtttcccgcttggtgcacgctttcattgagaagtatatcgatctgaaataaaagttataacaattcttgcattctattgttattctgtttaattttggcagcagatttggatttaagaatcataaacttgatacgtatatgtcagtaaataaagtgatattgttgggaaacgtgggtcaggatccacgtgtaaaatacttcgatgcaggctcggctgtagctacttttccgttggtaacaacagaacgcggttatacgttagcaaatgggactcagattcccgacaggacagagtggcataatatcgttgcatccaaccgtttggctgagattgtagacaaatacgtacacaaaggtgacaagttgtatctggaaggaaagattagaacccgttcgtacacagatcaggcaggtgctacacgttatactacagagatttatgtagataatatggaaatgctgactccgaaaggaactaaccccggtgcgggtgctacagcttccatgcagcaacccgttgccgcttcggtacagcagccgcaacagtcacagcaatcgcaggctcaatcaatacaagataattcggcggatgatttgccgttctagataatatggtagtgtgccgactggctttcgcaaacttataggcacattatcttttgtttaactaaaatatagaatctttggactcagatggttatttaagccagttagctggcattttcgacggtattaccgtacttactccttctatctctgctattatcgccatagtattggctggtgtgctcctgcttgcttccggttttgcttcggcttctgaaatagcttttttctcgctttctccttcggaccggaatgatattgacgaacgcaatcatccttccgatgaaaaaataagtgcacttcttggtgattccgaacgccttctggcgacgatactgatcactaataactttgtgaacgtgactattatcatgctctgcaatttctttttcatgaatgtgtttatcttccattctccattggcagagtttcttatactgactgtaatacttacttttctgttattgttgttcggtgaaataatgccgaagatctattctgcacagaaaactttggctttttgccgtttctccgcaccgggaatttattatctggagaagatatttcgtccggtggctactgtcttggtacgttcaacagcttttcttaataagcatttcgccaaaaagagtcataatatctctgttgacgagttgtcgcacgcattagaactgacagataaagcggaactgtctgaggaaaataatatcttggaaggaattatccgttttggcggagaaacagtgaaggaggtgatgacatcacgtctggatatggtcgatttggatatccgtacacctttcaaggaggtgatgcaatgtatcattgagaacgcttattcgcgtattcctatctattccggttcgcgggataatatcaagggagtgttgtatatcaaggatcttttgcctcatgtgaacaaaggagataactttcgttggcaatcgttaattcgtctggcctattttgtgccggagacgaagatgatcgatgacttgttgcgtgattttcaggcgaataagattcatatagccattgtggttgatgaattcggaggaacgtccggattggtgacgatggaagatattattgaagaaattgtgggtgagattcatgatgaatatgacgatgaagaacgtacatacgttgtattgaacgaccatacttggatttttgaagcaaagacacaattgaccgatttttataagattgtaaaagtagacgaagatgagtttgagaaggtgataggggatgcggatactttggctggtatgttgcttgagataaagggggaatttccagccttacacgagaaggtgacttatcataattatgaattcgaagtactggagatggacagtcgccgtatcttgaaagtgaagtttacgattttgccaaaagaacctgaagtatcggaaggaaaagaataagatggcgttatacctgcaacatagggaagacggcatacaatgggctgtctggaagatggaagagcctttggacgtattattgtctttgttgcccaatacacggaaaatatcttctgaaaaggaattaccgcgttttacttctgaacgtcggaagatggaatggttgtctgttcgtgttttgttgtattcgatgttacaggaagacaaagagattgtttactcttccgaaggaaaaccgtttctttccgatcattccttttatatcagtatttctcatacgaaaggatatgtggcggtagcacttagttctttgaattctgttggcattgatattgaacaatacgggcaacgggttcatcgggtatccgaccgttatatccgccctgatgaacaggtagaatcttatcaggaagatttgacttgggggctgttgttgtattggtctgctaaagaaacaatcttcaagcgcatggagaacgccgatgcagatttccgtaaacttcgtctggcgcattttattcctcaagtggagggaacatttcaggttcaggaattcgcaacgcagcaacagaaactctatacggttggttatcgtattgagccggattttgtgttgacgtggacggagaactgagtgcaggctgaataagaaatgttcactaatgcttttgacggacatttactgatttgtgtaattcattcttctgttgttatattctcgatttgtacccacaagaacatatggtagagaataaaaagaagcgtcagacttcccaaaaagtagcctaacgcttttttattatttttgcgactatttgtctttttatctataaatcacactcttgttattggaaagttatggttgacgggaaccaatattcaccggtgtaatcaataatagctttttgggttccggtcactccatcgactacgtaaatataggtatttaaataatgtgctccccatccgtcttctgtataaatgaggtatacgtcaccattttggggatttacctgtatgcctgcaccatatccggagtaatttgttggagcagtgaagaatttatttacgttttgagtagtaatatcaaatttatagatatctgtgccattgaaattaggtgcatgagcaaaatatagggcgttttctgtaatggaagcacataatccacttggtttataagtagtatcaataaagatttttaagttgttgggtaattgaatttcttcactctctaaactgtttggattaatttttaccagtttattactatttgctgcccaaagcataccatctttagttagagcgaatcctgttttgatttcagttccaatttgcttgttaaaggaaagatcgtttatattatatactttgactgtttcttgactacgaataaagagataattttctgttttgtaaatatcttctttatcatttttaacgttgtccatatcatttagcttctctcctaatgtcagtggatttaggttcactttgaatgccccatttgtagtcgttaatataccggtttggtcattaatgatacaaaaattgttaccctgcccgttatcaccaagaccatcttctattttgtcaacaatagagtaattggaaagttctgcttttacaaggaagggtgaatccttggatacgatgtatatatagtttccattaactactcctactgttgatgtattacctaattcactaatgattttgtaattccattctcctttttgatatctgttgacactaccgggagtcccatattttccttcatttactacataaaaactacttggatacatttgggcattgatactgatggatttttggaagttatcattattattgataatattaagggttattgtgtaagttcccttctcgttagccatgaatgtataattactctcatttgatacactttcaccgtttacttcccaattatactcaatctcgccttgagtattagtattatttatttgggcttctaattgaataatttggcctacgttaactgttgcaccatcttcaatacctagagtgatttcaacttttggatcatcatcgtcactacatgatgatgaaatgaatggcaataccagcaatgccaacatatatagttggctaactaagaatttcatctttttcattcttcttttaattaaataatttatacataattgtttattgtttcccaaaatgtaaatcttcaatagcttgtatttcggttgaaatttctcccatccaccctgtattttgattgacagctgtgtaaattctaacgaaatcaatgccatctaattgaacgggatgtccatttttgtctactgcccagtctatttgaaatttacttttttccgtgttattagggtgattgtctgcatatccgtatggatagcagtatcctacccaatgttctggcatatcttcacgaggttcattcacagcgttatttttcaaacggctaccatgaaatgtcatctcgttctcttctatccataatggataatatgaattggtagtatagaaatcatttctgtttacatatccctcgtttccttgattatctgtccatttaactttatccaatattgatgtgggacggtgataagtaatagtataattttttatagttgcggaagacgtatattcgctgccggcaagctcataccattcatcatcaggtaattggttaccattaacatctttcgaaactaatacaatgcctggctctgagcttccaccaagctttccagttaatgtcccgaatgtgtcatagtacgcgttgccatatattttgaaatcatattctccgggaacgttaggtactgtatgatcaaatcctaccgtgatataacctccgtatgctccaagactaagaagacataggtctggatctttgagtagctcttctgcatattttctcacatcttcagatgtatagttttctttataagcagttgtggatgtattcataaactggcagggggccggcctgtattccaatactctattggcaaatgcagagggggcattcggatccgagttctcttcactgctgtctcctgatgatactttgttgctgaacacaacggtattagggttcagtccgacacggttgattctgaattgcaactgtccgtttagattgaagcaaagtatgtcaccggttatggtgtaactatatgcttccgttatgtagatattgtcactgtatggattgatattaataccgtaaggggtgttgatccgagttccgtctgtgataaagttgtcgcgtatagtctgtccggtctttagattgaaaaccttgatagaagatgactctgtattgtagttgtaattatataaataagcgatattgccactgattgcaaaattcatgactttttcgtcataaatatgtgctacttcatctgttctgcagtctatctttacaaagtggaagtcaccatctgctatgttatttccatgagtagctacataaactgtttcgtctggtcctggtacaatacatccgggattgggaccgactgttactttctttatttctgtaaaggaagtgatgtcgatcacggaaactgtattgtctacacctaagcctgcagaataatccaaaccaccggaattggatacatatagtttgtcattttgtatacagatattttccgggtttcttccggctcttgtcaaggcatctatttctaaggaagtagtgtcgatccgtgcaacggtaccatcgtatgaacatacgtatgccttgtctttatgaaacgtgatatggcgtggctgtcgtgaactgccgttttctgccagcatagggatttgtttgatagaaactcctgtttggaagtctattacttcaatggtactggatacattgactacaatgtataatttgccaccatataatgccatatcattggctgtatcacccaaccctcgtttgtttaggtccttgaagtaatttttagtaagctttccctttttgaacgaataacgggccaaagaactgttattcaagttaaacaatccttcgcttaatatatatagctctgcagttccggtttcggagatattactgccatcaatgttggggatagatggcttgtcctccatatcatcacaggcaatgaataacagtaagagcatccataaccatgtctgcaatatatattttctatttatagttatttgtttcatagttaatatttgatactgaacgttgctctaacagaacgtccgggcattggaaagttcttgataatctcataattgttattggctatatttaatacttctatatgaatagaagtattaatcttccgtatagttaactccctccccacagagatactatggtcactataactctccattctattctctgtgatattttctccttgtgtatatcgttttcctgagaacaggaatgagtaagataaattaacccaagacgtttcgatacctacctgtcccgaaccggaaacacggggggtataagctatctgatgtttgtaagttctcccttcttcggaagcagggtcggggttggttacatccaaagcctgttggtatgtataattccccgaaagattgatacggagcttttcacaaggctggagggacacgttacctgtgacatcaatgcctttgatttctacactgccgagatttctcatactccagacagcaaggttcttggtaggataggcaatgattttatccgttatcttgttgtaatacgcatcaacagttgccgagagataaggcaggaacgggcatacatccttactgtatgtcagaccgatattatactgccgtgcattctccggcttcagcttattgtttcctgtttcgccgtagtataaatcgttgaagcttggcaggcgaaagatatctttatagaaaattctgatgcggaattcttccttgtcgaaaggtttgaatgaagcacttacatacggagaaagtttacggtgattacctgcacttccccctttatcggcctgctcgtagatgacagttgccaaagcggatgcagagagagtaagccaattgtttacatattttcccgcaaaagctgtcagccacgaatagcgcgtaggatgggcaaagtcatttagattggcattcatcgtgttgatacttccgtcagaagaaagcgaaaaagacaaattattcaataacctgtaaagcatggaccccgaaaggtaatactcctgctggtaataactgttctctatttctccggtagaacctttgtagtcgggatctaaataacgttgatagctccaattccacttggcagaagtctggaacacccattgccggttaaattctttcttgtattgactttgaataaatgtgttcttgtcccaaagacgttgtgaagaatgagtataatagaaagttgtggcattgggcaatccgcgggaagattggaaataataggcttttagcctccattgttctttgtcggagaagtttccgtaaagcccggcttctgcacgaaatgtctgtacatccgtgttctttcgcttttcccgtgaactcagatccccttcttcatttccgtaatataaagtatatggataatgcccgtccgatgacatccattcgccgttggcagatacagtccatttccgactgatccgttgttccaataacagactgggattgaccaatccccatgaaccggtcttgaaagacgcacttatattcgtgtgctttccgtcctcaaatcggggagtgagtgtttgtatattcagtatccctgctgaagcaaagaaacgggcaggctggaagatgttgtcgctttgaccgttactcaacgacagttggtcgacattatcgagagagaaacgtccaaggtcgatttgtcccgtttgacagtcagtcagtgtgattccatcgtaacctacagcagtatgttgcgcacccagacttcgtatggatatcgttttcagtccgccgatccccccgtaatctttcacagttactcctgcaaaatgtttcacggcatcggaaacctgcagggcattcagattctttaaagcgtctttagaaaatatctgtaatggagcggtagagcgaacctcacgggtctgatgaatatcggaaacggttatttcggggatgtaataggtacgtgcggtatccaccctttgctgttgtgcaaaaagtgaagtcgataaaaacaggttgcagcttactgcaaagattgctaaagtcctcttttccatttcctctttttaggtttaaaagtgtccgggcgaaatcccttcgaccggacacgcataaataaacttttggcagagtttattataacatactttctctgaatcagaatgatgaatgaaatgatagacggaattgtccggttcattagattcaacgctttttcctcgaaagcaatgaaattggttgcatggcaggtcttctgacttgttcctgttgcgagcgccttcccggaaattcttcttccagtggctaaaagtaggttgcttgcaacataatatagaacttacagcagcgggactgttcaggatttacacctgattcccttttaatcgctttccccgtgtgaggtctgcgaaccaatgcgcgacaaagataggtagtttatttgttttttgcaaggagttatggatgtaataacagatatttttcaacagcttgtgcggtaatggctttttaagtggtttatctctcttttgccaatgtaaatacaaattccagtccgcctccctgattatttttcgcagagatacttcccccgtgaatgataaccgcattctttacaatggccaatcccaatcctgtcccgcctaatttccgtgaccgtcctttgtctacccggtagaagcgttcaaagagtcggttcagatgttcgggtgacacacccacaccggtatcggcaaagctgaaatagtagaaaccttcatcttcgcggaaacagtttatattgatttggatatttgttccggcgtatgcaatggcattatccatcagattgcggaatatggaataaatcagcgaataatttcctttgatttgtatgctcttctttaaggaattgacaaccgtgatatgcttctcatccagttccagcgcaacctcattgataatattgcccaccaataagctgatatccacccgttccatatcaatcatgttggcagcttcgtccatgcgggttagtacggatatatcccgcagcaaccggctcagtcggttactttgggcatagcaacgttccagaaaaacatttattttctcacgtgggatattctcgttgctgacaatcgtctccagatacccttgaatactgctgacaggagttttcaattcgtgggctatgttctgtgtcaattgccgtttcaagtttatctgttcttcttcctgagtgacatcattgatcgaaatctcaaagctggcatcttgaaagatgatacattccacgataaaggttcgtccgtttttattgattgtgatagacattctcttttcatcttttcctcccgaacgctgtctttggttcttgttgatgaagtggatgatctctttcagttcgctgatagcaaagacttcttccgtagtttccaggttggagtctgaaatcagattactgtattgggtaaagaggttgttgaccagaatctcctttttgtcttttgtaaatactcccagtccttcatgtgagatctggagatgggtgatcaatttctcacgttcgatgtaaagtgcctctttggtctcgtgcagccgcttgtatatttgtatgatatgttgtgatatttcccccagttcgttatgtgggaaagctgattgcatagccatttcgataggctcgttccggtcggcacgcatggcgaactcgcgaagctggttgatggaagttcccaatttattcgtgaacttatagaaaataatcatcagcaacagagtcacaatgaccgtaaaccataaatagtgcgggtcggctttcagattgttgatgaggctgacattataaggtagagccgaacggacaatataatctttgtaacgtgtagccgaataaaaataggggacaccggtcgtctcggaagtacgccgtacgtcatatccatttccctgtttcagcgccttttgtacttccggacggtctaaatggttctccatctgcccgttgtggttcgaataactgtcgtaaagcacatttccgtctatatcaataagagttacacgtaaatcttccagaatatggttgttgatataaccggtgataattgaactgtccggcgattgcctgctcaactgttcatagagccggctgttgtaatcctgtaattttgtgttcagcaattccaccttatattcccgctcacgttgatactgatacgcgataaagcaaacggcaaataccagaaacagtgaaatgaccgagagaaaaagctttcggctgaaagagaggaaatgtttttgagttacaggcagattcatagggagtagttattacgcttcaaaacagtatccatatccgagacgagtgacgatgcacttgccgtatattcctatcttcttgcgcagacgggtgatatttacgtcaatagtacggtcgagtacatatacctcgtcgctccagatacgggccagaatatcttcacgtgaaaatacccgtcctttattctgtaccaacagaagcaatatttcaaattcttttttagtcaacggcacttcttcttcgtcgatacttaccttctttttcgtgatatcaatgacgagcgtctggtaagtaagccgttcgggaactctttctgtttccgctgcagccgtgcgtctcaatacagcttttacacgggcaatgacttcccgcagcgaaaatggctttgagatataatcatccgcgcctagattgaagccggtcacggtgtcgttctcagtatctttggctgtgataaagatgataggtacttttgctgttttcttgtcctttttcagcatgttcgccattttgaatccggagatttcccccatcatcacatcgagaagaattagctgataactacaaatatccagcttcaaagcctcttcggcggagtttgcggtatccacctcgtaaccttcattttcaagattgaatttcagaatctcgcagaggtcttcttcatcgtcgacaactagaatacgggtttcattcataagctatatgtattaatatgacaaagttacgtttttattttatttgatgcaaagatgaggatactttgttacggtcagatgaaacagatattacaatcttgttacattcctcccaatcctgcggatagaataaaatatcgaagtttttgcgggctataagaggaaaaaacgtttgctatttgttatctttgttagcgagaaaagatagagatgtttgattaatagatactacaaacgatgataaaagttgacttgaaacgacatagacgcgaagtgattggcgcggttattgtgttgctgcttttgcttggcggagtgtccgtctttaaatataccacgttcaatcccggttttgagattgttgatgatttaggaggaaatatctttccttcggctattctttccgtagccacaaccgatgcgcaagtcattatcccgtcggattccaccagtttgggaaatccgaaatcctgcattgccattcgggtaaagtcgcgggcggcatatagccgggtaaggattgaggtggctgaaactcctttcttctcccgctccgtctcagagtttattctgaacaaaccacgaacggaatatacgatttatccggatataatctggaattatgaagcattgaagaacaaccttcaggcggaacccgtgagcgttgccgtgacagtggagatgaacggaaaagaattgggacagcgggtgcgtacattttccgtgcgcagtgtcaatgaatgtctgttgggctatgtggcgaacgggaccaagtttcatgataccggtattttctttgccgcctacgtcaacgaagagaatccaatgatcgatcagttgcttcgtgaggcgttgaatacccgcattgtgaatcgctttctcggttatcaaagcaaggctaaagaagccgtagacaagcaggtgtatgcgctttggaatatattgcagaagcggaatttccgttacagttcggtttccaataccagtctttcgagcaatgtcgtgttctctcagcgtgtccgtacgttcgatgatgcgctggaatcttcacagattaactgtgtggatggtagcgtgctgtttgcctccttgcttcgtgccatcaatatcgatcctatcctggtacgtacgccgggacatatgtttgtaggctattataccgacaattcgcataccgatatgaacttcctggaaacgacgatgatcggtgatgtcgatctggatgatttctttcccgatgaacaactggattctacgatggtaggcaaatcacagaacgagatgtcattgctgactttcgagaaatcaaagcaatatgccaataaaaagtataaggagaacgaagaaggtattcattccggaaagttgaactatatgtttttagaaatctccaaagaagtacgccggaaaatacagccgataggaaaataattcgtatttttgccaagtaatcaaatgtagaaaaagaatgcaaggcaagaaatttatctctcccggagcatggttttcgatgaactatccttcggactggaacgagtttgaggatggcgaaggctcttttctcttctataatcccgatgtgtggtcgggtaattttcgtatatccgcattcaaaggtaaagctggttatggcaaagaagccatccggcaggaactgaaagagaacgattcggcttcgttggtgaaggtcggggcgttggagtgtgcgtatagcaaagagatgttccaggaagaaggaacttactatacatcccatgtatggattacaggcattgacgatattgctttcgaatgctcgtttaccgtacctaaaggtggcacggtgcaagaagccgaagaagtcattgctacgttggagatacgtaaggaaggacagaagtatccggccgagttgattcccgtccgcctttccgaaatctatcagattaatgaaggatatgaatggacggtatctaccgtgaagcaggaattgaagaaagattttcaaggaacggaagatgacctcgaaaaactccagcagatgattgacaacggtaagatcggtccgaagaaaaaagacgagtggctggctatcggtattacgatctgcacgatccttgccaatgaagtggacggtatggaatggaagacattgattgacggcaaccgggaagcgccggttcttcaatataagaacggcattatcgacccgatgaaactgacatggagcagaataaaggccggagaatcttgcaacgtcatagaaacttataagtctgcgctcactgccgactaaccttaatcgctaactcctaatcacttacttacgtgacagtaccttatttacagatagataacctgaccaagtccttcggtgacttggtcctttttgaaaatatatcttttggcattgctgaggggcagcgtgtcggattaatagcaaagaacggcagcggaaagactacgctgctgaatatcatcgccggaaaagagggctatgatagtggaagcattgttttcagacgcgaccttcgggtggattatctggagcaggacccgcagtatcccgaagaattaaccgtgctggaagcctgtttccatcatggcaacagtaccgttgaactgataaaagaatacgagcgttgtatggaaacggaaggacatccgggactggaggatcttttggttcgtatggaccatgagaaagcgtgggagtatgagcagaaagcgaagcaaatcctttcgcaacttaagattcgtaactttgaccaaaaggtgaagcagctttccggtgggcaattgaagcgtgtagctttggcaaatgcactgattaccgaaccggagctgttgattcttgacgagcctaccaaccatttggatctggatatgaccgaatggctcgaagattatcttcgccgtaccaatctcagtctgctgatggtgactcacgaccgttatttcctcgaccgtgtctgttcggaaattatcgaaatagacaatcggcaagtgtatcaatataaaggaaattatagctattacctcgaaaagcgacaggaacggatagacgctaaaagtgtggaaatagaacgagccaacaacctttaccgtacggaactcgactggatgcgccgaatgccgcaagcgcgcggacacaaagcccgttaccgtgaggaggctttctacgaattggagaaagtggcgaaacaacggctccgcaacgataacgtaaagctggaagtgaaagcatcgtatataggaagtaagatattcgaagccgaccatttgttcaagagtttcggggatttaaagattctggatgatttctcctatatcttttcccgttatgagaagatggggattgtgggaaacaacggaactggcaaatcgactttcatcaaaatattgatgggacaggtacagcctgatagcggtacggtggatattggtgaaacggttcgtttcggttattactcgcaggacggactccagtttgacgagcaaatgaaagtgattgacgtgatacaggatattgccgaagtcatagagctgggaaatgggaaaaagttgaccgcttcgcaatttctgcaacatttcctgttcactcccgagacccagcacagctatgtctataaactgagtggaggcgaacgccgccgcctgtatttgtgcactgtcttgatgcgcaatcctaatttccttgtgctggatgaaccgaccaacgatcttgatattattacgctgaatgtgcttgaagagtatcttcagaacttcaaaggttgtgtgattgtggtttcccacgaccgttattttatggataaggtcgtagaccacttgatggttttcaacggacagggagatattcgcgattttcccggcaattatagtgattaccgtgattggaaagaagtaaaagcgcaaaaggagaaagaagccgaaaagccgcaagaggaaaagactgcccgtgtccgtctgaacgacaagcgtaagatgagtttcaaggagaagcgcgaatttgaacaattagagaaagatatagccgaactggaatccgaaaaggcgcagattgaggagcttctttgtagtggtaccctttctgttgacgaactgacggagaaatcgaaacgtttgcccgaagtgaatgatctgatcgacgagaaaacaatgcgttggctggaactcagtgagatagaaagctaagcaatgtcgatagtaagaaaaaatgaataaccggtataacttgaataacccttgaataaaccgaagagatgacaaacttgactaattatcatagccattgtctgtattgcgacggacgagccaatatggaagatttcattcgttttgccattagtgaaggtttttcttcatacggcatttcctctcatgctccgcttccattctctactgcatggacgatggagtgggatcggatggatgattatctttccgaattttcccggcttaaagcaaagtatgctgatgagatagaattggctgtcggccttgaaatagactatctgaatgaggaaagtaatccttcgttgtcgcgtttccaagaattgcctcttgactattgcatcggttccgtccacatgctgtactctccggaaggaaaggtggtagatattgatactccggcagatcattttcgtgaattggttgatgcgcattttggtggtgatcttgatttcgttgtccgcctatattataagaatctgctccgtatggtggagttgggtggtttcgacatcgtaggtcatgccgataaaatgcactataacgcttcctgctatcgtccgggtttgctggatgaagcatggtatgatacgttggttcgtgattactttgcggcgattgccgagcgcggttatattgtggaaatcaataccaagtcttatcacgaactgggtacgttctatccgaatgaacgttatttctctttcctaaaggaattgggtattcgggtgcaggtgaacagtgatgcgcattatccggaacggattaataatggacgtgccgaagcattggctgctttgaaaaaggcaggtttcacgtcggtagtggagtggcacggcggaaagtgggaagacaaggaaattctgtaaataacatataacaaaaacaggacagccgtttcaagtagggatattcagtaaatgttcctctt

SEQ ID NO: 11862 - DNA, 8783 bp, Unknown
  gut microbiota DNA sequence
gccttaaattttattattttaggaatatcccaaattggggaaggattagaaagtgatttctagtccttctttgtttttttaagtattcaaggtcttttgcatccaaaaattagtcagacttaatttattagcctgtcgtttctgctccttttccacagtatacccttgtcttttgaagaatgggcgggcagttaaactcacttctgatgtaattcgttccattccctgttcaatagcatatcgttctatttctttcaaaagtatagtcgcaatgcctttaccttgaaagtctttgtgaacgaacattgaatgtagatatccttgcgaagtgatagaagagaaacctacgatttgtaattgctggtcgacggcaacaataaagtaatgggtttctatcattttctctattttagaaagatcatttccgcatgaagcccagtcttcaacttcttcctgtgaataatcacgtctgtttattataagtacggtatttttgtacaaatctcttagctcaacactgtcggattgtcgggctgttctgatcgtaaagttcgtttgcatattgcatcttaagttcatttttcctatattagtcgtcgcaaatataggaaaataaacaatactgtctatcatgccatcaagaagaaaataaagtcaatctttccattttatctttgcacttaaagaaatatcagtctatctttgtagttgtaaataaacgattaaaacagaatagttaaaaacctcatgaatcgcataaaaggtatactctatgcggcagtatcttcctccacttttgggctagctccgttcttttccgtcactttgttaatgattggattttcagcttttgaagtactttcctatcgttggggggtagcgtcaattgtgctgactgtgttaggcttattttccgggtgtaacttccgcttatccgtaaaagacttcaaagttgtctttggcttaagcctattgcgggcgatcacttcattcagtctgattattgcctatcagaatatagccagtggtgtggcttccaccattcattttatgtatccgttggtggttgctcttgcaatgatgtttttctttcgggagaagaagtcgctttgggtgctatttgctgttttgatatctttgttaggtgcggctctgctttcgttaggagagttggccgcaaataatggtaatgcgatggttggcttagtggcagcttgtgtttctgtattctcatatgcggggtatataatcggagtgcggaccacacgagctgtgagaattaattctactgtattgacttgctatgtcatggggctgggaactcttttttatctgataggtgcttttaccacttccggttttcgtttggtaacagacggatatatatggctgattattctaggacttgcattaccggctacggctatttccaatatcactttagtacaggcaataaagtatgcagggcctactttgacatctattttgggtgctatggaaccgttgacagccgtcgtgatcggtgtttttgtatttgaggagtttttcactgtcaacagtgctatcgggattatcctgattttgatagctgttagcttggttatattccgaaagccaaaaaactagaaaagaattttctttaattgaaaaaagctgcttatcggtatgataaacagctttttactttgaagagcctcttgtcggattcgaaccaacgaccccgagattacaaatcacgtgctctggccaactgagctaaagaggcgttattttcttttgcgggtgcaaaggtatgaatttattttaaaaatgcaaatacgtcatgtactttttttatatttgcaatctcactaatgattatacgaagatgaaaaagaaaattatgaatgtgtgtggtatggctttcttagccataagtgtattggcgtgctccggccagaaaaaaggagcgacagatactgtggtttcggcagatagtataaaaataattgctgatgtaatgacttcggaagcagatagtacaggatatattgttcgggtaggggagatagctccggattttacaatcacactgactgatggaaaacaaatgagtctgtcttctctccgtggcaaggtcgtaatgttgcagtttacagcaagttggtgcggtgtttgtcgtaaagaaatgccgttcatagaaaaagatatttggttgaagcataaagataatgcggaatttgcattgattggcattgaccgtgatgagccacttgataaagtccttgcttttgccaaatctaccggaatcacttatccgttgggattagatccgggagctgatatttttgcgaagtatgctttgcgcgactctggaataacaaggaacgtattgatagataaagagggaaaaattgtaaaactaactcgtttgtataatgaagaagaatttgcttctttggtgcaaatgattaatgaaatgctgaaataaatagagaatttataaaaggggaatgagggtatgttgaaatgcaaatttacgctgattatgattcattacgacataccccgtgtttttgtgagttttctaagcaaggctgagttttacgaggtaatcgtagtgttttccttcttttaccaattcagccttgaaaccgtattcggaagcatataagttaagtgtttggaaatctacatataaccagtcgaaagtatctccttttatatccttatattgcatctgaaaatcaatttctccgtaataatctcctgccaagtcgataactatacttccgtcttcttcttcaaaaagataacgtaagtcgcttgaatccatcagtatacaccctttaggacggagcatgcgcttcattcgttgaaagaaatccggcatattgtttagttttccgataatgccggaaccattcattagcattaaaatcgtatcgaacgtctcatcgaatgtttcgtcaaacagattggtaagacgaacatcatttaccccacgttgtttcattacttcgacagatagcggagaaatatcaatggcgcatacctccttttccatcgcttggagggccaaggcatgacatccacttcctgctcctacatccaatatccgtcctgtagccatttctaaggctatgcgttccaatgcgggcatagattgaatcgtacggaataactctttgacaggaatttcatcctcctcaaattgagaggaaaatactcgtaagcgatcggctttgtgatgattgaaataatcataaatagcggctcccatcggatccctttctgcaggaagaattgttgttgccattagtggttacgtattgttttggttggcaaagataaataaatccgtagaaaaggattatatttgtagccggaaaagtgaatattaataaatgattgtatgagtatagaagaagcaatacagggcggaatcgtctttaaaggcaagaaagataagcctaaagaagaggaaaaggtgaaaacgaaagcgaagaaggcaacctatattcgtggacagcatggttcgggtgccgcaaagatgaaagcggatatccggagaaaaagggcaaatcgacataaaaaataagtctctcataaaaaagacggggcaggataattatcctgccccgtcttttttatatacttacttttgtggaagtatctcaatccaatagtcatccgggtcattgatgaaatacagccccatagctgtattctcgaaacatacacaattcatttctttatgataagctctgatggcatcatagtcaccggccacccgaaaacaaagatgactttcattctctccaagttcataaggagcggcatgatcttttagccatgtcagttctagaagaaatcctgtttcattgtctgttaggtaaactagcgtgaacgaaccatcggaagcctcttttcgatggtgctctttcaaaccgagcgctttttcataaaaggcaatactccgttccaagtccgtgacattgatattgaaatggtcaaatttactttttatttccattgttgtaattttcttattttttcattaagagcttcacaatttctccgacgtatgtgcggggttgtccggcttgcggagtagtctgtgaaggcaatttcttacattctataacagccgaaggagttgtttggttcggagcatagagtttcagagtataattgtccgctttttctatggcatcataagactgatcgggggaaagagtacaataagctacagccttaccggactgatatcccaacgcaccaccggcgtttgcagtcatattgatcatgttaaactcgtcctttccgatactgataaccagcttgccgcttcccatcaaagcatatacctcacccggaatttgcttcaagtcaatttctacgtaacccggcatatccgatgaagctttaccgaccggagtagcgggagtaagagtagcagcaggaactgtattggcaggttcagtagtcgtcacctttatatcggtctttttatctgtgttgccaatgataatcggacctgcggctgcgacaattgacggagttgtcttctcttcctcttttttcttcttttcggctttaggacgggtatccggtgctccgaaagcgacggctacatccataaatatatcatctgcgaagtctaccgtttttctacgccatttagccagaccacgtaccaacttggtctttgtcttattaagtgcatatttatcggtaatccattcttctgccttatatttttctgtttcgcggtaagtaaaacggattttttccaattctaccaggcagttaccgggtttgcaggtaacggtaatctggtaattgatgagtgtacggtctaacgacaaagcactggaactgaaaacaatccattcctctccgataccggcaaccgtacctttagcttcatcggagaaaactacccgactttcaatattcttattctctttcaagcgttcttgcatccatttcataatagtgtcgtagatttgcgcctgactcattcccggaatttgaaattctttggaaaatacgaccttaccatcaacttcaggaacggctcctgtaaggtatctggtgtcgtctcttttttcttttgcagattctgccttcattgccaccggcaatgcaagaagcagggtaagaaacaaaattgtaaatttattcataattattatgtgtttatttggtaatctcaaaactttcgccccgatgggtgatgttgacgaaacggcaacctgcattttcagcaaaattacgaagtgcattaccgccttcataatcttcactgaaatgcatgggcacaaatatagtagtttttatttgttcgatgaactgttttgctcctttcatataatcttttcccattcttcgatctaccggaaacagcactaaatcaatgttcgacgctttttcttttaaatatttaacttctgcaaggaaatcaccgttggcttttcgtatctcttcttcggtagattcttcgctccaatgccagttatttaaatcaccggcatggaaaatactccagccttggaggtgaagcagaaatgaactgccgacatccgtcgaaccaaatgcatcgattcgtatcgtatcatcttcgtacgcttctcctttttttatgaagaaagcgtcttcgcttttggcacggtgtgatttcagaatatctttggaaaagatgtactgaatatcgggccgttgctctttccatgttaatatttcacggttaaagtgatcggggtggaagtgtgtagctagtacgtacaatttgcccggcctttgtaaaaggtaatcatgtacgattccccgattattttcagtttcggaagaatctttatagtaatcgatgataacggttactccttctgcttcgatggcgaaaccgctatggtatatataatccagtatcataagctgaatattttaggattgcaatattaagtattctagttgaagttgccaaggaaaatcgacgaaatcaaggagcaagacgactgatttcccattctccatttagttgtaacgtatataggaaacggtcatgtagacggttcggccgtccttgccaaaactcaattctggtagggacaacggcatatccgccccaattatcaggcctttctacttctttccctatccaacgtgccgcctctttgatgaaagcgcgtattaactgcattctgcttgaaatcggttggctttgcggggaaatgcgtgcaccgacccgactcctataagggcgtttccggaagtattcgtccgactcttccggagtcactttgcttgctattccttctatatgtacttgcctttcgagtgtatgccatacgaaagagagggaaatatatggattttgtgccaattgttttcctttacggctttcgtaatttgtgtaaaagacgaacttaccatcgtggagtcccttcagtaatacggtacgtgtggacggctttccttcgggagatacagtaccaacggtgacagcggtcggttcatctacttttgcgtcgatggcttcttgcaaccactgactgaaaagcaaaagcgggtcgtcgggaagttcattttcccgcaatccgcttttagtatattcttgccggatatcggctatatttccgtaatttttcacatcggtacttctattaataaaatatgcgagtctttcaaagtttccaattcaaaactattagtttcgtagatccccattccgtcacgacgtttcagcacttcgccttctactgcaatttctccttcaatgaggaatatatatacgcctgcatgactttgatgcatatgataccccagtttcttgtcggcctctactttgcctattgagaaccaggtgtcttgcaaaagagatgcgggagtactgccgtcaggtgatacgatgactgccagctcgttgggacattccagctcactgatgttgaaatcctgataaacggggcgtgtgttccgttctctcggcataatccagatttgcaggaactcaaccggttctacgggactggcattcacttcgctatggaaaattccggttccggcactcatagtctggatttctccgacggtaataatccggctgtttttcttgctgtctccatgttgcagatgtcctttcaggggaatggatacaatttccatattcttgtgaggatgtgtctggaatccttctccgggcgccactttgtcatcattcaatacgcgaagagcaccgaaattgatacggttggaatcgaaatattcatcgaaactgaaggtgtgataactatccagccaatcgtattgggaatgccctcttgtatcagctctatgtattacttttttcataaataactcctttttcttgttgtttatatgcttcgtaaacaaagtgggaggataaaaggtttatctcttcacttcatttagcagaggcttgtgattgataaaatcttttatattttgtaaagttgttatagctatgttttccattgcttcacgtgtgaaaaaggcttgatgcgaagtgacgataacattgttgaacgagagcaagcgggcaagcacatcatcgtcgatgatgcggtcggactggtcttcatagaagtattcgctctcttcttcgtagacgtccaatcctgccgatccgattttcttgtttttcaggccttcaatcagtgcattggtgtgaattaactgtccgcgaccggtattgataatcattacaccgtctttcattttactgatagaatagtcgttaataagatattttgtttcttcagtaagcgggcaatgcagagaaatgatatccgaactatgatacagttcgtccaacgaagtgtagacaatttgttcttctctggcaaagttataatccggataaagatcgtatgccagcacattcattccgaaaccttttaggatatgaatcaggatttttgctattttccccgtaccgatgattccggctgtttttccatgcatatcgaatcccatcaaaccatgaagggagaaatttccgtctttcgtgcgccaggatgcacgggggattttccggttcaatgataacatcagagctacggtgtattcggcaacggcatagggagagtaagcaggaacacgtactacggtgattccggcagtagcagccgcattcagatctacgttattgaatcccgcacatcgcagtgccagcaattttactccgttctctgccataatgcggatgacttctgcgtcagcgacatcattcacaaagatgcagaccgcatctacgccttgtgtcagcagtacattgttcttattcagatgtcctttataataacgtatttcaaatccgaactctttgtttttatcgttaaacgacgattcgtcataaggctttgtgccgaaaaatgcaattgtataggccataatattcttttataatttacttataatataaacgtaaaagccggttgatttgtttggactttattaagtgataaatatagattgtttcattagaaacagtttgctttttcaattaaaatagggagtgatagaaaataaatgcacaaacatatatttcgtgtgcaataatgttatatctttgcgcccgaaataatttaaaaaagatttagatgagaaaaatttccttgattggatttgtgatgttaatcgtttcaattccaacttttgccggagggcttctgacaaatactaatcaacatgtggcttttttgagaatgttggctcgtggtgcttctattgatattgatggtgtgtattctaaccctgccggtttggctttcttgccg

SEQ ID NO: 11863 - DNA, 6106 bp, Unknown
  gut microbiota DNA sequence
cttatccgtagtagattccttgaagtaatcgtagatatcgagcatatggtcttcgtccatgatctcttccaggaaataatcgatattcagtttcgttcccgaataaacaatcgcttccacttcatccagcaattcgccgaactcaattcctttagaaagagcgatatcatccaacgccactttacggtcgatagcctgaatgatagacaccttcatctttgatttattggcaaccgtacgtacacgtaaatcttcgggacgttctatctcattctcttcacagtgacgcttgatcagtttacagaactcctcaccataacgttttgcctttccggcacccacaccgggaatgttctgcaactcatccaatgttaccggatagatagtagccatcgcttccaaagacggatcctggaatatcacatagggcggaacttccagttttttcgagagcttcttccgcaaatctttcaacattgaataaagagccggatccaccgcacaagagccaccgccacgtgccggtgcttcctcttcagtctcttcaaagtcgttatcttcagtaatcttgaatgatttcggcttcttcagaaatttgtgtccctcttccgttaccttcagaagtccataatgttccacgtctttgctcaagtaacctccaatcaacgcctgacggatcaccgcattccacgtcttatcctcttcgcccataccggaaccgaacacctccaggtcttcatgcaaatgagcctgcacttctgaagtttctctaccttgtagtatgtctataatataatctgctttaaaattttctttcaccgcgataatcgcttcaatcacggtacacaataaatcttgagcctccacttgttttttagggtttaaacagttgtcacaatttccacaattttcttccgtgtactcctcaccaaaataatgtagtaatgtcttgcgtcggcatacggaagattcggcataagcagcggtttccaacagaagctgcttgccaatttcctgttctgccacaggtttgccttgcatgaacttttccagtttctgcaagtctttgtttgtataaaaggttatgcactggccttctccgccatctctaccggcacgtccggtttcctgataatacccttccagactcttcggaatatcgtagtgaatcacaaaccttacatccggtttgtctattcccataccaaatgcgatagtcgccacaataacgtctaccttttccatcagaaagtcatcctgattcttggttctcgtcaccgagtccatccctgcatgataggggcgcgcattgataccgtttgcttgcaggatttcagcaagttcttccactcttttccggctcaggcaatagatgatacccgatttctccggattgttcttgataaacttgattatatccctgtcgatattagcggtcttcgcacgtacctcataatacaagttcggacggttgaacgaggatttaaagacttgtgcatctaccatccccagattcttctggatatcatgttgtaccttcggtgttgccgttgctgtaagcgcaatcagcggcgcctttcctatttcattgataatcggacgaattcgtcggtattcaggtcggaagtcatgtccccattccgaaatgcagtgggcttcgtccaccgcatagaacgagatcttcaccgaacgcaaaaattccacgttttcctcctttgtcagtgactcaggtgccacatatagtaattttgtttttccggcaaggatgtcagacctcacttgttctatcgcgcctttattcaatgaagaattgatgaaatgggcgatgccatcctcttcactgaaattacgcattgcatccacctggtttttcatcaacgcaataagcggagaaattacaattgccgtaccttccatcaagagcgaaggtaactgatagcataaagatttcccgccaccggtaggcatcagtacaaaggtatctttgccactaagcaaattctgaatgattgcttcctggtttcccttgaacttattaaatccgaaatactttttcagttcatctgttaaattaatcttccctgccatcttaacttaggttgttttattcagttcatggtttaacttcaagtaaacctctctttttcaagagagccaaacaaagttataaacaacttcgtaattaccaagcaaaaagtgactaatattttcaagaaaaaacagaaacaatcaattccagttaccttacgttctgattttaagccgtttgcaatcgtgccatattcgctttttccagttggctttttgcatattccagcgtcacctcatacgttttcttgttctctgaagggatttcaaacatgacatccatcatgattgtttccacaatagagcgcaatccgcgggcacccaacttatattccacagccttgtcgacgatatactcgaaaacagacttctcgaatgtaagtttaataccatccatctcaaacaacttgatatactgtttgatgattgagttcttgggttcggtaagtatagcacgaagcgcatcgcgatccaacggattcagataagtcagcactggaagacgtccgataatttcgggaatcagcccgaatgacttcaaatcctgaggagcgatatattgcatcatgttgttcctatctaccgtcgctgttttttgtgaagccgtataacctacgacgtgcgtattcaaccgttgagcgattttcttctcaataccgtcaaaagcaccgccgcagataaagaggatattcttggtatttaccggaatcatcttctggtcgggatgcttacgacctccctgaggagggacattcaccaccgaaccctcaagcaatttcagcaatccctgctgtacaccttcaccactcacatcgcgagtaatagaagggttatcccctttacgggctatcttgtcaatctcatcgataaacacgatcccctgttccgcttcgggtacattataatctgccacctgaagcagacgggttaaaatactttcaatatcttcgcccacataaccggcttccgtcaataccgtagcatccacaatcgtaaacggcacgtgcaacaacttggcaatggtacgtgccagcaacgtctttcctgttcctgtactacccaccataatgatattagatttttcaatctccacatcatcaccactatctttctgtagcaggcgcttataatgattgtagaccgacacggaaaggaaacgcttcgcgtcatcctgtccaatcacatactggtcgaggaatttcttgatttctaccggtttggggagttcttttaaattaagtttggtagctccggcactttttttactctctcccaaagcctcctgagttatctcgtaagcctgagtagcgcaactgtcgcagatgtagccattcatcccggtaatcaggaatccgacttcattctccgacctgccgcaaaagctacatcttttctttgtctttgaatcagccatttctatttcttaatcaatacctcatcaatcataccgtattctttcgcttcctgagctgtcatccagtagtcacggtctgagtccgcccatactttatcgaaatcagtatgcgaatgatcggcgatgatcgtataaagttccttcttcaatttctgaatttcacgagctgtgatttcaatgtccgaagcctgtccctgtgcgcctcccatcggttgatgaatcatcacgcgtgaatggggcaacgcagaacgcttgccttcggcaccagctaccagcaatacagctgccattgaagccgccatacccgtacaaatcgtagcgacatcgcttgaaataaactgcatggtatcataaatacctaatccggcatatacacttccacccggtgaattgatataaattgaaatatccttgcccggatcaacggaatccaaatacagcaactgtgcctgaagcgtattggctgtataatcatccacttgtgtacctaagaaaatgattcggtccatcatcaaacgggagaaaacgtcgagttgagttacattcaactgtctctcctccagaatataaggattcaaatacccggcctgcgatttaatcacatcatccaataccatgccattcattcctaaatgcttggttgcgtattttctaaaatcatccatattaattgttcctttctataaatttaaaataaatgtaagcgcaaagaaacgaaaaagaatacagagacacaaaaaaacacagagttataattctataaaaactctgtgtttctgtgactttatgttcggttcaaccgaatgattattcaaacatcttattgaattcttcgatagaaacgctcttgttttctaaagttacttgtgctttcaaggcagcagccaacttcacttccacaacgcggctcaccaggttgtttacggtttctttcttcttcaacatctcctgtacgtagttgtcgagtacatcatcaggaacagacaacatgccatattgggcgaactgtgccttcgttgtgtcttttgccactttcagaacatcttcctgctctaccttgatatcgttagcctctaccaactgttccttaatcaaatgccaagtcaactcctcaatgctcttatcatagttctcagcaacatattcttctcccttttcttcgttgttcaacaacatgatgcgtttcagcagtgcatccgggaattccagcttacccactttctccatcatcatcttgcgaacatcgatcaagaacttataatcgctgtcagctacaaatcttgctgcgatttcttccttaatcttagcacggaattcttcttctgtcttcacaacaccttcaccgaaagcctgatcgaacaattcctgattcaattcaccggcaacaaagcgagtgatttcttctacctggaagctgaagttggatttcacatccttagcaatattcttgtcgattttcagcaaagaacccaattccgtctcgtttccgtcaaaagcaacgttcggattgaataccaatacatcgtttacttttgcattagcgaagatagctttctgttcgtcattcttcatataagaaggcatcataaccgcaccttctacctgaatgccgccttctttcgtattgccttcttcgtccaactgagccaacagacctttcagcatatcattatcctgataagtatctactgtatcgtatttaccggtgcgttgagtatacatcttcacctggttgtcgatcatctcgtcagatacttcaatcgtataataatctaccttatccttatcacttacttctgccttgaattcaggtgccaaagcaatgtcgaacacgaaatcgaattcatccattgtatcaaaatcaatattctgttgcttttcttcgttaggcaacggttcacccaacatattcaccttattttctctgatataattgtaaatagcctcttgcagtgccttattcactacctcggcaattacagacttgccatacatctttttaacaagacttgcaggaaccatacctttacggaatcccggcatatctaccttttggcggagcgttttcaactctttgtctactttctcctgatagtcggctttctcaagcttcacagtaagctcagcgcttactttgtcaatgttttgtaatgaaacgttcattctgacaattatttatttgatttatactttgttctatgcttaaatgagggtgcaaaattagtgctaatcttttaaatttcaaaagacattgcagatttatttcgtatctatttggaatacccgtgcaacaattcactgacacagagggcttctttgaaaccttcggtatctttttttctcatttttcacaaataaaacctacaaaaagatggtcaatccaaaaattatgcttttctttgctgcggattgatggaccattagtttctcgatttgattacaaggtttttacttccgttctaaaaacgcatttgtaaactctctgtcgttttaatccttttattagtaaccatctatccagagagttttattcatttatttattttttatcattttcattatgaacatttatgttggaaaccttaactaccgcgttaaggaagg

SEQ ID NO: 11864 - DNA, 617 bp, Unknown
  gut microbiota DNA sequence
gaatactttgcctgtgccgggcgtaccacatagttcgtaggcttcgtagctgatggggagtgtcgcttctgtttgggttttctgtgttctgatacgcaagcaatagccttggtcgggagcaatggcaaaatcttcccattgaagattgagaatatcgctgatgcgtaaacctgtcagacaagcaaacaaggaggcggctttcagaacggggatgtcacaaggagtggcggcaagttgtttcacttcgtccagtgtcaggtactcttttttcacatcttgtggttcaatcttgtcaagatagtcattgatattctcccgaaaccatttgtcccgataggcaatcttcaacaatcctctgaaagtggagtagtagccggatgccgaattgagggatatggggcggttgcaatgtttgagctgcttggcattcaacaggtactcacggaactttttgcacaagtctacattcacatcgccgaaggtgcattgtcctttgacgaagttgtagaaatgctgatagacgaacatccatttctggtctttgctttggcacatcttcttgaagtaggcaaggaaatcggctttctgcttggtcttatccaagaaaccgaactctt

SEQ ID NO: 11865 - DNA, 2984 bp, Unknown
  gut microbiota DNA sequence
caccggaattcctaccggaagataggctacgatataccatatcaaagaaacatatccttcacggaagaatgctaaatcaagagcattcattattattccacctgccagaagcaggagagaaaatatcactttcccatattcatggaagttcgaaacctttgcatcaacctttttttctgttgcgcatgagtgagcgccacaactacaatgtcccataacattcatcatttagttgatgcaaaggtagcaaatgatttatgcaacaaagttgcaaaatcagttttagcacctttcaatgtcagcaatatcgcaacagccatttccaaaccggcacgacttctatatccaactcattccctgaaattgtcctttcttcatcccaagtaatgataaaagtctttttcaagccaaaaacttccgacattttatataaagccctgacctcctgttcccgggtaatcggatcatcaatgctatatgatacttgtatagccattccttcatcaggaatataaaaatccacctcaatacccttattataaaaaaacactctatcttcttcttttccatatcgctctattaaatttacagcaacgatattctccaatagtttagtttcggcatttatcagaaaattactgagcaacccattatcataaaaataccttttacaactagacatgcgttcagctactgaatctgtaaaattggggatgttaaaagtcaaataaacatcattcatataagtgagataatctgccaatgtattacggctgataccactaccagaagattttacaatatgcaataatcgtgtctgcgtagttggctgcatgacactttcagcaagcttctttgccaatagccggatagcagcgctattgcgaatctcgttgcgtgctataatatctcccagtaaaatcttttgatataacgaattaatccattcccgtttatctatcaaagaaaacgtttcggcaaatcctccgaaatgaaaataggtattgaactgcttaatgacttccagccgttgttccggttcaaattcccagtttgccttcaagtgaatctgatgaaaagtgagatactctgcaaatgaaaagggaaatacttcccgcatgatatatcgtccacccaaagtagtggcaatatccctactaagcattcgcgcattacttccggtaatgaaaaccctatatttagaatcagccagcctacgagcaaatttttcccatccgtcaatattctgaatctcatcaagatatatcaaaggcttacggttatcatacatttcagcataacactccaacagaagtcctagctccgaagcctcaatagaagagatacgctcatcctcaaaattaatataaagacagtcttcaaaagtcactttacccaatcttacaagattctgtatatcctgatacatttgataagacttacccgcacgacgaataccaaccagaacataattcgcctgctcctcaaaatatatcggtctttcaaccagctgaatcttactaatttcttgctgacgctcggctataattgcctttattattcgtttttccataaaatatgctctttatattgcacaaatatagcaaaaacatgcttaatatagtaagcaagactctcttttctttccaaccgtaactactattttctttagttgtcaactgctacttatcctttacaggacaaactttgacaggacagaagaagattacatataaatttgatgattcttattgtcaaccaaagtttttctccaatagtataatgattatcatcggtttacatgatgacaataagccatgacaataggctgacaataaaaaattagaacttttattgtcagcctgatccattttataagcacccgaaggacatcatcgcctgcagtaaccataccatccacatagaaagcagctttttaaaatgaatccccctattaaatgaatgttatatagccggatctttcacttaacaagcaggtattgttccattaaagcatcagtattgttaactctccacggccgtgacgatatctttccacggccgtggtaggaactcgccacggctgtgggaagaagtcaccacggccgtgacaaagtaaagatagcggtactttagtagaactatactggcactcaagggcaactacataggcacgttaatggaactatataggtagatatcactttgggaggctgttattaaacaggtatgtttctttagattgaaggccatgacaaatatgcccagggtaaagaatttataaaaagaaagaaaaagtttgccgttcccttaagaataaatatctctgtaaccatggttacagtaaccacggttactaatataattcactgattatgaggttttataatagagaagaagaactataaaagctaaaacaaattcagcaattggcatttgaggaaagttcaagaatgacagtcgttaccggtcgccgtagaattgggaagacaagcctcatcatgaaagccgttgaaaagactcccactgtctacttatttatagggcgtaaaaataaagcaaccttgtgcgaagaattcatcccacttatcgcacaagccctgcaaatctttgttccgacagaaatccgaagtttccgaaacttattccaatacctaatgcagctttcggcacaacggactttcaacctggttattgatgaatttcaggaattctatactataaatgaatccatattcagcgatatgcaaaatatttgggaccaatatcggaagtcctcacacatgaatttgattgtcagtggttccatctattctcttatgcaaaaaattttccaagacaacaaagaaccactcttcggaagagctgataacataatcaagcagtcagccttcagtctctctgtcctaaaagaaatcatgcatgaatatgccccgacacattcgaatgatgatcttttagcactttatacttttactggcggg

SEQ ID NO: 11866 - DNA, 1765 bp, Unknown
  gut microbiota DNA sequence
gaaatctgacaactgttgatttatcagccgagtgggtactcttttccggtggtaaacgcttccgtgccaccaacatcggaagaacgatggtcgacttggcacgggaaagtcgggcacaggtatcggccaatcagcaaaatctattagttgaaagttattatgggcttcgactggcacaacaaattgtgacggttcgtgaagaaacctacaacggattgaagaaacattatgaaaatgccttgaagttagaagctgcaggtatgcttgataaagccggaagactttttgcccaagtaaatatggatgaagctaagcgtgcattggaagctgcacgaaaagaagaaacagtagtgcaaagtgctttaaaagttttgctgaataaaaaagatacagatactgatatagcacctacttctcccctttttatgaatgattcaatacctcctaagatgctttttgacttctctgtaaacagcgggaactatacgcttaaccagttacggttacagcagcatattgccaagcaagaagtacggattgcacaaagtggctatatgccgaatatagcccttttcggaaaacaaaccttatattcgcatggtattcagagtaatttgttaccgcgtacgatgataggtatcgggtttacgtggaatctgttcgatggtttggatcgtgagaagaaaatacgccaatcgaagttaacggaacagacgcttgctttagggcaaatgaaggctcgtgacgatttggctgttggtatagataagttatatacgcagttgcaaaaagcgcaggataatgtgaaggcattgaatgcgacaattgctttaagtgaagaattggttcgtatccggaagaaatctttcgctgaaggaatggcaacttctaccgaggttattgatgctgaaaccatgcttgccaatgtaaaggtggctcgtttggcagcatattatgaatatgatgtggcactgatgaatctactttcactctgtggcacacctgaacaatttgcaaactatcaacctaaaccgtaacaaacaatgaaattagctagtagaaccctttcatgggccttcgtcattattatgttcgctgtcggtgtttttacagcactgggaattatattgatgcataaacaaccgttagttcttcaagggcaagcggaagcgactgaaattcgtattagtggaaaacttcccgggcgtatagacacattctttgtccgggaaggtgattgggtacatcaaggggatactcttgttgtaatcaatagtcctgaaatatatgccaagtatcaacaagtaaatgctttggaacaggttgccgtacaacagaataaaaaaatagatgctggaacccgtcgccagattgtagctactgcattacagctctggaacaagacaaagagtgatctcggtcttgctcaaacaacgtataatcgtattcttactttatataaagatagtgttgtaacttctcagagaaaagatgaagtggaagcgatgtataaagcagctgttgcagccgaacgtgcagcgtatgaacaataccagatggctgtagatggtgcacaaaaagaagataaagcgtctgccgccagtatggtagacgctgccaaaagtacagtggatgaagtttctgctttattgctcgatgcacggctgacagcaccggaggacgggcaaatagcaagcatcttcccaaaacgtggagagttggttgcaccgggtactcctattatgaatttggtagtaatggatga

SEQ ID NO: 11867 - DNA, 7659 bp, Unknown
  gut microbiota DNA sequence
gggaaactttcatcgcagatatacctgctatcggtaaaaaagatgttgaatttaagatatactatattagtccgctaggtagcttcgccacgtggaaatcaaccaagcaaaccggaagttatgatttgcgcacatttgagattcatgctcgtccgatgcaaaaggtagatgatctgcgtcccggtatgtctgtgttgctaacgctaaattaatcggcaaataaaattaatcatagaatggatttatcacaaacatattcaccttttcgctccgtactgctcagagagtggcggcgaatgacgtcacgacgcctttatttcggtgtctgtattgtcctgccgttgtttactctcttttttatggctaccattttcggtaacgggcagatggagaatatcccgataggcattatcgaccaagacaatactgctacttcacgggctattacacggaatatctctgcagtgcccacttttaaggtagtaaaacattatataaatgaggctgcagcccgcgaggccgtacagaaaaaagaaatctacgggtatctttccatacctccgagatttgaacagaatgctatcaccggaaagaatgcaactctttcctattattatcattatgccttgttgtcagtaggtggtgagctcatggctgcctttgaaacgtcattggctcccgtatccttatctcccattataatggaagcggtatctcttggggcagaccaacagcaaattactacattcctgttaccggtacaagccaacaaccacccgatatataatccgagcctggattattccgtttatctgagccagccgttttttttcgtattatttcaggtattgattctcctgactaccgtatatacagtcggaattgaaatcaagttccgcacagctacagattggctggctactgctaaaggcaatatgataactgccgttttgggtaaactactcccctatacctttatatatattctgataggatggctgggtaattatgtcatgttcggtatcctgcatattccttttcaaggaagctggtggctgataaacatgataaccgtactctttgttattgctacacaggctctcggattattcatattttccctgttcccggcagtctctctggtaataagtgttgtttctatggtaggttcattgggggctactttatctggagtaacttttccggtttctaatatgtatccgttagtaagagatgcctcttatctgttccctgtccgtcattttacagagatgatacaaaccatgctttacggaggtggtggattcatctatctttggccgtcaatggtgatactctgcatcttccccttgctggctttgtcattactaccccatttaaaacgagctatagaaagtcataaatatgaaaacattaagtaaattacaacagctatcatttgttatccgtcgggagtttcttgccataagtactagttatgctgttttactggtgttgatgggaggaattttcatgtatggattgctttataattatatgtacgctcctaatattgtaacggatgttcctgttgccgttgttgataattcccacagcgaattgagtcgtaattttattcgatggctggatgcgacccctcaagcggaaatttatgatcaggcaattgactatcatgaagccaaagagtggatgaaagaaggaaaagtgcaaggaatactttacttgccgcatgattttgaggagcgggtatttcgcggagatgaagctgtattttctttatatgcaacgaccgatgccttcctctattttgaagcattacaaggcgcttcttcacgtgtcatgttagctatcaatgataaatatcggtcggatggtgctgtttttttaccccctcaaggattattggcagtagctatggcaaaaccgataaatgtagtgggaactgtactctataattatacggaaggatatggctcttatctgattccggcagtcatgatgatcattattttccagactttgctaatggtgataggtatgttgaccggtgacgaacatgccaacagaggaattcgtgcttatacaccttttgggtatggctggggagttgccattcgtttggtgacgggaaaaacttttgtatattgtgccttatatgcagtcttttcttttttcttattaggactccttccctatttctttagtattcctaatattggaaatggattttacattatattattgttaataccttatctgatggccacttcttttttaggattggctgcttcgcgatattttacagattcggaagctccattactcatgattgcttttttttcggttggattaatatttctttccggagtttcttatcctatggaattaatgccgtggtattggaaaatagtacactatattcttccggctgcaccgggtacacttgcctttgtaaagctaaactctatgggtgccgatatggcagacataaaaccggaatatataactttgtggattcagacgattgtttatttcattattagcatatgggtctataaaagcaacttagcaagtcaaaaaaacaactttagtaacaaaaaactttctaaatgaaagtttttaatagaatattctatatttctttgtttttctcattgcttttgtataagtttgttaacttttatttcccaatgcttattagaagtcgttaaaaacaaatgcctatatgaaatacatcatctatattctcctcttttttcctatttgggtcactgcacaaacatacaaatatatagggatagaagaaggtttgagcaatcgaaggatattcagtatacaaaaagacgctgaaggatatatgtggtttcttaccaatgaaggcatggatcgctacaatggcaaggatatcaaacattatagactgaataaagatgataattctctggaatctcctattcatttaggatggatatataccaatccccatataggaacatgggtgattggcaaacaaggacgtgtcttccaatatgaaaggaaatatgatgatttcaagctggtatataagttgccgaatagtctggaaaccattagttacggctatatggaccggaataataatatttggttatgccgtaaacactccatattattgtataacacagaaaatgctcagatacttcaatttaccaatattctacacagcaacatcactgcaatcgaacaagtggacgaccatcatttttttatatcaacggagactggtgttcgatatcttaaattggaaaatggtattttgaaaattattcctgccgaaacattggattatttccatgtgcaggtaaacgaattatattaccatcaagcatcaaaacgactgcttatcggttcgtttgagagaggtctatttgtatatgatatgaataaccgggaaataataaagcccgaagttgatttaagtgatgtaagtattacctgcatggcaccattggatgaatcacagttattgatatcaactgaaggcatgggagtctataagattaatataaatacctgccagatggagcaatacattgtagccaactatcaaagctataatgaaatgaatggtaataatattaataatgtttttgtcgatgaagaaaagagaatctggctttccaactaccctaccggaatcactgttatagattatcggtatgaaaattatcattggatgaaacattcaatgggtaataaacaatcattaatcaatgatcaggtgcatgcggtaattgaggatagcgatggagacttatggtttggaaccagcaatggaattagtttataccactcctccacaggacaatggcattcattcctaagttcttttgaccgtcaattaaaagataaaaatcatatctttattactttgtgtgaagtttctcccggcataatctgggcaggaggctatacttcgggaatttataaaataaacaagcataaattgtccgttgaatatttctctccatacctgcttacttccgttaatatgcgccccgataaatatatccgtgatatgataaaagactcgaaaggaaatatatggtccgggggatattataatctaaagtgctttgatttagaaacgaatgaggtacgcctatatccgggagtgtcatctgtcacttcaattgttgaacatgacaaagatcatatgtggattggaacagcctccggattatacttattggatagaaattccggtaaatatcaatatgctggatcagagttggaaggtgtatatatcaattcactttaccaggcaaatgatggattgctatatattggcacgaatggagcaggagtatttgtatacaatatacagaaacagtcttttgagcactattatacagacaattccgcattagtttccaatcggatttttacaattttacctgaagtggacggtcgtattatgatgagtacggaaaatggtattacttgtttttttgtaaaagagaaacattttcataattggactagaggagaaggattgttacctgcctattttaatgcttcttcgggtacattacgtatgaataaaagttttgtatttggtagtacggacggggctattgaagttccggagaatgtaaagttcccttcttataaattttccagaatgatattcagtgattttcatgtatcttatcagcctgtttatccggacggcaaagactctcctttaaaagaatgtatagacgaaacagatgtattgaaactgaaacatgaccaaaataccttttctctaaaagtctccactatcaattatgattctccgggtaatacattttattcctggaagttggaagggttctatgaaaaatggacacagccgggaacaaatagtctgatacgtttcaccaatctgcctccgggaaaatatactttacacgtacgcgctatatccagagaagagcatgatgttatttttgaagaacgtacaatgaaagtcattatcgcacaccctttttggttgagttggtgggctatcctatgttatgtaccattggttatttggggattctcttttattttacgtgtgataaatctcaggaaacaaaagaacatatcagatgagaaaacccaattttttattaatacagctcacgatatacggactccacttactatgataaaagcgcctttggaagaacttctagacgaagaaccgcttactgacaccggaataacccgtacaaaggctgcattaaggaatgtagactcccttttgcgattggcgactaatcttatcaactttgaacgtgctgacgtatattcttccgagttgagcatctcagaatatgaattgaacacatatttgaaggatgtatgtaatagtttctcttcgtatgctactatcaaacatatagattttacttatgagagtaatttcaactacttgaatgtatggtttgataaagagaaaatggattctatactgaaaaatattatatcgaattcattgaaatatacagcagaaaatggcaaggtcagtgtctctgtctctgatatgaatgatttttggaaggtggttattagtgatacaggtatcggtattcctgcctctgaagaacggaagttgttcaaacttcatttccgtgccagtaatgccatcaattctaaagtcacgggcagtggcataggactaatgttggttggaaagttggttcgtctgcacaagggtaagattcagattaaaagtgtggaacatcaagggacgactgttcaaattatatttcccaaaaacaataagagtactcaggaggcaacttcggcttcctcccctaagattcagctacaaacaccggaactaacagttccgaatgttttttcaaatgtagcaaatacagaagttgtcacagccaagaaagaaatgcaacgtatccttattgtagaagataatgatgaattacgttcttacttggttagtctgctttctccccaatattatgtgcaagcctgttgtaatggcagggaggctttagtgatagtaaaagaattctggccggaacttattctttccgatgttatgatgcctgaaatgcaaggagatgaactctgtgctgctattaagaaggatgttgaaacttcacacattccggtattattacttacagctttgggggatgagaaaaatattcttgatggactcacaatcggtgcagatgaatatatcgtcaaacccttcagtgtgaagttattgaaggcgaatattgccaaccttttgtccaaccgtgctttattgcgtcagcggtatgctaatcttgaaatagactccgagcctgtaccatcagcaaatggaatgaatagtctcgactggaaattcatatcggaggtcaagaaaaatattgaaaagaatatcgataatactgatttttgcgttgacaagctttgtgaattacagggcgtgagccgtactagtttatatagtaaattgaaagcgttgaccggacaatctccgacagcattaattcgggtgactcgtttaaaatatgcagcacgattattaaaagaaggtgaacataatatcggagaaatagcagatatgagtggtttctcggaaacaaagtattttcgggaagtatttaaaaaatattatcgaatgagtcctagcacgtacgctaaagaagggaaaagcctctcctctgttgttgtagtagaagatgaacccgaagaggaagaggcgaccgattgatttatttgcgaatcagatacttgatgaatgtatagcctcctaatacttgcaggcacatcccgggaattccgatacggaaatcttgaatagcactgtaaaaattaccattatatatccattctcctaaagtacctacggcctgataaataagtactacaccaatcaataccgggatagaaatacgtccgaaacgttgtgcagcccaaccggcagttatggcaagtagtatggatttcagtaaaattgcgggtaatactgcaggggcgggcatatcgaaaaataaggaattgataataggtgaaagaatagctgtcaataagccgactttccatccgtacttataagctccaatcagtgtgaagaaatagattggtagccagattattcctccttgaggcatgagatggaataattgtgggaaaagaatattaccaacgatgaataacaaggctgcccaataggttttcacatcgttgtaatttagtgaatagaactttacagtagttgtttccatgtttattgttttttaagttcaaattactcttctatttttacttctgattctttcgaggaaatcaccaattagcggtaatatctcctctgctgattccacttcgctgcacattgtttctacaggacatcctcctgtatggttacggttccggataaaaggtactttctctgtaaaactaacttttatatctgatttctgaagcaactccagagctttggtactgataatatcagtatataactctttgatacctcccagaatcatcagggcggcagctcccttcccaaccaccttatcagcaatcgaagctcctttaagaaactccggttcctgggtcagtaaatcatagatatcagtcacaccgcgttgagtgaaagtgcggatttctcctttgttggcaatagta

SEQ ID NO: 11868 - DNA, 3347 bp, Unknown
  gut microbiota DNA sequence
gttcttcccgttcaatgtataaccggatcatggcataaattaaagaggtcaacagcaaggctcccaaaaatgaaaaaaagacaagtcctgcataattgaatgcgaacgaaggtccgaaaacggataacggatcatctcccattccacctgccgcctgcatagcggtaagatccgtcataccgcccatcaacccgctaaaatttgccgcttgaagcaaacagaccggaagtatcagatacgttgcatacttcagcaactgcttccaattttcctttataaaatcaaaagaagcattcagcttctcaccgaaaggacgtttcacatacatcgcaatcttaggtttctgtgattccatgttttttcttatttggtaaataaatatagtagaaaataataaatgccagtgaagtgagaattacgccaagcctcaacatatccggaagttccgtatgacgggttataaacccttctataaatcctgccattataaatacggggacagtgcctataactattttcagcccgcgctttgctccccgacggaaggattcaatcctcgaataagtcccgggaaacagccatccgttacctaaagccagcccggcggcacctgccacaataattgcccagatttcgagcgtaccatgcagccagacggcaagagtagactcccaaagcaaaccgtgctgataaaagaaagtctgaaaggctcctatcataatcccattggagagaagcatatagcctgtaccgaaactggtcagcagtcccattgcaaaacagttgaaagataccataacattgttgagcgtaatccccagaaacatcggaacttcatccgaaccgttataaaccgccatcggctcaccattggctatattgtccaatgtcatgtccacatagccgtttcctagaatcaagcggacgaaatccggatcgtttgcagcagacaatactccaatcagtgcgctggcaacgaaaataataaaagaaaccagtaactcgcgatgtgcatcatacattgtttgcggcacttcctgcgtccaaaaggtgataatccgtgtccacttctcgcgtttattccgatagatttcattatgcaacgccgaagccagattattcagataaatagtgatgcgggaagtcgggaaatgtgtctgggcgaatgccaggtcagcagtcaggtctgtatacgcatccgcaagtcggtcgggagacaagccgacagcctgctccacaatcttctctgtctctttccatttttcaatgttccgacgaataaacgtaacctctttcatgcttttcagtaaattccggataagttttgtccgaaaccggaagcaaaagtaagagatttataatatatttgcaacggaatcctaaaaatgtttaaccataaatggcagaatccacgataataaccggacagtttgttcgtatcagccaaacacccgccagtatcggtgaacgtctgatcgctttgatcattgattattttctgatcgggctttatctatattctacaattacccttattgcaaagttacacttgccatcgggattcaacctgttcttttttctgtttatcgtttatctgcccatactcggctactcctttctctgcgaaatgttcaatcacggacagagtttcggaaaaagattgatgaatatccgtgtggtaaagttggacggttctactcccagcattggttcttacctgctacggtggctccttttcatagttgacggaccattgacaagcggtttaggcatctttgtcatcctactgaccaagaataatcagcgtctaggtgatctcgctgccggaacaatggtgattaaagaaaagaactatcgcaaaatacacgtcagtcttgacgaattcgactatctgatgaagaattaccgtccggtctaccctcaatccgccgacttatcattggaacaggtaaatgtgattacccgtacactagagtccggagaaaaagaccgcatacggcgcatctcagcgcttgccaaaaaggtacagtcacttctttccatcactccgcaggatggtaatcaggaaaaatttctccagacggtattaagagattatcaatattatgcgttagaagaaatataggaagtttgtccgatggccctacatatttacagcttaacaaccagatatacagttcctttgttcgtatacttagaagagacacgtttcgcacgattggatacctttttgaagaaaaacttcttcatcacccgcagagaatacagtcaaataacgggttattgaaaggaaaagcactgcgtgagctcaaccttatggtcgaaaagggcattcttaagacacagaaaccgggaatcggacaatacacttaaaggctgataatcagcagaatgaccagttgttcagtaataattaaggtgataatagaaaatacgttttcttctattatcacccgctattgtcaccaaatttcacctggctatcaatagattaagccagaaaagtgacaagtgacaattaaaagaggggtttatctcactgtgagaccggacaccgtttagtccacctgtcccagagaatttccgtattccatttctccttgaaccacaaagagaacttcttccggatcgtattctcccatttcatcctttttggcttctttcacaatgtaagccacaacctcttccagatcaatatcaacatatccatccgcatcgggctgagcatcaaggattccactttcagagtaatactcgtcaatcaaatcgaggaaataatacaactcgtcatccgagaatttctccttcagttcttgaggcagatagtttttgataaactcgatggtcttttcgtcatcggcatctgctaataaaaaatcttcttccagtcccatgatcatttaagtattaagtgatagatattaagtagactgcttataacagcttctttactttctctacaaatacaggtttgctgacagcgcctacttgcttgtctacaatctcaccattcttgaaaaacaatacggtagggatattacggataccatattcagcaggcaaatcgctattttcatccacatcacacttgccgatgattacctgtccttcaaactctgccgccaattcttcaataataggagctaccattttgcaagggccacaccaaggagcccaaaaatctaccacaaccggttttccttctgcaaggatctccttatagttgctgtctgtaatttctaaagccatttttttaaatattaagtattaattattaaatagtatttcacttgctattaccgccacaaatataatcaatttatacggaaccccaattccggacggtc

SEQ ID NO: 11869 - DNA, 421 bp, Unknown
  gut microbiota DNA sequence
taaaggtgacggacacttacgaagtgccgcccgaaatactctgggtgaacggctctaccattggcacgctgggtaatttcagcgcatccacaggaaaagccaagagcaaaaagacattcaacatttccgccatcgttgcggcagcgttgaagaatgacgaggtactgaagtattcggcatatctgccaccgaacaagcggaaaatcctctatgtagataccgagcagagcaaataccattgccataaggtcatggagcgtattttgcgacttgccggactgcctaccgacaaggacagggacgattttgttttcatcgtgctaagggagcagacccccgacaagcggaaacagattatcggctatatgcttgaaaatatgcccgatgtggggttgctcatcattgacggaatccgtgactt

SEQ ID NO: 11870 - DNA, 406 bp, Unknown
  gut microbiota DNA sequence
ataaagataagccgttttgtctgtatatagcacatgcggctcctcattctcccatgcagggacctgatgagaaagcggttcgtacagaggccactccggaaggggataaaaactctgatagatcgaataaggaaatctataaagacatggtagaggaactagactggagtgtagggaggattctggagacactgaagaaatataaactggatgagaatactttcgttgtctttttctccgacaatggtccggtgataaataatggaggttctgctggaggatataaaggtgctaaaggaagtccatgggaaggaggtcatcgtgttcctggcatttgttatatgcccggtactattaaagagggtacaacatgcgaacaaacagtgatgagtttcgacctttttcc

SEQ ID NO: 11871 - DNA, 5702 bp, Unknown
  gut microbiota DNA sequence
gaacaactggaaggattcgacattcagaacagatacatgggatgatgtgaaataaagaacagaaaagttatgtgaaacaaggaggataaaccatccgccacatttttgttcttattttaagtattatagggggaaaacaaaaatgtcacagagttaataatcaattacttaaccttaaaaaggcccttattttaagaaaagtttacagaaaacaataggttgtttttgcttttttccatgagaaaactgcattttttgcaatatgttatttactggcatattgctccctatatttatatctttgtttgcacttgtgcattctcccgaacagacttgagcagccgccttgttgcacttatgtaacaagactgctgctcaagtgcattcaacaaatacatatagaagaattgattaactgatggggagaagttattaatctatgcagaagaaattatgaatgctaccatatgaataagcaagaataagctataaacaacataagttaatataagagaccaaacaaccaaagaggtttcatttctattctattatcctatatgcctttcctgaggaagtagggaatgagatcatatcatctgctatgaccttcgcagaagtaccggaaacttttaaattctttgcatccgggcacttgacaatacattccttacccgaataagaggtaataataacagacgttatttttccattgctccattcagcatccacttcaaaattacctctggctttcatacctttgaaagaaccttctttccatacgtcaggcaatgacgggagcagttctatgtaacctccgtgactctgcatcagcatttccgccacacctgccgtcaccccgaagttaccgtcaatctggaaaggcggatgtgcatcgaacaagttagtatatactcccccaaaattagcaccgggttttgttagtttcaaggcgctttccaatagcttatgcgaacggttaccgtcatgtaaacgtgcccagaagttcagtttccatgccttgctccatccggtacccgcatctccacgcgtattcaatgtcactttcatggcttccgcatatttattatcccattcacttctgcccgcaacgatggcagatcccggatgcagccagaataaatgattggtatgccgatgtccaccgtctccattgatatctttcgtcacttcatctttccactccatgaactgcccgcccaatccaattttcggaccggaaagcttggctagtgatgcgctgatttccttaatctccggatcattttccctgcccaattccttgctcgctttaatcatgatattgaatatctcccaaatcatcgcctgcgaggtagaacatcccaacgaatattcaccgtgttcgggagagtgagaagggttagcaaccaacattccgtcacgtttgtctgtccataagttatctacccaaaagagagcagcctgcaacatagtgtcatagtattcttccaggaatttcctgtcttgattgaactgataatattcccaaatatcctgacacatccaaatagcacctgccggaaaatgatgaggtgtatcctttttggcgggagcagtattgccccagatattattctcgtgatgcgtcacccaaccccgtacaggttttccatccggacggcaataataatgctgagcagtatatctgccacgaggaacaagacttttcacatattccaccatcggcaaatgacacggactcaagttggtcggctgtgccggccaatagttcatctgtacattgatgttagtatgataatctgaattccatgcattttggagtctgtcagcccaaaccccttgcaggttggcaggcaatgaaccttcacgcgaactggagatgagcaggtaacgcccgaactgatagtacaacatttccagataaaggttatcggcttgcaaattagtacgttcgtccatccctttcagtaacttatcggtagtcatgacaggcgcttccttcacattacccagattaattttcatacggtcgtacaaactgcgatagtctttttgatgggcaatcaacagtttcttatagctttttgcagacgccttcttcagaatagctttcaccttatccaaaggatcttccttagaaaagaagttgtaactatcatccatacattgaacatagttagtggctgccgacataaggataacgatttctttcgctcccgctactttaatcataccgtctactgctgaaatcttacctccatcatttctgaccattacttgctgtgcatatctcaatccatttttccaatgatcgcccacacgcttatctccacccaccggagtcggatagcctgtcattgtaatggtgtttccttctgatatgatgtttttagtcttgtgcagtgattcaagtgcaatagtacgtgaaataccgtctttactatctgatgtcaaccggattaccattacgttgtccggataactcatgaaatattcacgcttataagttatgccactctccttataactgactgtatggatagaattatctatatcgagtgtacgattataatcagagtaagcacaatccggacacttggtattgttcgaagtaatgacaatattactcaaggtctgatatgaaccgaaatgttctttcgtaccggcaatattatctatatatctgcgtaaatccgtttcttcgccgtcaccttcataatcatacgtaatgagtttaccgttggcatcaaaatgtgcggctttgtcggccataaagtctatcatcttctgttgcaacaagtttcttgctttctgaagattatccttgtttatttcaggagtcctcaagtgccctccgttataaccaggattttcactcggacctcctgaccacaatgtatgctcattcgtttgaataacatcaacataaacaccaccgaaaatcatggcacccatgtatccattgccaatgggaagcgcctcactttcccatattttagcaggagtatcataagtagctctcaaagggggtggaaaattacggtctgttgttttggcatttaccacggacaaaaaattaagaatcacacaaatcgcaattattaaaatatagttcacttttctcatgatattagttttatattatacaattatatttgctttccgatatattgattgctcaaaaataagattcccgacttaatttttatcgaaataggacattaataaacaattaataaattgcatttccggatattttcggttcagaatgtcgagataaaacttattaaccgtattttaattacttattaatagcaggaagattacttttttaagtatccacttctattttcgcattaaacaatttatcaacttctaacaaaaaaagaaacaatgaaaaaatttaaactgttctccggaatttgcctcgttctgctcggcttctgcacaagcgaaaccatggcagacaatcactctttagaaaaagatggaaacaagaagaaaccggagatgtatatgcacttcatcatggatgggcagagtctctccacaggccatcagtcttatccgacactatctaccgaaaatgtacctggaaactatatgatcagcaaccaagtgtggattaactacggaaatttgcaccgtaagcaacttaatccattagtgggcaatattgcaatccctttccgccaaggtaaggatgtgatgagcagatcagcgggaacatttgcagaatcaccgcttgtaggagcagtgaattatgttcggctcaaaaaaccgaaaatggataaaatcatcgctacttcagtaggattcagtggcgccagcgtggaagaactgtcaaaggaatcggaaacacgtacacattacaaggattttgagacagccgtctctttagcctctcagattaccgaaatacagggagacttcgtacagtgtccggtcattttctggatgcagggagagttcaactacggcactgccaatccggagaaaggactaaaaaagaatgaacccaacacacttgacagacaggagtataagaagctgataatcaatctgaaaaacaatatgcagaacgaagtcgtagagaaatatgaccaaaagcaaaaaccggtatggatcacttaccagacaggagcacaatatatgcgcgatacacttgccatttcgatggcccaactcgaagcttctaacgaatataaggatatcatctgcgcaggccctatctatccgatgacagacagaggaggacatcttgatgccaatggctaccgttggttcggcgaaatgctaggaaaagtttactatcaaacacaaataaaaggaaagaacttcaaacccttacaacctaaagaaattctgctagaccgtgcaacgggaaagattcagatccgatttcatgtacctgtaccgccattggctcttgatgtgaataccctgcccaaaatccgcgattacggttttgaagtataccaggacaaagcacgctccggcaatcggataaacattacaaaagtagaattgaatggaaaagataaagtggtattaacctgtgataaaccgctggaaggtgatgtactcatcatgtacgccggttccggttcatgcatcgagaaccaacctcagggactaaaccatttgcaaggacacggtaatctacgtgacagtgattcttctaaaggattctacaaatatatcgacctggatggtaaaaatgccgatggcgcttacatctatccgcgtgaaaaatttgaatcccgtctacggccagattatgaaccgaaagatgattctggtaatataatttataaccaaaattaccctttatataatttctgcatcggtttctattataaactgacaagcgggaagaataaattgcgtattttataaagtcgatattggtgccaaatatccttttttgcttcaattaacatcattaataattgcacggcctatattagagaatactcatttatactaaaatatattgtacgacatccgagggtcaatataccaacatccagatgtcgtacaatataattattttcttaataagaagctgttgccggaataccctctttttccagtaaagccacaatacggtctaactcttcatgcgtagccttttgcaaatcgtggtcgggagtctcccggtcaatcgtataaatcatcacttgacggggagcgatttctttcactgcttctatccaggggagcacatacttgtcggatgtattatccatgtcttttccctgataacctcctttcaggaacatcgtctgtacgatgcagtttcctttgaactctttcattctttcgatgatcttcttaacagaatattttccgttagggcggtccaacagatgaatatattcttcatccaccgtatccagtttcaggatattattatctatcttgttcagtgcttcgaatacggcagggcgatcaataaatgtagagttactcaatacgcttactttcgcttttgggaaatacctgtcgcgaagcgcaagagtatcttttatgatttccgggaaatggggatgcgcagtcggttcaccgtttccggcaaatgtcagtacatcgggagcagtgccgtttgcctgcatgtcttttagtttctcttcgagagccgtgcggacttcttcacgggtaggaagaagtttcttcgtacgatgttcggcattgaaacc

SEQ ID NO: 11872 - DNA, 786 bp, Unknown
  gut microbiota DNA sequence
gaaactttgcagacgatggaagaaaccgtcaatattaccattacgtacttctcccacaaatctacgaatttcgaacggtgcctccgcctcactcttatcgatatagaaaggcatcagatatttcacgaatccctcttccacctcacgattgggataatccaacgtataaagaccgaattccgggtcgtagtctttgatagtcaaatagccactctgataaatgacaggtatgggatttgtgccttcggaatcaatgctgtccaacacatcttccgtaacttccaccttttcaatctcttcaagacggtaatgatgtttcttcaataagtagacaagataagaaggagtgcctgtggcaaaccaataactgccgaacgccattgcatcaaaagtattgagcaggctgaaaggattgtaaatgccgggcgtgttgaaattgaaatgatatccgtcgtagcgtttctgcacttcaagacaaacggtctcataatccaatccttgtacatcggcaagggtatgcaggtctttgtcaaaataacgatgcagttccttgtctgtaatgccgcaaatatcaatataatcacggcgcatggagatatccttcagattgttcaggtcgctgaacacactcacctttccaaatttggtcacgcctgtcaggaaaccaagtttgatgtatccgtccatcgttttcagtacgccatagaaaggtttcagcgtattacggtactccttctgcaactcttcgttgccgatagcctgcaacataggtttgtcgtattcatc

SEQ ID NO: 11873 - DNA, 389 bp, Unknown
  gut microbiota DNA sequence
acggtgcatatcatcttccccgccgccgtccgctacgtggatttgggaagcaaccacatcatagcgggtaaggcggacggtgcggagaacgtaatccgggtgaaagccacgacagagggctttccgggcgaaacgaacttctccgttatctgcgaggacggcagtttcttttcattcaatgccaagtacgcccgtgaaccggaaatgctcaatatcgaaatgaaagacttcttggaaaatgaagatacgtccgatttctcgcatactcgcatgaacatctatttccgggaactgggcaatgaaagcccgctactggtgaagctgataatgcagagcatctacaagaacaatgaccggaaagtgcgccacttgggtagcaagcgtttcgg

SEQ ID NO: 11874 - DNA, 18595 bp, Unknown
  gut microbiota DNA sequence
ttttctacaaagtatccattcgtctggtcgtctataatctctacgtcctgactttgtccggtggtgaaaaacatatatcgtttatcagtattttcatatcctgtgaataattcaggaatattgcctcgtacccggaacattccccaaccactctttacaccataatcctctggtttctgtaattcggatgtattacttactgccccgcaaacgatataagtagaagacccccatgatacggtattcgttgcatccaccggaagggtgaagattatttcattggtacggagatggttgtctgcattgaataatttcgcataatcgctttccaatgaatacccttgtgctatcacattcttgcaggctgtaatacacttcgtatacatttcctgattgtcggtgttggtataaaccttcgcattcagatacagttttgcctgcaacgtatatgccgctcctaatgttgcccgaccgtacatatcacttccgttagcagacaaacaattattcgtatcacttgtatttgtgattgcattcagttcgctttcgatgtaattgaaaatctgcgctcctgtatagcggggaggtagataaccgaccaaaggatcattttccgttatgaacggaatattgcggaagaggtcgagtgcgtgatagtagaacaaagcacgcataaagcgggcttccgcacggtaagtacgtatttgcttttggtcatcggcggagaaagagccgattttatcatccgttgcgttgcgtaggaattcgttacataaagcgatgttgtagtagatacgataatacatgtccgatacccaagggtcgttggcgtcccaacttaaataagtcagtcccgttacattgtcaccggatagccaagtagatgctacttcgtccgtaccgcattcctgcaaattgaaatagcaacgcatataatcctgaccactgttactactcaaatcttcgttaccgtttttttcctgaccggtagttaccatggaagtatatattttccccaagacagacttgtagttttccgcactggtgtaaatggacgacgaagtttcgtctacgtgtggatattgatccaagtcgcctatacaggaagtgaacagcaacgtgctgcaaaagtaaaaggctatataaaatatctttttcatgattggatgtttttgataattagaagttaagaccgatatttagggagaatgtacgcggacgggggtagaatgagttatccactccgttgggaacttccggatccacaccactgtatttggtgatgcagaatacattctgaaccattgcactgacattcaggctacatcctttataaatttctccgaagttgtatcccaatgacaggttatccatctttaagaaagaagcattctctacataataatcggatagatactgacgtgatttaaatccggtttccagataacttctggaaagattattcaattgataagagttatagctgaccgtctcccaagctccggcattcattgccatggcattgtaaacgtagttgccgatattggcacgcagactggtgcttaacgtccatttcttataacgcagtgaagtgctgaaaccgagaatgtaatccggtgccggagaatgatagcgatataaatcattggtgttgatttccccgtttccgtcgaggtctacgtatgcgccttctaccggtttgcctgtcttttcgtcatatagctgatggtaaacgtaaaacatataaggtgcgtatccttcacttaatacttgcaattgatagctgtcgatgtacggccctacggaagtgttggtagcttgagtaccggctgcgagtgaaaggtttttcaccttcatcttttgccaagtcatgttgaaactcaaatcccaattccagtcttttgtttgtatcggagtagcgttgatactgaactcaataccttcgctgtctacattgcctacgtttgtggtgatattgcggtcgaaagtagtacctgctgcagccggtacggttgcaatcaagtctttggtctggcgggtataatagtcaaagctaccggtgatgcggtcttgcagaaaaccgaaatcgaatccggcattccatgaagtagtcgtttcccacttcaggtcgggtacgtaagcctccggacgatacgtgtggatcgggctacctccaatcagggaggatgcaccgctttggctgatattgtagacaggtaggtaattataattaccgataccgtcctgctgccctgtcacgccgtagcttgcacggagtttcaatgtacttaatatcttgttatctttcaggaaagactcttccgtcattctccatccgagagctactgaagggaaagtaccccagcgtacattttttgcgaaacgcgaagtggcatcccggcgtacggttgtcgtcaacatataacgtgagtcgaacgaatagttcagacgaccgtaataagataacagcacatgacggtcatcggtagctttggatgttttttgaatttctccgagtgtatttgtctcatagtagagcggggtagtggatttccaatattgatagtcgtaaccggctgttacatcaaaactactcttgatggattctaccagtttattgtagttggcatataaggtaagcaaacggtttacctttttctgcggtccgtaagtatagtccaaaccggaagttgtatagttttgtgccgcctcagccgggacatatacacttcctttaccttgtgcatagtcataacccaatgtagcgtgcaacttcagatcgggaaagaaatgcagccggtagtctgcatcgatatttccgatgaaacgtttcaccgtactgtgagaatcattcattttgagaagtccgaccggattcatgaccgctccgttcacgggagctccggtgttatcgatagcttccgtatatccgccgaaattgtctgctcctgaatatacgggaatggtaggattcatggttgccgctgcccagatagctccggtattggcgaatgtatttttgttgatagaccctttggcattgatattcagtttcaagtggtctttgaagaaagacggatttagcgtgatgcttcccgtataacgttccgcattgtccgtgcgtaataacccgctttggttgtaataaccaacagatgcacggaacggcaggtttttggctatctttccggcaacgctcagattattgtccgtaccgaatgcgttttgatagatttcatcgttccaatctgtatgtgcggtgccgagtaatgcctgttgcgcatcggtacctttgctttggatggtatttacgaattcgtcatagctcatcatatccgccagtttggtacgtgtctgtacggagttagtcgtgctgaaagtaaacttcagtttgtccgaacttcctttcttggtagtgatcaagataaccccgttggatgcgcgcgaaccatagatagctgtggaggatgcgtctttcagaatggtcatgctctcaatatcgttcgggttgatgaggctaaggaaattgccgtcgttaccactgatacctccctgttccaaaggaacaccatccaatacaatcaaagggtcgttgctggcattcagtgaagcaccgccacgaacacggattgtacttcccgaagtaggagaaccactgttggacatgatttgcacaccggatattttaccgtttatcagttgttcgggagagctgaccaaccccatattgaagtctttgctgctgacgtttgtaaccgacccggtaaggtcgcttttacgttgcgtaccatatccgatgacaacgacatcgctcaagacttgtgagtcgcttttcatctgaacgttcagtgtagtgctgcttgttgggatagctacaatcttagtttcgtatccgatgtaagaaaattgaagttctttattgccttgcggcacattcagcgtataattaccgtcgaagtcggtaaccgttccggtagaggtacctacaatgagaatacttactccaatcataggttctttgttttcatcaatcacttgtccggtgattcgtttgcctccttgctgtgcgaagaccgaaatcgtgcctcctaaaagggctgtacacaacatgagtagtacagtcagatggcgtagatttaagatattactgttcataattactgtgttattgataatagatttgttattatatttacttaggttctggaccgagtatagaattactttatttattccagccagatttcccctagctcgatgatggattctgtcttgtcttttcctaatagagacaattccagtttctctgccttctccatttggaaaggtatgtctgtttccggatggaaatattgtttcagaaaagtcggataagctatcggaagtaatgccgtgtccgcttgatgcaactttttcaaagggatacgtatgattccttccggtgaaggggtactgcaaattgttttgtatgtatatccgtctgaagtgatgaatcctgcatagaatccttcagggagattcttatggcggttgacacggatgcaaagagtggtgcaactctttaattttccttttctttcttttagcacgtcttgaatggatttgcgcaggaagtgatgtgttttctctcctttggatgtgaaggcgaaacggagtaatggcttttcaatcggagaaaaatcgattaaggtacgtttcaggtcgttccattcgggaagcgtataggcttctatgccactatgtgtgtctgtcacgctcaataattgtattggactgtcgggagcgacaatacgggtagtccaatatgaatcggcaatgtaatcccaatccaacggatttccttttattccagaagaaaatccctttacggaatttccggcaggataagtacgggtactgtcgccccgacagacaataatgttatacttaaaacaaccttcttgtagttctgcggcaggaattgtagcttgatagctatagccgcttatacgtttcatcttgatagatggattatgatcattccagaaagatactttgtctgtgtagataatcacggagtccggagaagtgtttccaaccacttgcgcaagaattgttaaatctctgtctgcttcggtgacttgtgcaggattgtggatgactttgtaatctgttgtatgcggggaaggggctgcaaactctccgagacgaatggaattccatcgggaatctgttgtccaattctgcttcggtgtgcagttcttgcgtttcaacaagtaaacacccggttgaagattacggataactccgtcttttacagtctcttctttccgttggttttctttattgagtgcggtaagagtgaatgattctcctaaatcgggaatttgaagagccatatcccaacaaccatagataatgctgactacctctttggcaagtgacggtttggcaaacgggtcgctgactgtcactgcatccggcattacttccagcctccatactcctgcttccagacagtcaataaaatatgcaccggttccttcgtaatgtacgacgggagaactgccgcaaccggcaatggacataagttgtgaagcatttcgaggaaggctgtgggtattgttggaataatagtatttccttccattattcagctcgcttaaattctccgtatagctgacacggaatccgtcaccaaacagtgtatcttgaggataactaccgtatgattctcctcttctcagatggcgtgccgcttcggcagcaatttttatgctgattgctttgtgtggtgtataggcaagattcagaaaatgagtctggtattccgtattggcgtatgcaatgtccatcgggtcgtatgcgaactgcgtaacccattgaaatcctgccatgcggaaagtacgtgccatagccggatacatataggaatacataatatctgccgggtcgaattcgtaaatcaggcgtgccttcttgtgaaatcctttcaccttatcggcaaaagaaatatcatagcggtctatatagggaagaaaatttccttgttgcgtttgtccggataccagtccgataggataccattgataagtagtgccttgaatggcagtctcatagtatgcttctaccacatattcgttgtggcttacattatagaagacaggtttacggttcccggttctatgaatcgcttccaacattcggttgatatatgcctttacctcttccttcgtaccggagtggcaaggttcgttattgatttcaaatcccactatggaaggatcgtccttataggctattccggtataaggattgatatgtttcactaggttgtggagataggtctcttgtgcggtaatggcttccgggtgagagtgcacgtcgcatttatcatatttataagagaaaccaccggtctgaatgttccgttccgggtaaccgtttccgaaattggtttgggcggtaataacaatatgaatgttccgttccttgagtttggcaatcagatagtccatcaggtcgagatgctcgttttcaaggagatttccttgctcgtctgtgagttcgacatcccaaaggtggatacggtaagcgttcaatcccaaacgggtgatatgatatacgtctttatctatagcagctttacgatcaagtcccagataacctaaggcacgataggcatgggcaaaggggagtgtgtagttcacaccgaagaaagaggcttcctgacgggtgtcactccaacgcatcactccgtttccgtctatatatatataaggtgtagaagatgatttcccttgtatattgacaaaggcgaataataaacaaatggaggtaagaataaatagtcttttcatgctatcaaatttatcggttcattgatagtgacaaaggtaaattattggtaaatcaggtaaaagcacagattggacatataaggataaaaataggacgaaatgctttagaatgcccctacagctcttcatttaagtattgacggggtgtttttccgaattctgattggaaacatttggagaaataagagtgattggaaaaacctaccatatacattacttcggcaatggtgaatttcttttgttgcagtaacattgccgcctttttcatcctgatcgatttgatatattccacaggagacattccggtcagttgtttaatcttccggtagatctgtttgttgctgaagccggacaattcgcatagggcattcacgttcaggtctgcatcggaaagatggtcctcaatcaggcggatgatatttgacaagaacttctcatcttgtgattcagcttcgatgggtttgagcacaggcaatgactccagcgattttttggtttgatgactaggggtaatttcttcttcttcaatggcggtaatgggaatacttagtcctatgcttgtaccttgattctctttggaggtaactccgttgatatgtccgccgtgcagttccgtataggtcttcaccaagtaaagcccgatacctgtaccttccttatttcccgaacggggggattgataaaaacgttggaagatatatggaatgtcttgttgcggaattccggttccggtgtccgatacacaaatgtccagttgtccggtttcctgcgaataaaaaagggaacaccgcacgcttccgctgtcaggagtatattttacggcatttgagagcagattgtccagtatcacacccaatttgattgcatccatatccgcataaattttggctttgttcgcttcaaaatgaaaagtgagccgggaattctcttcgtaaacggagaacaggctacggctgaaagataccagttcgatacgcgacagaatgagtaatgaatccgcattaccctctatccgattgaaattgagtacctgatgaatcaacgaatttatcttcatggcgttgcgctgtacttcttctaacgtttgtttctcatgttcagtctctgtggcaggcaacaactggctgacaggagctataatccggctaagtggtgttttcagttcattggataggtttgtaaagaatgccattttctgacgtgactgttccaaaatcttctccttctccaggcgttccatcttcaatcggtttttaacccggaagaaattgatagtccaagcgaccaggcttagaagtaaaaggcaatagattatttttgcccaaagcgtataataccagggcggcaggatctttatgtccaatatataaggatgttccgaaggaactccgtttttttctactttgctgatagataattgataatccccataacttaaattgctataagtaatacggttcgtattggatggcagaaaattccattctttgtccatacctccgagccggtaaacgaatttattcttttcttcgagagagtaggggaggtcggacagctcaaaagccaaattattctgattgtacttcagttcaatggcattggtgtaacgtatattgggaatattcgctatgcgtgggttcatcaattgattgttaatgtacaaagctgtcaggagaatgggacgttcgggacgattcatggcttgtattttcgggcaggatatggcaaaaccgtcagcgcctcccaaataaacatttccgtctttcgaatcgaacagcagactggtaaaacgcttatccgtcatattctgctgacgcgcatccatcgtttcccggttgataatccaaagcccgttcgtggtagaaacccatatatggtctttgaccgatgtcatggacaaaatctcgttattattaaagttcccgaaagaaatgctttgccgactggagtctttagggttgatacgcattactcccccgtgaaatcctacccaaagcataccttccgcatcacatagtagataattcgggcttttttctccgctcaactcatcggaaaatagtttggtgacttgctttgtgcgtggattgattttatccagccctttactgttgtatagcaatacccatacattaccttccttatcgggcataatctgattgataaacatacccgacagtccattgtgaatagagtaattgtattcggctacgtattgtccgactttagattgcattaatttatgcttgtctactacaaagattccgcctaaacaggtggcgatccataggtttccggaatcgtcttcgaagatgtaataagcccaatttgtattgtaggttcctgtgctgtcgataatgttatagtgtacaaactcttgtgtcgtatagtcataacggttgatactgccatctgtagctatccataattgctgctctttatcttcatagatatggcggatacgattgtgtgataaaggatgtgctttatctcccatcctgtaccagacagcctcatgtctgtttccggtaggatggataaaacggagtaatccgtttgtgccgccaaaccaatacatccctttggaatcccggaataacgagtagaattgatttccgtctcctgtacccgttatttgagagattggtacgaattgcaaggcactgttataacgcgacaaggagataccataatcagttcccagccagatattatgttcctggtcggaaaagatattccaaatgatgttgtttgtcagcgactggatattacgtgaatcatggatgatatgttgcaaaggttcctcattgttttggtacacgtaaagtccgttatctgtaccggctaataagtttccgtttccatccaatgccaatgatttgatggaattattgtggaaaacttcgattgcaaccatttttcctgtttcgggagtatattggagaagatatccttccataccgatccaaatacactgtcggacggtatcttccaataaagagttgacgaataaattacttatcccatgagtgacaggtagaaaaatatcttcaaactttccactttccgctatataacgacataaaccattgtaagtacccacataggtttgcttctctttcgtgtggataatcgaatagattgtattatgggataaaccactatgcttactgtcgaaacgggttaatttccggttttctaattgataggtatagagcccgttcagggaacctatccataagattcggtcacggagcgccattgtacggacatcggtaggaaaatccacctccggctgttcatatctgtctgtacggtagttgtaaacaagtattccattatccgtccccagatacagatatgtattgtcaatgataatgccgcaatagatacgtgtgttcgtcagttctccataagtgaaatgttgttgggtggaatagccgtcgtaactgaataaacctttattggaacctatccatatcatcccttcgctgtcttgcaaaaagcagctgataaccgaagcttccgtaccgagataaatgttttcgaactgctgataattcactttttgcccatacacatcacgatggatgcagaatatgcaaatgagtagaagtatcaatttaattcgtaggtacatgatatcaggtttgcaagttttacgttgcaaatgtaggaaaaaatgtcggttacacttgtaaatatccgcttctttttgttcctttgttacctatttataaacggaaagcttatatatgagaatactaatttatttgcttttgttgccattaatggtggttgtggttgcctgtggcggcaaaaaaggagcttcagacaaagagtcggtattagcgacaatggatagtgtggatgctcacggattgcaacgtatgcagacttccaaaagcgaaacggactttaaatttaaaggaaaagattaccattccattgtttcacgtactccggacgaaagtttgcctcatatcaagaatgaaatgggagatacctatgtagacaataagatcgtactgcgtctgatgcgcggaaacgagaaagtttttgataagacgtttaccaagaatgatttctcttctgtggtagacgcgaaattcctgtcgaactctattctggaaggaatcgtatatgataagactacttcgcaagggatagtgtatgccgcaagtgtctgttatccgcagacagatttgtatatgccgctctctataacaatcacttcagacgggaaaatgaatataaagaaagtggatatgcttgaagaagaatatgatgatatcccgtctaattagctcttgggatagatatcgacaatggaattgcacaaatgtgaaaacatttgagacaaacggaaggcgacctatatggttgccttttgtatttttgcaccgttaaaaacttaataccaaccatagaatgaagaaatacattttggctatctgcgtggtagcagtaagctgtacagcactgaacgctcaaacaaagaatacgcaaacattggttccgctgactgaacgggtaaacgtacaggcagattcggcacgtgttaatcagattatagacggttgctgggtagcagtcggatctaaaaagtcccatgccattcagagggactttactcgtatgtttaacggaaagccttcttatcgttttgaactgaaagaagacgataatacactgtcgggatatgccaaaggcgagaccaagggacgtgcggagttctcatactgttatgcaacatccgatgattttaaagggaaacctgccgatacctataagaaagcgcaaattatgaaaaccgtgtatcatcacggaaaaggagcttgcccgcaaggctcttcacgtgattatgagttttcggtatacatcccttctacattgggcagtgatgtttccactatttttgctcaatggcatggaatgccggaccgtacattggttcagactccgcaaggagaagtgaagacattgacagtcgatgaatttatagaattggaaaagactaccatttttaagaaaaatgtgggccacgagaaaaaggccaagttggacaagcaaggtaaccccgtaaaagataaacatggcaatcctgtatatacagccggaaaagctaatggatggttggttgaacaaggaggctatcctccattggcattcggattctccggaggatggttctatatcaaagcaaactctgaccgtagatggctgaccgacaaagatgaccgttgcaatgcaaatgtagaaaaaacacctgtcatgaaaccggtgacttctgaatacaagtcatcgactatcgcttacaaaatgccttttgccgatttcccgaaagattgttggattacattccgtatccatattgattggactgtctacgggaaagaggctgagacaattgtaaagccgggtatgcttgatgtacagatgaattatcaggataaaggtaaaaaggttagtaaacaccttgtagacaatgagcagattctgattggacgtaacgacaaagatggctactattttaaatttggtatttatagggtaggtaacagcaccaaaccggtgtgttacaatttggcaggttattcggaaaagtaactccggataacaagctgctgttagagaaagttaaagattggcaaactcataatattccagaatctttttaggttctatatcgttatttgcattattaaaaacaaagtgtaatattaatgctaaaaggataacgattatgaagaagattttatctttacttgtattggctatagtggccgtgcagttctcgtttgcagctgatgtgataactaaagacatcaaccaattgccgctttctgcgcggaattttatcaatcgtcatttcacaaagcctgaggttgttcagattaagattgataaggatctgatggagtctactaagtatgaagtcttattaatggacggtacggagatcgattttgacagtagggggaattgggaggaagttagcgctaagaaaggaaagactgttcctgcaactgttgttccgggatttgctgccaattatctgaagactcataattttgtgagtgaaggtgtgacgaaagtagaacgtgaccgtaaggggtacgaaatcgaattgtctaccggaatatctttcaagtttgacaagaagggcaaatttttgaaagcggatgattgagtagttatatgtagataaacctaaaccggaagattgttatgtggaaatttaagtttggcttatgggcagtggttttgataacctctgtcttttctttcagcgcatgtggtggtgatgatgataatgatacttttgttcctcctgctaatattgaggtagctttgaaacaattgtatccgggtgcgcagaatatagaatgggaagtgaaaggtgtttattatgtagctgattgttgggtgaccggtgatgaactggaagtctggtttgatgtgaatgccaattgggtgatgacggagaatgaattggataatgttaatcagttagtaccggctgtttatactgcctttatggattctgactataacacatgggtagtgacggatgtgtatgttttgacttatcctttgaacccgactacctctgtcattcaagtaaaacagggcagccagcgctattcactttatttctcacaggaaggcggattgctccatgaaaaaaatattagtaatggagatgataccaattggccgccgactgagtaggtgaattgttacatctgttggtagtctttagccaatcctccttcgcttgtttctttatagagggagggaaggtcatgaccggtttgtttcatcacttgtacaaccttatcgaaagaaacgcggtgcataccgtctgtaaaagcagaatagaggttagcgtccagcgcacgtgctgcggcataagcgtttcgctcgatacagggaatttgtactaatccgcataccgggtcgcaagtcattcccaagtggtgttccaatcccatttctgctgcatattcaatttgtgcggggctacctccgaatagttggttggcagcggctgaagccatagcacaggcaacgcctacctctccttgacaaccgacctccgcaccggagatggatgcattgaatttgacgatattaccgataagccctgctgttgccaatgcgcgtaaaatgcgcatatcactgaaatcacggcttttctgaaggtgataaagtactgcaggcattacaccacaggaaccacaggtaggtgcagttacaatcttgccaccggaagcattttcttcacttactgccaatgcgtatgaaaaaacaagccctctggattggagagattgcttgtatccggtggcacgtatataataggtagaagcttttcgtctgagatttaacggtcctggcagtacgccttccgcttccaggccacgatgaatggcgtctttcattgtagtccatacctctgccaaataatcccagatatcatcgttctcacattcttttacgtattcccaataactttttcctgtacgttcacaccattgcagaatctcggtcatgttgttcatcccatatacttccgggctttcgatagtcgggctatcgttgttttctgccagtgcaccgccaccgatactataaactgtccaattttcgagtactttgttactggtgtcgaaagcagcaaatgtcattccattcggatggaacggtaggaaaactttgggttgccacacgatttctacaggagcaaccgcctgcagggtgtctataatggccacatctgtcatgtgccctttccccgtagcggctaggctgccataaagggttactttaaaagaaactgcgtccggatggcgttccagaaacatttctgcggctttacgcggtcccatagtgtggctgctggaaggacctgtacctattctatataactctttaattgatttcatgactgatgatatattttcgttaataccagtttttctttttgaagaacaaatatacgataataccgataattcccatcactaaccaggcaaataaataaccatatcgccaatccagctccggcatccatttataattcattccccataccccggccagaaaagttaggggaataaagatagtggatacgatagtcaggcgtttcataatgttgttcatgcgcaggtcattgttggaaatataaaggtctaccaatgaagaaagcgtttcccggcagatttcgatggtttgcagtacaaactggagatgatcgttcacatcgttgaagaaagcacggttgactttatggataagcaggttttccgcacgtaacagttttacatattgttcttttagcggaagtattgctttcttcatcagcatatattggcggcggagtgcctggatttgaatgcctatatcatatccttcggtgatggtgagcagttcttcttccagatcttcgagagcgtcatcgatagaagagatggttgaaatataatttcccattacactattcagtagcacactgaacaaatagtctgtttggcggctgcgtattttcagaacgtcattgcgcaaggctgtattgacatcgtcgaagaagtcggttcctttttcgaggaaggtaagtacataattacttccgagaataatgcatacttgttgttggagcagttcgtccaactcgtcctctcccttatgtgtattgggatagaataatttcaagatcaggacaatatatttatcatgctcttcgattttggtggggtggtttgcatttagaatatcctgtaatacaaggaagtctatttcgaaatgactgcaaatctcacggatggtttccgtatctttcatcccgtgtacttgcagccaattgatgtgcgtattgtccaatgtatctttgattgattggaaggtattaccggacgactcctgtatttctgtcgtactatacgtgcataggtgcaaatgggtaggagtgagactgtctccggtataaatcagcttttcgcttaataggttattcttcatgctttgttctcgtatttagacgtttttatttataggttagtcaaaatcaactacagtgattccggcacctccgaattgtacgtgttcgtcagcataatggctgacccccggtacggtagagaggtattggcggataagcgtacggagtattcccgtacctgttccgtgaagaatgcgcacgcggtccatgcctaccaatatagcatcgtcgataaagtaggtgactgcttgcagtgcttcatcgccacgcataccccgcacatcgatatcttgtttgaaactgagtttcttttcgtacatctgatcatgtgtctggctgctgacaaatgtactcttggcaatcccttccgtcttttgaggagcattgctgcgttcgagacggtctatctttacagtcgttttaatgcttccgaaagcgacaattgcatttttgccgtttatttccatgacttgaccaacacttgtctgtcctttgatttttacattctcgccaataccaatgggagtcactttgggaacaatgattgttggggcattggcagctttcggttcgttctttttatttttcttccgttcctgcttttctttcaacttttccattttccgtgccagtttttcttcttgttctttggaggctaatgcgtccaaagaagtgcggaagtcagtcagttcttgacgtgccagacgagtcttttctttttcggcctgtgcttctttgatggtgcggatagtattttcaatacgggcatttgattcttgcagtattcgttccgcttcttcctttgcctgtttgataatctcttttcttgacttttgcagctcttccatctccgtctggtaacgggcaatggtttcttccatctgtttctcccgttgtcggatggtttggcgtttaccctcccaataacgtttgtcgcggacaatgtcttgcaagtatttatcagcgttgatgtattcgcttcccacaatttccgaagcgtctgcaatgacatcttcgggtaatccgatttttcgtgcgatttctacggcaaacgaacttccgggattgccaatctgcaattggaatagtgcctgcatgagatgacggtcgtaaagcatggctccatttactactccttcatggtcttcagcgaaatgcttcaggttttgatagtgagtggtgatcactccgaaagtttgtttccggttgaaacgttttaatacggcttcggcgatggcgcctcctatctggggttccgtaccccctccgaattcatcaatcaagatgaggctgcgttcattgcagtttttcatcatgattttcatattggtcagatgtgaagagtaggtactaagatcatcttcaatggactgctcgtcaccgatgtcgataaaaatactgctgaatatacctgcatgactgcgttcgtgcagcgggatcaacattccgcattgaagcatatattgcagtaatcctaccgttttcagacagacggatttaccaccggcattcggaccggatataataaggatgcgttgtttttggttaagctcgatatccaggggcacgacttttttcccatgtttggctaatgatagctgtaacaggggatgaacagccattgtccaatccagtagttgctcattttctatagctggtttcaaacagttcgtctgtattgcaaaataactttttgcgcggataaaatcaacttctgccagaaattcatacgactgtaagatttccggaatagacgggcgaagggtattggagaactcagtaagaatacgaatgatttcccgtcgttcgtctccttcaagttcacggatacgattattggcttctactacttctgcgggttctataaatacagtctttccactagcggattcatcgtgtacgattcctttgattttccgtttcagtcccggagctatagggatgaccagacggccgtcgcgcatagttggagttacatccttatctacgtatccttcggattgtgcgctacgcaagatactgttcaaagatcgtgagatacttcccattgtgctggagagttcacgacgtatgcgtgctaattcagttgaagcgttgtctttgattttaccgtatttattgagaataccgtctatttttccgattaattgcggaaatacggctatatctccggctaatcgtttcaggctggggtaaggggtatcgctttcttcttcctcttcattccgatgtaggaagcgtacgatatcgcggattgtttccaatgaacggcgtaagtcaaacagttcttgttcgtccagatacatgccttctatccgtactcgtttcaatgaaggacggacatcaaagaagaactgatcgggaaatccgtcttcttcttgaatgatgcggataaattcagttacttgatttaatttctcttctacttcttcgtattggtcggaaaagaccatatcagagactcgttcctcgcctaaagtgctgagacatctatcctttagtagctgtcttatttggtcgaatcctatcttttgctcaaaattttgaggatatatcatatttctatcttgctaatggactgcaaaaatacgatttattcgcgaaaaaaatatcagaatgtttgcagatttaaaaatgattcgtacctttgcaccgctttcaacggaaagcacttctgataaagaagttttggagaggtggcagagtggtcgattgcggcggtcttgaaaaccgttgaaggtaacacttcccg

SEQ ID NO: 11875 - DNA, 28619 bp, Unknown
  gut microbiota DNA sequence
gaaccaccgaaggcgtaagccagcagatttacagtctgccccatttggccactctggtatttgcccttaaacaagtggagaatgtagagttgaggaattcttcccgcctcagttctccttattattttcaattgaagttccaaatttcgcatagaactctcaatttcccattctcaactttccacttctttgagcctcttgtcggattcgaaccaacgaccccgagattacaaatcacgtgctctggccaactgagctaaagaggcgttctagctaaaaaatgcaaccgtcacgttctaacgcgagcgaaacggctgcaaatttagttatttatttctttcccgcaaaatatttgggatttttttatttgctacgctgtttttccttgtacttaaccagttgtttttcgagtgcttccacatccaaatcaatcgcttcttcaaacgtatcacacactttgctagcataaaattccccgttagggacaagtattttaatacctgcttctttatttgcagcaacttccggcttaattacctttaatgacacctctactttctttatatcttcgtaatatttttccaacttagacacttttttctgaataaatgcctgcaattgctctgacgcatcaaagtgaattgattgaattctaatatccatacttacctccttttttttaggctcttggatgagcctgtttatacacttttttaagttcttcaaatgtggcatgcgtataaatctcggtcgttgttatactctcgtgacccaaaagttcctttactgcacccaactccgcgttattattcagcattgtggttgcaaaagtatgcctcaacacgtgaggactcttttttttcagcgtcgccacctttgacaggttccgtttcactaaattatagaccagattcttataaagccgttcgccgttctctcttacaaaaaaagcctccgacctttccggaatcatttcgtttcttacatcaatatacccaagcatccaatcccgcagttcatcaccgaacggaatcaaccgctgcttgtttcttttcccggtcactttcaggcaagatcctgagaaatccacatctttatcatccaaatctatcaattccgaaagtctcatgccggtagcataaaacatttcaataattaatcgatcccgacaacctttaaacccctcgccaaagtccgtctcatccagcaatttattcatttcattttctttcaggaataccggcaacgtttttttatttttaggtcccactatttttcgtaatggatctaccgtcacctctcctttcttcaaaagaaacttataaaatgtccggagcgtacttaacttgcgatttacagaagttgaggtatatcccttatccatcaatgaaacaatccattcacgaatcagttcagcctcgacctccaacggatcaaattccccatactcttcctgagcaaactcctgtaattgccttatatcctcaccatacgcaagaacggttttatcagaataattccgctcataccggagataatcaagaaaagattctatcaacataatcgctacatctaaatcgtgcaacgaatgtatgaaaagaattcaataattcaaaggaaattacgaattattaatcttctatttgctgaagttgttgtacgtaaactgcacgttctttcttaagtcttttagttacagacggtttgtcaaactgctgtctgcttctcaattctttcacaatgccagttttctcaaattttcttttgaactttttcagcgctttttcaatgttttcgccttcttttacaggtactacaatcattttgttactattaatatgttatgattaaaaaaattccgcagtcaaattgcgccgcaaaattacacatactttctttattcacaaaactttcggcaaatatttctcaaaaactattcataaacaggtcattaaatgcagaaagttagtacctttgaaacatttatatgtctataataatataataaggtatgaaacagaacataaaagaacgagtacatgctctgcgcatgacactccaccccaattacatcaaagcattcattatccctagcaccgaccctcaccttagtgagtatgtggctccccactggatgtcacgcgaatggatttccggttttacgggttctgcaggaacagcggtcatcctgatggacgaagcgggattatggaccgactcacgttacttccttcaggcagagaaagagctggaaggtagcggcatcacactctacaaagagatgctgccggaaactccaagcataacagagtttctctgccagcacttaaaacccggagaatctgtaagcatcgacgggaaaatgttctctgtgcaacaggtagaacaaatgaaagaagaactagcggcgcatcaattacaggtagatatatttggagatccattaaaaaacatctggaaagaccgtccctccatacctgactctccagcctttatttatgatatcaaatatgcaggaaaaagctgcgaagaaaaaatatccgccatccgtgaggagttgaggaagaaaggcgtctacgctttattcatatctgcactagacgaaatagcatggactctcaatctacgaggaaacgatgtacattgcaatccagtcatagtgagctacctgttaattacacaggatgaggtgacttactttatttcaccggaaaaagtgacgccggaggtcgagacttatctaaagaaacaacaaataggaatacagaaatatgatgaagtagagacattcctaaattccttccacggagaaaatattcttattgatccacgaaaaacgaattacgcgatttactcggccatccatccgaaatgttccattattcgtggcgagtctcccgtcacattattgaaagccattcgcaatgaacaggaaatagccggcatccatgctgccatgcaacgggatggagtggcacttgtcagattcctcaagtggctggaagaatctgtatctgccggaaaagaaaccgaattaagtatagataaaaaattgcatgagttcagggcagcacaacctctctacatgggagaaagtttcgacaccattgcaggatataaaaaacacggagcaatcgtgcattattcggcaacaccggaaagcgatgtaactcttcaacctaaaggattcctactcttagattcaggggcacaatacttggacggaaccactgacatcactcgtaccatcgcattaggcgaactgacggaagaggaaaagacggattataccttaatattaaagggacacatagcattggctatggccaaattcccagccggaacccgcggtgcgcaactcgatgtactggctcgtatgcctatttggaatcacagaatgaacttcctccatggcacagggcacggtgtcgggcatttcttgagtgtacacgaagggccacaaagcattcgcatgaatgaaagccctgtaatcctccagcccggcatggttacatccaacgaacccggtgtttataagacaggcagtcatgggatacgtacggagaatctgacgttagtctgcaaagatggagagggaatgtttggagaatatcttaaatttgagactatcactttatgtcctatctgcaaaaaggggatcatcaaggagatgttgacaaaggaggaaatcgaatggctgaataattatcatcagactgtttacgaaaagctatctccggatcttaacgaagaagaaaaagcttggttacagaaagccactacttctatttaaagataagatatctggcacccgggtgtcgggcaacataatatagtatcaactaaaaaacattattaaatcaaacaaatctcatggctttaataaaatcagtacgcggattcactcccgaaatcggagaaaactgttttctcgcagacaatgcaactattataggagatgtaaagataggaaatgactgtagcgtctggttcagtaccgtgctacggggagatgtcaactctatacggatcggtaatggtgttaacatccaagacggaagtgtcttgcatacattataccagaaatcgactattgaaatcggcgaccatgtttctgtgggacataatgttaccattcacggagcgaccatcaaagattatgcattagtcggcatgggctctactattttagatcatgtcgtagtgggtgaaggagcaatcgtagcggccggatcgctggtactaagcaatactgtgattgaacccggaagcatctggggcggcgtacctgccaagttcatcaagaaagtagacccggagcaggcaaaggaactgaacgagaagattgcccacaattatttgatgtattcgcaatggtataaagaagaataagccagttttacagatgacttataaaaagatagcgggagactcttttcggaaagagtctcccgctatctttttatagaaacatcaaaaattaatcatattcatgattttttccgtcgcaccggacttactggtcacataatatccggcattctttcccgtctcgtctaaaaagtctttgtctgtctggaaacggtctaacaggcttttcagttcttcgtaatctttgatggagtaagcacctttcgcttccaacagttccacggcttccataaatttctgatacttcggcccgaaaatgacagggataccatacacggcagcttccagcgtattatgaataccaacaccgaaaccgccaccaatataagcaatctctccgtagcggtagatggaagacagtaagccgaagcaatcgataatcagacaatccgctttcaatacatttttttcatcggcacgagtatagcgcacatacggacgtttcaacttaccaataatctccaccagatgattctcgtcaatcacatgcggagcgataatcagtttcatttccggatgattattgaaatattcgagaaacagatcttcatccggtccccacgaactgccggcaacaaaagtgaaagcattgtttcctttgaacttctccaccagtggaaggtctttcgcctcctcacgtatttgcagtaccctgtcgaaacgggtatctcccaccactgttacacggagaatgccaatcttcgacagataacgtttggaagcctcgttttgcacaaacagatggtcgaaatctttcaggacattgcgataggtaccgccataccatttaaaaaacacttggtcgcggcggaaaatagacgacacactatataccggaatccggcgcttgtgaagctcatccagataattcttccaaaactcatatttgataaagaacgccatacacggattagtgatatcaaggaacttcctcacattccggggtttatcaaacggcaggtagcagacaatatccgctccccgataatgcttgcgcacctcatagcccgaaggagaaaagaaagtcagcaatatcttataagcaggatattttgcccgaatcatttctatcaacggacgcccctgctcaaattctcccaatgaagcggcgtggaaccagatatactgttcccccttttccacctgctggcgcaaaagttcgtacaccacccaatgccccttcatcatcttacggggcttgcggctgaacggtgcggccagatgaacgataaagtcataaatgactattgccaggttgtaaagcatagtactatgtcgattacttcaaaacctcaaccgcacgtttgatacgagctattgtttcttctttacccaatacccaggaaatatcgaacatatgcgggccttttccttcgcccaccaatgtcagacgaaaggcattcatgatattacctgtatggtaacctttctctgcaatccagtccataacgactttctcctgtccttcgatactgaagtcctcgataccggcaatgacttccgccagttcagtcatacattttgcagaatcctctttccagcgtttcttcaccgtcttttcatcatattcggtaggagctacgaagaagaagctacatacaccccataattctttaatgaaactgacacggtctttcatcatgccaactactgtcaccaccttttcgaaaggaacttccacaccttgttctttcaaaaatggcaagaacagttccgcaatttcttcattaggtttctgctgtatatattgatggttgaaccatataccttttttataatcgaatttggctcccgacttgctgcaacgatgaagatcaaacagctttatcaattcctccatcgacattacttcctgatcgttacccggattccaacccaacaaggcaaggaagttgatcaccgcttccggcaaataaccggactcacggtagcccgaagatatttctccggatttcggatcgtgccattctaacgggaacacagggaatcccaaacggtcaccgtcacgtttgctcaattttccatttccttccggtttcaacaataaaggcaagtgagcaaattccggcattgtatcttcccagccgaaagcacgatacaacaacacatgcaatggtgcggaaggcagccattcctcaccacggatcacatgagaaacttccatcaaatggtcgtcaacaatattcgccaaatgataagtaggcagttcatcagccgatttgtaaaggaccttatcatcaaggatggatgaattgatgataacttctccacgaatcaagtcgttcacacgaatatcttcattcggctctatcttgaaacggacaacatactgcttgccttctgcaatcagcgcatctacttcttcttccggcattgtcaatgaattgcgcatcatgccgcgcgtagacgcatcgtactggaagttcgcaatttccgcacgtttggcatccaattcctctggagtatcaaaagcaatgtatgcttttccgttctccaacagaacctgcacatattttttatagatatcgcgacgctccgactgacggtaaggaccgtgttcgccaccgaaactcactccttcatcaaagtggatacccaaccatttgaaagattcgaggatatactcttccgctcccggaacaaaccggtgagaatcagtatcctcaatacgaaatattaagtctccgccgtgttgacgcgcaaatagataattatacaaagctgtacgcacaccaccaatgtgcaatgctcccgtaggactcggagcaaaacgaactcttacttttctttctgccataatttgggttagtataggtaaatcgcggcaaaattaaacctttttttccacactattgtttttttttgtacttttcgcaaaaatttcagtggatatggaacatttgaagaaaaaaaagagcttttcatggaaagatttgtcatataaatcgctgctattcataggtactgtggcattgattgtctatttcctgccgcgcgatggcaagttcaactatcagtttgatataaacaagccttggaaatacggacagttaatcgcaactttcgattttcctatttataaagatgaagcgatagtgaaacgagaacaagacagcctgatggccctcttccaaccctattatgagctcgacaagaaagtcgaaaaggaggcgatagccaaactaaaagagaactatcatacgaacctgaaagggattcttccttctacagattatttacgctacatcgaacgtacgctgaaagagatttatcaggcgggcattgtatctaccgaagctatacagcaactttacaaagatagcacatccgccatcatggtaatagatgacaagttggccaattcgcaccccatcgaaggtatttacacggtaaagaaggcatacgagtatttacttacggcagactccgttcacttcaacagggaaattctacggcagtgttcgttgaatgaatatatcagcccgaacctcacttttgacgaacaacggactcagacagccaaagaggagatactgaacaactattcttgggcaaacggtttggttgtgagtggtcagaaaattatcgatcggggcgagatcatcagtccggaaacttataatattttggaatccctgcgtaaagagtccatcaagcgaaacgaatctatgggacaaagccgtctgattcttggcggacaaattctgtttgtcggcatgttaatgctttgctttatgctctatcttgatttgttccgaaaagattattatcagcgaaagggcagtctgtcgctactctttacattgattgtattttatagtattgttacggcttttatgatgacacataacctattcaatgtgtatatcattccgtatgcaatgctacctattattatccgcgtgtttcttgattcgagaactgcgtttctgactcatgtcatcacaatattaatctgttccatatcactacgctttccacatgaattcattctcactcagctagctgccggtatggttgcgatattcagtttgagagaactgtcacagagatcacagcttttccgaacggcattattagtcatactgacctacgccgctgtttatttctcttttgaactgatgacagaaaacggacttgccaacgatttctcgaagttgaatatacggatgtatacctatttctttatcaacggaattttattgctgttcgcctatccattattattcttattggaaaaaacgttcggatttacttccaacgttactttggtagagctttcaaacattaataacgacttactgcgtcaaatgtccgagactgtgcccggaacattccaacactccatgcaggtagccaatctagcagcggaagcagctatccgtatcggcgccaaaagtcagttggtgcgtaccggagctttatatcatgatatcgggaaaatggaaaatccggctttcttcaccgaaaatcaatcaggaggagtcaatccacataaaaatctaggttatgaacaaagtgcgcaagtagtcatcagtcacgtgacagatggattgaaacttgccgacaaacataatctgcctaaggttattaaggactttatcagtactcatcacggacggggaaaaacaaaatatttctatatttcctggaagaacgagcacccggacgaagaactgaatgaagaactgttcacctatcccggtccgaatccattcaccaaagagcaagccatcttgatgatggcagacgctgtagaagctgcatcacgcagtcttccggaatatacagaagagacaatcagcaacctggtcgacaagattatcgattcccaagtcactgaaggttactttaaagaatgtcctatcactttcaaggatatagccactgtgaaagccgtattcaaagaaaaactaaagattgcttatcacacccggatcagttatcctgagttaaagaagtaagcagccccgcacaagcgtcttcaagtatgtcaagcacatattcaaagccctcagcccctccataataggggtcggggacatgatctgccgggatacgagtacagtactccgtcatacgatgaatcttcttccattcttccggggaaggagatttgtctttcagatcatctatgttccggtcgtccataccgattatcagatcaaaattataaaaatcttccgtacggacaggacgcgaacgatgtaccaattgataaccgcgacgagccgcgtgagcacgcatccgactatccggtaattcaccctgatgataagacaagattccggcagaatctatcacaaactctttctccagtcctgcttcttttatcaaatgaagcattacaccgtcagccgtagaactacggcaaatatttcctaaacagacaaataatattttcttcattttcattacattgggtctacatcataataaactatcaaagatttatagcgttcgtcttcgatcatttccctctgaatgcgtagtagaagctcccgtgcacgtcccatcggagcattctgctcaatcttgacgacaatctttttgataaacaacgtttggatacgggcaacaggaggtttatccggccccaacacccgattgccaaataccgcccgcagcttatccgccatcactaccgccatctgatccaacaacgcttcattatgatttttcagataaacatataccaaccggtaataaggaggataatggaacatctgccgttccgccaactgcccgcctaccatgtcttcataatcattggcaatgacctgatgaatgataggatgctcgatgctcttggtttgcagcaccaccctaccccgcttgttcttacgtccggcacgtcccgctacttgcgccatcaactggaaagcccgttcataggaacggaaatccggataattcagcatcgtatcggcattcagtatacctacaatactgacatgatcgaaatccaatcctttggaaaccatttgcgtgccgatcaatatatccgtctttccctgttcgaaatctgcaataatcttttcataagcagagcgggtgcgtgtggtatccaagtccattcgtgccactgccgcttcgggaaaaaggattttaatgtcatcttcaatcttttccgtaccaaagccacggttcaccagttccgtaccttcgcaggcaggacaggatttcggcagttggtaggtataaccgcaataatgacaggttagctgattgattcctttatgataggtaaggctcacatcgcaattcttacacttgggcacccaaccgcaggtacgacactccaccatcggagcaaacccgcgacggttctgaaagagaatcacttgctcttcctgttccaaagcctctttcatgtattgtatcaagagcggagagaattgtcccaccatcctctttttgcgatgcaattcctttatatctaccggaataatctccggcaattgaatttctttatatcgttcttttagttgtacaaaaccatatttcccctcccctgcattctgccacgactcgatggaaggagtagctgttcccaacagggttttagctccgtacatggcagccagcacaatcgctgcgctacgggcatgatagcggggagcaggatcttgttgcttatacgtattttcgtgctcttcgtccacaatcaccagtcccagattccggaaaggaagaaacacggaagagcgaacacccaggataatatcgtacccgttctctcccagttgtttccgccatatttcaacccgttcggcatcggggaatttagaatggtagatccccaggcgagcaccgaagacccgttgcagacgctctgtaatttgagtagtcaaggcaatctccggcaacaaatataagacttgttttccctgacgaatcatttcttcgatcagatgaatatacacttccgtcttcccgctggacgttactccatgaagcagacagacatttttctcctgaaaagactgaactatctcatcatgtgcccgttgctgaaactcgttcaaggcgttcagttcgaccacttctttctcctgtttattcaaccgtccgatttcgtgatagtagatttcgaaaatcttcttatccaccagcccgttcagtaccgaaggggccacattagcccgttgcaacaattctttcttagagacttctttcggagttccggttcctaaaatacctgaatactctacatatttcatgagcaacgccagttgcttcggagcacgagacagaatatcaaacaaaatatggagttgcttttcatctactgtacccgcaagccgcacccgtgcctctgtcttaggcttataagtacgtttcaattcttcctttacaaaaatggcttctttatcgagcagagacttgatggcggtaagaatattttttatgccgctgtctttctccagtttagtgacggactgctgcgcatctacggcaagtaaatccaaaatgcgttgttcccgttccggcaatggcgcatccgcctcaaaatcgggattatattcaacaatcgtttcactctccaatttcagaccggaaggaagcgccgctttataaacatctccctgtgtacagagatagtaatcggctatccattcccaaaatttgaactgaacgggtagtaaaatgggagaagcatccagcaatgcagatatatctttcacttcgtaccccgttggagcacaataatgaacgttaaggacgatagccgtataaaacttctttcgcccgaaaggaactaccacacggcagcctatcttcacatcttccgcatattcgtccggcaaagagtaagtgaaactcttcggaagcggaagcggtaaaatgacatctacatattttttcattgcaggtacaaaaatacaataaaaaatgaggaatgaaaaatgaagaaaaagagaacactcaaaagaaaaacgtttcttaggacaggaatgggcgaaaactgtttcgggagtgtaacagatagccccgaacaaaaaaagagttcccactgagcagaaactcttttttatatacaatgaaaaatgacaggctgattaaaaaatgtaggctacagacacctgccaagtcttggttttataagagccgccagtatcaatatcagcagtatcccccaatgggatattgtaattagcccctacctgcaaatgattcagcaacttcaaacctgctcctacattaatacctacttcagctttcttcttatcgatccctgttttcttttcaaaatcgaaataaaaatcaggacctgctgctagataaatacctgccaggtttcccaacccgatagtatatttcagatttacaggaatatcaatgccgttctgtttaacggttatatctccatcttcatcagagaccttgatacctctttgagcgaaaagcaaagaagcatccactcccaatcctacaattggaatagtaaactcggccatcggcccaataaagaaaccggtgaaattatcctttttaaaattatcacctacattagagagacttgcctttgacaagttcaaacctccttttacaccaaagtgtatttgcgcctggacaggcatcaccatgccgaaacatacggcaatcattaaagcaccaaaaatctttttcataaattcacgtgtttataattcgggaacaaagatatacatcttaaattaaagaaacacaaattatcgtttttttgttcacttgtaaacatcggcaatcaagggtaatttctgtttcacactgaaaggccagggtttccaacacatgaaactatcattatgaaaataaatcattcaacgcttcgctcatactgggatgagtaaagatgaagtcacgcagaaaagtataatccagccctgccttcatggcaatggcaaccgtattgataacttcaccggaatcgggtgcaaaaagcatacaacctaatatctttcccgtgttcttatcaatgatagctttcagtaatccgtccatctcccctaatgttttcgctctcggtatagccatagcgggcagcttcttcacaataatatccaagttctgcttgcaggcttcctcttcatttagcccgatacgcgccaatggcggatcgataaaaacagagtagctaacaggattacggtcatttgtctttcgttccttatctccgaataaatcctcacggacaatccggtaatcatccaatgagatataagtgaactgcaaaccacctttcacatcacctacggcacgtatattgggattggttgttttcaaatattcatcgacaatgatagcaccacgcacatctacttctactccagccgcttccagattaagacctcccgtgttaggtctgcgacctgtcgccagcaatacggcttcggcgtcaagttcgaataccccgttagtctgcaaatcagtgaaggcgacgattgccttgtcttcctcgtgcttcaccgactgcacctttgcattcatccggaaaacaatgccttttttctccaatgtttcttttacgcttgccgcaatatcgcggtcttcacgggcaatcagttcgggatagctttcgagcacagtcacttgcgaaccgaacgaagcatacatggacgcaaactccagcccgatataaccgccgccgacaatgaccagacggcggggaaggtttgtcagttccatgattgaagtactggtatagacaaaaggattgtccgtcactccgtcaatgggtggaatgaccgtttccgctcctgtattgataatgatttgtttggatgtcagcaggatttcttccgtagccgtgcggactgcgaccgtatcggaagaaacaaacgagcctgtacctgtataaacagtcacattgggattgtccgccaagttatgatagttcttgtttcgtaatgcaccggttaccgtttctttcacggcaatcgcctgccggtaaaaatcacttttctcctcaaaggcggtctctttcctgccccaagctatttttgcctgatgtactaacgtctttgtcgggatacatccgatattaatacatgtgccaccatacattttttcggaacgttcgataatagctaccttctgtccgcgttttgcaaactctgcagcaagggtcttcccgcctttgccgaaaccaatgattataacatcaaatacattcatattcctatctttttataagtttaaaatcagctttttcagtttgtttcatttcatattgcaaaggtcgcttctttcgaggtaacggacaataacgattttgccgaataagttagcaattattcctataacatcataacattaaagctattaataaaaaaaagaatttctatctttgcatcagcactcaaaaaaacgtactactatgttctttctgcaaaaatcactttgttttatcatctgcctgctctggttcagtttaggatttgccggaatcaacaatccgttaatcatcaacttcagcaaaacacaatatggcgcagccaacaaaaactggtctatcagtgaagacgagcatggaatactctattttggcaatgacatcggactgctcgaatttgacggtatcgaatggaaattgaacaagctccccaaagcagaagtagtgcgttctgtatatgctgtttcaaacaacgaaatctataccggcggttacgaagagttcggtaaatggagtcggcagcccgacggggaactgacttatacctcactcagcaaagaactgccgacagacaattggcagaatgatgatatatggagaatcctaccgcaaggggaatccatctattttcaatcattcagcggcatcttccgccaccacctgccgacaggaaaaacagagaaaataaccaaacaggagaattttcatttcctgatgcaagtcggcagtgagttatggatacaggaaacacataaggggctgctccgtctgcaagaaggtcgtttcacccttatcccacacagcgaactattcctgggcaaagaagtgaaagccgtgcttccctatgcggaaaaccaacggctgatagtcacttcgaacagcggcttattcatatatgatggagatacgttcagattactgagtgacgcaccggaatggattaattcaaacatcaattgcgctattcaaaaggagaacggtcactatctgctcggcacgattctcaacggagtatatatgatagacagacaagggaagattatcaagcatatcaactctgacgcctacatgcaaaacaatacgatcctgtttcttcacgaagataagtatcataacacctggctggcactcgacaacgggattacctgcatccagatacttcccgaactcagttgctacaccgatcctacgggcaagaccggtgccgtatatgcagccgcactttttgccggcaaactatttatcggtaccaaccagggactcttctatatcagccaaagcgatctgaacaatatcaacgcattgcctggcgacttgcaaacaatagagaacattaaagagcaaatctgggatttaaagattatagacggaaagttatattgcggttccaacagcgggttaaaagtgattgacgaacaactgacagttactactcccatcaatgcacaagggggagtgtttaccattcttgccaaagagcattatctactgttaggcacatacgcatccctgaaaatcgtagatactcgcacacaacgaatcattcttgacgacattcgccagcctatcgtcaacatccaggtagaccatctcgacaatgtatggttggagcacatgaacaaaggagtttaccgttgccagctttccgaggacatgacaaaaataaaaacttcggaatactacggcgaagaccgggaactaccctacaagctccaccttttcaaaatcggcggaagagttgtcatgctgggcggaaattccttttacacttataatgacataggcggcaaagtagaactgtacgaaccgttgaaacattgcctgagcaacctgacggaaataaaaaatgtatccgacatagacaaaaaccatttttatgtaatgggagataatgtaatctaccgcattgcccacgacggttcgcaaaaccatatagaagataaaatagacatcaactataacggcatgtccatggtcaatcatttcgagcggattatcgccctcacggattcaaccagcctcatctgtctggacaacggctttctgctctgccccaacaatcagcagcaaaatgtcatttcgctgtccactccttatatcaaatccttttccgccttgtccaaaacgggagaagcacttcataaggaaagtgaacatgaggctatcaagattccatttaccaataatacgatagaaatcagattcgcaacggatgacgtactggcacacaatgtatctttccaatataaactggaaggaatcagcgaatggtcggaaccggaaagaatcaacaaagtgacctacgaacgtctcccaaaaggaacctatacctttttattacgttcgatagataatctggggaattgctctcccacactggaatatacgttcaccatcctttctccgtggtatcagactatctgggcaatactgggctacttcatcatcgcattgctcgtgttgcggatagtctggatactcatcctgcgccgttaccggaaccggcatctgataaaaatccgccttcgcgaagcgaaaaggctaagccggatgaaccagcaactgcaaaaccaaatcaaggagaaggatgccgaactgctttcgcagacttctttcgtcatccagcgcaacgagcttatcacgcagatgaaagatgaaatagaagagttctatcgcacacataacaacaaagcgctcgcaccgctcttccataaaatcaatatgcttttcaacaacaacctcgacaccgaggaagactggaaaatgtttcttatcaagtttgaagaaaaacataccggatttttcaaacaattaaaaacgctttatccgcaactgactgccaacgatttgaaattatgtgcctgcctgaagttgaatctggattcaaaagctatcgcggccctaatgaatatttccgtacgtgcagtggaaaacagccgttaccggttgagaaagaaaattaatatcccgcccaatgagaatctcaacgatttcttcttgaagttataaattcgttatatcactcatttaatgcacattacaattgaatgagaggtaataatgaggtcgcttaaatgttaaaaatcaaagcgatgtatccgtagtgagcctgtttttagcaagtataaattcatactttctacatttgccattgtcaaaacggacgaatcgggaagcgtacgagcccaacaaagttttgacaggattttaatgttaaactaaaactaataatagaatgaaagaccaacttacccattcattttgtaaggacatctctctattaaagaaaggacttctattaggatttttcttattggcagtcaccactctatccgcacagatacgggagataaaaggtatcgtcacatcagaaacaagcgaaccactacccggagtagccgtgcaaatagatgcttccggcaccggaaccgtcaccaacatagacggtcagtatagcatctctgcccggaaaggcgataaaattactttctcctttatcggaatgacgtcacaaactatcgtagtagacaatcgtactactatcaatgtcgtcatgaaagaagaagcttttgcattggaagaagctgtcgttatcggctatggcagcgcgaagaaaagagacttgaccggttctatcgaaacagtcaaagcggctgatatagccaccaagcctgccagcaatccgttggcttccatccagggaaaaattgcgggtgttcaaatcgtcaataccggcagggcgggtcaagacccggaaatcagaatccgcggaacaaactctatcaacggatatactcccttatatgtagtagacggacttttcacggataacatcaactatctgaatcctgctgacatcgaatctatggagattctgaaagacccgtcttcactggctatcttcggtgtacggggtgcaaacggcgtaattatcatcacgaccaaacgcgccaaagaaggacagactaccgtcagcatcaacgcttcggtaggtttcaaacatatcggcgaccgtgtggaacttaccaatgccgcccaattcaaggaattatacaacgaacaacgtaataaccagggattagacccgttcgactataccaactgggcagccgacaccgactggcaggacgaaatcttccaaacgggcttcctgaccaacaacaatatcagcatcaccggttctacggataaaagcaagttttacatgggacttggctacaccatggaagaaggttctatcaagagcgagaaactgaacaagctgactatcaatctgcacagtgaatacgaaatgactaagttcctgcgtttcggcttccagattaacggtgtacgtatgcttccgccggacgctaaaggcgtgagcgcagccatcaaggcagcccccatcgcaccggtagccaatgaagaaaccggacttctgcaactcttgccggacttccagcaggcacaggtatcgaacccgatgattgacgtgaagtacagaggacagcataacaaggccatcaactaccgcatggcgggaaatatctacggggaagtggacttactgaaaaacctgactttccgtgccacattcgctatggactacagttccgaccagtcacgcctctactctcctatcatctacttgtacaatgcagataaaggagaaaaagaaaatgtaggcgaacgtgaaggcatcacacagaaaaaattgacaaacatggctgcacagtccgactatgtactgacttataccggaaaattcggcggacacggtattacactgacaggtggtatgacaaccaactacaacgaatattcctcactggatgccggcagaagccagaaactgggcgacggcatcagcattggcgagaatgacgacaaatggtggattaccactatcggcgaccagtccactgctacaaacggcggttcacagtacaaacgctttaccatgtcttacctgatcagggcactgtacaattaccaaagccgctacctgttcaacgcttcttatcgtcgcgacggttcatccgtattcaagcgtaccggaaacacatgggataatttctactctttcggcgccggatgggtaatctcggaagagaattttatgaagcaccagtctgtcatcgactatctgaaactgaaaggttcatggggcgtgttaggcagccagaatacaggcggctataactatccggcttatcctacaatcgtcaactccggctctgccgtattcggtgacaacatcgtcgaaggaaaaggactcgcttacctggcgtcgcagacattaggctgggaacgcaactattcatgggaagccggtttcgaaatgaatcttctgaaacaacgcctgcgcctgtctcccgtttattataacaaaacgaccaaggatttgctgacttccgttcccggtatttcgggctctactcccggattggaaaatatcggggaaatccaaaacagaggatgggaactgaccgcttcctggaatgaccgcatcggcgaggactggagttatggagtcagcgccaacctgaccacgatagacaataaggtaaaatcactggtaaacaaggattatgccatcgtatccggtccatcaagagtatcccaggggtatcccatcggttacttctacggctaccaggtggaaggtgtatatcagaataaggcagatattcagagctctcctaaaaatacattgagtaccgtagcaccgggtgacctgaagttcaaggacgtagacgggaatggtgagattaatgacaaagaccgtactatgattggtaatccgacccccgatttcacctatggcctgactatcagtgccggatacaaaggattcgatttcagtatggacatgatgggggtatatggtaatgagatttaccgtaactgggagtcggacgaattttcccaaaacaactattcgctccgccgcatgaaccgctggaacggtgagggcacttccaactgggaacctatccttgacccatcgagaagtatcaaccgccagaattcaagttacttcatcgaagacggcagtttcttccgtatccgtaatatcgaactgggatatacgtttaacccgggcttattgaaaaagatttatctgaaatcgctcaggttatatgccaacgtacagaacttgaaaacatggtcgaaatgcagcggatacactcccgaaatcggtggtagcgctacttccttcggggtagacaacggcacttatccgatgccgaccgtttataccttcggtttgaatcttactttctaatttcatttctaaagttatatgactatgaataaaaaaagaattctatatatagtagctgcctgcactttgtcattcgcccaaatgggatgcagcgatttactggaccaggctccgcaaggagaacttatcgacaccgacctcgtcggtggtacgtacgagagcgaaatattcggaatgtacgctgccatgcgcgactatgccctgacatcgggaacaaccgcacttgccatccacagcttccgttcggaagacgcggaaaaaggcagtacatcgacagacggagcgggtgccgccaagatgtatgacgagttcaattatgacgcaagtgacggtatgttgcaaggttactggagcgccaactacagccttatccacaaagtgaatacactgctcgaatcaatgaaagcgggcaatctgacggatggtaatctcgtcaataaggcggaagcactcttcttccgggcttattgctacttcaatctggtgcgtgcattcggtgaagttcccttgattgactttaagattaaccagtcatcggatgccaatatccccaagtcgtccgtcaacgatatatacgcactgatagaccgggacttgacagaagcggaaaagtatctgccccgcacgtgggaaagcaaatacatcggtcgcctgacttggggagccgcccgttccctgcacgctcggacgtatatgatgcgcaacgactggtctaacctctggactgccgcaacagatgtcatcaactccggaatatacaatctgaatacgcctttcaacgatatattccgcgaatctggtgagaattgcagtgagtctattttcgaactgcaatgtaccgccacctcttctttgcccgaaagtgaagatataggtagtaaattcgcattggtgcagggcgtcagaggttccggtgaatggaatatgggatggggttggaatacaccgaccgagacattggcgaatgcctttgaagccggtgatccccgcaaagatgaaacgctcctgtatttcataaaggtaggagaatctccttcgttaattcctgccaatcaaccttataatgagaagccggttgccacaaatgatgtgattgccaagtatttcaataaaaaggcttatacgaaccctacttatcgcgctaaatataccaagttcggtttctggttcaatatccgccttatccgctatgctgatgtagtgttgatggcagcagaagcagccatcgaacagaacaacacgaagtctgccaaagattatctggagatggtacgcagccgtgccagaggtaagaatatcaatatcctgcccaaaatcacgacagacgaccaggtgaaactgcggaacgctatccgtcaagaacgaagagcggaactcgctatggaattcgaccgtttctacgacttggtacgctggggaattgcagaagatgtattaggcagtttcggttatcaaaagaagcatgcattattgccgctcccgcaagaagaaatagacaagtctaacggcgtattgaaacaaaatccagattacctataatatattaaacgactattgatatgaaaaaatatatatattcatccatcgctttgtttctcctcggattcatggttcagtcctgtttccaggatatggaccacccgggtttcgattatccggaagaactgccggaaaagccttataacccgatgaagttgggattggctttcgaggataatttagaggacaacagtatctataacttcggcattaccgccaacggcactccccactttgcggaaggtattaacggtaaagcgtatcaaggtgcgacagatacttatatggtagtcgaaactccggaagcaatgaaagacagtattgagaatttaggtagtttcactgtctctttttggatgaaagctaccaaatgcaataaagcgaccggtatcttcgggatatccaataccaaacagttctggggtaatttggatatctatcttgaaagtcattcggaaaacgatacgcaagcctttttcaaagttcatctgcgcaacggcaatgccgaacgaactgaagagtgcaggatagatgatgtgtttatcaatgactgggtacatctttctttcaaatatgatgagacaacttccaaactgactgtttataaaaatgcagaagagattctttcaaaagctctttctgaaggcgaagctcaaaatataatttccggaaagctcaaattcagcgatgtggggaaactggttatcggaacattgcagtttcaaacagtacctagtttgacggaaggcgctactgcccaagattggggcgcacactacctcggcgcactcgaccagttccacttttacaacaaagctctcaaaaggagcgagatacgaaatctatatgtaactaaagactaagtatgccatgaaaaaatatttatcattcactcatattctatttattatcatcgcattactaacctcttgcagtgacgataatgaaacaataaccaccgatttccgattaacaactatcagtatcggtgaacaacagaacttatcggcttttacgaatgttgacccggaaagttccatcgtacttcaattctcggatgcagtagatgaatcgaccgtcgcaaagaatatccgtttcatcgaattggacggtgaagatgagtttgaactaaaagttaattatcagatggatgctgataataagaaactgaccgtcactccggtaaatgcactcagtaactattcggattataagtttgttgtgtatccgggaataaaatcagcagtcggcgaacccatctttacaggaaaagtgtatagtataaaaacaggaatggaagattccgacaagtttgaccgtattgatgacgaagagttgttgacgctggttcagagacaaacattcagttatttctgggatttcggacatcctgattgtggtatggcgcgtgaaagaagcacttcaacaaatacagtagcaaccggtggaacaggctttggcgttatgtcaatcatcgtggcggcagaaagaaactttatcagcagggaagcggcattggaacgtattcagaaaattgtagacttcttgggcagatgcgaaagttatcatggagcttattcacactggatatatggagatagcggtttcatacaaccgtttagtgatattgacgacggagtggacttattagagacatctctcctttttcagggattattgaccgccagggcttattttaagaacggcaatgaagcagaacagaagctctgtgcagacattaccaaattatgggaagccatagattggaactggttccgcaaagaaagctcggaaaatgtgctctactggcattggagccgcaatcatggctgggagatggacttgaaaatcagcggttggaacgaaggtttgatagcctatgtgctcgcagcttcttcaccgacaaaggctattgataaggttgtttacgacgaaggatgggcgaacaacggcggaatgaaaaacggaaaagtttattatgactatgttttgccgctgggtacggataacggcggtcctcttttcctttcccaatattctttcttgggaattaacccgaaaggcctgacggacgcatatgccaattatgaggaacaaacccggaaccatgcattaattaactacaattattgtgttgacaatccgagagactatgccggttatggcgagaactgttggggattgaccgccagtgacggtgataacggatacagtgcccattctccgaacaatgataatggtgtaatcgcccctaccgccgccttgacttccttccctttcacaccggaagaatcaatgaaagccctgcatttcttctattacaaactaggagataagatttgggggaaatatggtttcgttgacgcattcaatctgggcaagcaatggttcgacaaagaattcatcgctatcaatcaaggtccggttatctgcatgattgaaaactaccggagcggactgttatggaacctcttcatgtccgacccggatattcagaacggaatgaagaagttaggatttagcagcccggacttaaaataaacaattcaataggtaaaaaacagatatgaacagaatcctcactattctagtatgcttgaccgctacttgctgcatccacgcacagggcggaaagaatgaaaagatggaccgatttatcgaccaactcataagcaaaatgacattggaagagaaaatcgggcaactgaatcttcccagtgccggagacatcactaccggtcaggcaaccagcagcaacatcgccgacaaaatccgtaagggacaagtcggcggcttgttcaacatcaaaggagtgactaaaatacgcgacgtacaacgtattgccgtagaagaaagccgcttaaagattccattgctattcggcatggacgtgattcacggatacgagactgtattccccattcctttaggattggcagccacctggaatatggaagctatcgagcagtcggcacgcatagccgccattgaagcaagtgcggacggcatctgctggacattcagcccgatggtggacatcagccaggatgcccgttggggacgtgtctccgaagggaatggagaagaccctttcctgggtggtgaaatagcgaaagcgatggtacggggatatcagggagacaactcatacacctcaaataaccatatcatggcttgtgtgaaacattatgccctgtatggtgccggtttcgccggaagagattacaacacggtagatatgagccgcatccgtatgttcaacgaatatatgtatccgtataaggcggcgatagaagccggtgtgggaagtgtcatggcatctttcaacgaagtggacggcgtgcctgctactgccaacaagtggctgatgacagacatattacgcaagcaatggaaatttgacggttttgttgtgacggactataccggtatcagcgaaatggtgccgcatggtatcggtgacttgccgacagtatcggcacgtgccctcaaagcgggaattgacatggacatggtgagcgaaggatttttgactacgttatcccagtcactgaaagagaataaagtcaatgtggaagagatagaccaagcctgccgccggatactggaagctaaatacaaactcggtctttttgataacccatataagttttgtgaccccgaccgtccggctaaagagatttatacccgtgaaagcagagagattgcccgcaagattgccgctgaaagttttgtattactgaagaaccagcaggaagtacttcccttaaagaaatccgggaaaatcgccgttatcggtccgctcgccgatacccgttccaatatgccgggtacctggagcgtagccgtggatttgaacaaaccgatgactctggtggaaggaatccgggaagtagctgggaaagacgcacgcgtactctatgcaaaaggcagtaatctgactgccgatcctgagttggaaaaaagagctacgatgttcggcagagaattgggcagagacaaccgtacggataaggaattgctgaatgaggcattgaaagtggcacgccaatcagatgttattgtggcggctttaggcgaatcttccgagatgagcggtgaatcgagtagccgtaccgacctcaatatacccgatgtccaaaaagaactattggcagaactggcaaagacaggcaagccggtggtactcgttgttttcaccggacgcccgttaacgctgacttgggaagagaaacatattccggctattctgaatgtatggtttggcggtacggaagcggctccggctattgctgacgtgttattcggagatgtaaatccgagcggtaaactgactatgagctttccgcaaaatgtaggacagtctcctttattctacaaccataagaatacaggacgccccctggaagaaggaaaatggtttgagaaattccgtagtaactatcttgatgtaagcaatgaccctctctatcctttcggcttcggactcagctacacgcagttcgaatacagtaatctgcaactgagccattcacagcttcggacagatggagaattgacagccaccgttacacttacaaacacagggaaacgagacggacaggaaaccgtacaactatatatccgtgatgtagtaggaagtgtcacgcgaccggtgaaggaactgaaaggattccaaaaagtattcctgaaagccggagaatcaaagaatatttctttcaaaatcacaccggagcttttgaagttctacaactacgacctcgattatgtttatgagccgggagagttccaagtcatggtcggcggcaacagccgggatacgaagatggcaacattcacgctactggaagaggagaaaatctcggaagaagcattgctggatagcgtacaaagacgcactttcgattatttctggaatggagcggaaccggtgagcggaatggcaagagaacggttgaatgtggatagcaactatccactgaacgaccggcatattattacttcaggcggcagcggcttcggcattatggccattattgccggaatagaacggaattacgtcacccgtgcagaaggatttgcacgaatggaaaaaatagtctctttcttagaacgggccgacaagtttcacggagctttcccgcattggtgggatggagagacaggaaaaataaaaccgttcagtcctaaagatgacggtggggatttggtagagacagctttcctcgtacaaggtctactaacagcacaccaatactatgcaaatggcaacaaagaagaacgggaacttgccgcacgcatggataagctgtggagagacgtggactggaactggtataggaataaggagaatgtacttttctggcattggagtccggaacatcaatgggatatgaatttccgtgtacgtggattcaatgaatgtttgattatgtatattttggctgccgcttcacctacacacggagttccggcaaaggtttaccacgaaggctgggcggaaaacggcgcaatcgttaagccgcatacagccgagaacctgccgatgaacctaagatatcagaccggcaacatcgggcctcttttctgggctcattattcttttctgggacttgacccaaacgggctgaaagaccaatatgccaactacttcgatgaaatgaagaactatacgctggctaatcgcgcttattgcatccgcaatcccaagaattacaaaggatatggtgaaaattgttggggactgaccgccagctactctgtcaaagggtatgccgcacatgctcccaatgagaaagaagaccacggagtcattagtccgaccgccgctctttcttccattgtttacacaccggaagaatctatagacgtaatgaagtacctgtatcagaagaaggacaaaacatggggtgactacggtttctacgatgccttcagtgaaacggagaattggtatccgcaacagtatcttgccatcgatcagggacctattgccataatgattgaaaactatcgttcacaactgctttggaacttgttcatgcagcatcctgacatacaaaaaggattgcgcaaattaggattcaccagtccacatcttgataaaaagaaataaataaaattgattctatttccacttgctaaaatcacatgagttcgatataagaataaatatatttcacttataattagaaacatagcgataaaagtattaaattt

SEQ ID NO: 11876 - DNA, 9836 bp, Unknown
  gut microbiota DNA sequence
atttattgtatggccgatgatttttacaaggaatttacatttcaacaggaaaaatatataattaaggataagaggcccaagcatcgtaacaaacccaaccgtatgagtgatgcagagattatggttgagggtgtgtcaaaactaaaatgactactctaaaaagttacagattgtaactaacaattataaaagagccatatcaaactctgtttttgagtaatgatatggctcttttcatcattgatttagggagtcaagtttcagattaaaagttgtcctttcatcaaattacgttttgacacaccctctatttgctttgatgtcaaccatatttcttcagtagatgtacggacaccacatcagcagatacaaaagaacccacacctgtataaactgttacattaggatgatctgccaaattatggtaattcttgtctctcaacgcacttgtcacagactccttcacagcaatgtcattgcgataaatctcttctctcttcaaatgtcgagttcttcataccggaagcaattttagcctgatgagccaacgtctttgtcggaatacagccgatattgatacacgtctctccatacattttatcagaacgttcgacaatggcgactttccacccacgttttgcaaactctgccgcaagggtctttcctcccttaccgaaaccgataataataacatcaaatgtatttatatcttctaattggttcgaaatttacttgtttagtttacaagaaatgatattgcaaagttcgccactttcgaagtaataaacaataaccatttcgccggataaattagcaattattcccgtataaaatcaaagtaatacatcatcaaaaccaccggaacagatcaacgatccgctcggcgatttctcatcttaaaccaattccacttactataaataccaatcaacgatttgggtgaatatccaacttcaccggcttaatcatattctccggtttcagaatggtatccaagtcttttttagaaagaatattgtgctccaatacaagttcatacactcctttccctgtctctaaagcttcttttgctattttagtagagtttttataaccgattaccggattcaaagctgtcactaccccgatactattatgaacatctctacggcacttttcttcgttggcagtaatgccgtctacacataaagtacgcaaagtatcaaaaccattcatcaacagatcagcggattcaaaacagcattgcgccatcaccggctccattgcatttagttccatctgggcagcctccccactcattgtcacacaaaggtcgttacctattactttataggcgacctgattcattacttcaggtattacaggattcacttttcctggcatgatggaggatcccggctgcatagccggcaaattaatttcgcccagcccacaacgcggtccggacgctaacagccgcaagtcattacatatcttattcatctttacagctacccgcttcatcgctgccgaataacccaccatgcaagaagtatccgaagtcgctccaatcaaatcatccgccaactttatatccagccctgtaatcttacacagagcctcaatacacatttccgcatattccggctcggctgtgattccggttccaatagctgtcgctcccatattgactgtcagaaaatcctgtgcggcaaaatccaggttcttcacttcctgctccagaatatttgcaaatccattaaaagtttgtccaagcgtcatcggtaccgcatcttccaattgggtacgtcccattttgataatatgtgcaaactctttcccttttttccggaaagaagctatcaattctccaaaatgcttcaccaatttgagatgagtgtaatacaaaccaatgtgaatagcggtaggataagcatcattagtagactgggaacggttcacatggtcattgggagaacaatactggtattctccgcgccggtgtcccatcaattccaatgcacggttggcaatcacctcattgacattcatattcgtagtcgttccggcaccaccttgaatcatatcaaccggaaattgttcatgatgcttgccttcaagaacttccttacaagctttcaatatggcgtctgcctgttcttctgttaacaggtccaatttgcgattggcaacgacagctcccatcttcgtaatagccaaagcctgaataaacaaagggtattcgttcaagtgaaatttgctgatgcgaaaattttcaataccacggagtgtctgcactccgtacaatgcactttccggcacctcacgactacctatcaagtcgctttctgtacgagtttttgttgataaattctgtttcatatcggttgttttataacaatgacattttagttagttcttataataaccaaccagcaaggttattgttttaataaatatgcaaaaaccattcaataacttttttgttcttaatacaggaaaaagaaagtacaaagaaagaaatcacttatctttgtctttaaacttaacgcaataaccttatgatattacaattagcatttgttctgactgccattattattggtgcacgcttgggaggaatcggtctcggagtgatgggaggaatcggattggcgatacttaccttcgtttttggcctgcaacctaccgctcctcctatcgacgtaatgttaatgattgcagccgttatctcagccgccgcctgtatgcaggctgccggcggactcgattatatggtgaagctggcagaacatttattacggaagaatccgtcacacgttactttgttaagcccattagtgacttacttgtttacttttgtggccggaaccggtcatgtggcctattccgtattaccggttattgcggaagttgccaccgaaacaaaaatccgtccggaacgtccgctcggtatcgcggttatcgcttcccaacaagcgattaccgcaagcccgatttctgcagccacagttgctttactcggactattggccggtttcgacatcactctgttcgatattctcaagattacgattcccgctaccattaccggtgttttggtaggtgcgttgttttctatgagagtgggcaaaaacctgtcagaagatcccgaataccagaaacgtctgaaagaagggcttttcaacgacaagaaaataaaaatcaaggatgtcaagaacaaacgttcagctatgatttctgttatcatcttcatgttggctactgccttcatcgtacttttcggctcttttgaagggatgcgcccgtcttttcttatcgatggtgaaatcgttactttaggaatgtcctctatcatcgaaatcgtcatgctgtcggctgccgccatcatcctgttgctaacaaaaacagacggaatcaaagctacacaaggctctgtatttcctgccggaatgcaagcggtaatcgccattttcggtattgcctggatgggagatacgttccttcaaggtaatatggcgcaactgactttctccatcgaaggtatcgtacgtcaaatgccatggcttttcggaattgcactgtttgtgatgtctatcctattatatagccaggccgctaccgtacgtgcactagtaccgctaggcattgcactcggtatctccccctatatgctgattgccttattccctgcagtgaacggatatttctttattccaaactaccctaccgtagtagccgctatcaattttgaccgtacgggaacaacaaaaatcggcagatatgtgctgaatcattcattcatgatgcccggacttgtatcaacggctgttgctatcggactagggttgctttttatacaaatattctaactatatattattaacctaaacttcattcagttatgaaacaattcaaaagatttggtctgatagcagtaacactactattaaccgtgacaatggcgtttgccgcaaaaccgaatattcatatccttgccacaggaggaacgattgcaggtacaggaagttctgccaccggaaccagttacacagccggacaggtggccatcggtgcgctgcttgacgccgtaccggaaatcaaagagatcgctaacgttacaggtgagcagatcgtaaaaatcggttcgcaggacatgaacgatgaagtatggcttacacttgccaagaaaatcaacgaactgctgaaacgtccggatatcgatggtattgtcgttactcacggaacggacacaatggaagaaaccgcttattttctgaatctaaccgttaaaagtgataaaccggtagtattggtaggcgccatgcgtccgtctaccgcattaagtgccgacggaccgttaaacctttataatgccgtagtcactgccgctgccacagaatcaaaagacaaaggagtactgatcgccatgaacggacttatcttgggagcggaaagcacagtgaaaatgaacaccgttgacgtacagacattccaagctcccaattccggtgcactgggctatgtactaaatggaaaagtattctataatcagataacactcaagaagcataccacccgatcagtatttgacgtgacccgccttacttcactccccaaagtaggtatcgtatatagctattccaatattgaggctgatatgatgactcctctgctcaacaacggatataaaggaatcatccatgccggagtaggtaacgggaatatccataaaaacatcttcccatcattgatagatgcacgtaaaaaagggattcttgttgttcgttcctcccgtgttccaaccggtcctacgactcttgacgcagaagtagacgacgctaaatatcagtttgtggcttcgcaggagttgaatccgcaaaagtcgcgtgtattgctaatgcttgcattaaccaaaactacggactggaagcaaattcagcaatattttaacgaatactaaaccctgactaacttatgaaaaaattgatttttatactgctcctcacgggcagcatacagggaatatatgcccaaaaagcagagaaaaaagacaaattctctcctaatactcctttatttgaggaactgacagacgtgaaaaagaatacagataagttcaacctttatctgaatatgcaaggtagctttgatgcccatttccgggacggatttcaagaaggtgacttcaatatgcaccaactccgcatcgaggcaaaaggtaatatcaacaactggctctcctaccgttaccgtcaacgccttaaccgctcgaacgatgcaaacggcatgattgataatcttcccacctctatagattatgcaggtattggtatccaactaaatgagcagttcagccttttcgccgggaagcaatgcgccgcttacggtggttttgaattcgatctgaatccgattgatgtctaccaatattgcgacatgattgattatatgagtaacttcatgaccggattgaatgttggttataatatcactcccgaccagcaactgaatctgcaaatcctaaacagccgcaacgattctttcgacagtacctacgggattacagaagacaccgaaggtaatgtacccgatctgaaatccgggaaaatgccgctggtatatacattgaactggaatggcaacttcaacaacatgttcaaaactcgttggtcgacctctatcatgaatgaagccaaaaatcataatatgtattattatgccataggtaatgaactgaatctgggtaagtggaacgcctttgtagatttcatgtattcgaaagaagatatcgaccgcaagggaatcatcacgagtattgtcggacatcaaggcggacataacgtcttcgacaccggttatctttccgttgtagccaaatgcaactaccgttttctgccaaaatggaacgcttttgtgaaagggatgtatgagaccgcatctgtcactaaagcctccgaaggagtggaaaaagggaattaccgcacctcgtggggatatcttgccggtatcgaattctatccgatggaaaccaatctgcacttcttcgtaacatacgtaggacgttgctatgactttgcttcccgggccaaagcattgggacaaacggactacactacgaaccgggtatccgtaggtttcatttggcaaatgcccgtattctaagcactgtaagatacaaaaaaatacccgatagcttttgtatagttatcgggcattttatatgttcagttctcagttaaaattaatactcttcctcgttaaagaaaaaatcctccttactaggataatccggccaaatatcttcgatactttcatagatttcgccctcatcttccatctcttggagattctcaataacttcaagaggagcacccgaacgcatggcataatcaatcaattcatccttggttgccggccagggagcatcttcaagttttgatgctagttccaatgtccaatacataattttgagtatttaaagtgaatactaaatttgtcttgctttctatttttcggcaaaagtataataaaatctatcatttccaactattatcccaaaatatttcgttattttgttcatcaaaattaattttccgggataatacaaacaaatagtctgacaatctgttgacaaaagcaaatacttcgggcgaaattgtacaagtttcggataaagccaaaatacgtctttcggcccgtcggcagactgtccggcagatgtgacaaacagatgcgccccgacttccacccggaataataaaggcacaaagctccggcaattgttcgtccaacttatctatttcatgttcaagactttctacatctccggaagttataatactcgcaggtttcaactgcattgtctcctgatcggtagcgagatgggagccgatagcaaacaacttatgctgaactcctaaaataaagtgacggtccgcctcatccaacagataggtgtacagccagcccaaattcgaattcagttcgtccactgtcccataggcttccaggcggatatgcgttttcggcacacgactgccgccaactaggctggtagtccccttatcaccggtttttgtatatacaaggctctttttcataattttcttttttaatcatctatataaggtaacgtacaaaggttctcagaagttgacgatataatgctgttttatctttgttttatcaaaaaagagtaaacccaagtcatacaaatcaaaagtaaccccaacccgctcgtcctccttcaattgattccaaagcgttttcatcttctttgaatagcaaattccctgcaccacaaacacacttttcaaagtaacccgctgcgcacaaatatgaaaaacttcttccatcagttcaggattctgataattattcatatataaaaaatcgaccggagtatctgcatccagaaacagttccgagaggtcggaagcaaatagataagaagcggaaggcttagccgactgcaaataaagtgaagccgtcgaaggctgtcccacttctataacagtggcaggttgtactttattcaccaaccggaacaaaaagcggtttatttttcctctactcttactccacccacattctctcactttctttctctgctcttcttgcaaagcatgatatgcataatagggtgtatactcataaatcacatccgttatcagactgaaagcaaaaggggaatgcacaccatatccgcaacgatagcgaaaacgggaaagccaaataaaaggtctttttatagaaagtagaagattcataaaacaaacgttcgttttttattctcggatacaaagatatgttttttatcgcaaagacagaatagtggcgcaagaagaattcaacaactgaatacaccccgattgtctaaaatttatctacttttgtaacgtctaaaaatattcgaagaatatggaaaacaagaatatgctacaaaagttgtttggattcaattcacattccatgcaggtaagaactgagattcttgcaggtattactacatttctgactatgtcatacattcttgccgtgaatcctagcatactgggtgtcacaggcatggataagggggcggtattcaccgctaccgccacagcttccttaatagccactcttattatggcggtatgggccaaacttccgttcgcgcttgctcccggcatgggactaaatgcttttttcgctttcacagtctgtctgggtatgggtaatacttgggaatttgcattaacagcagtgcttatcgaaggcatcctgtttatcctactgaccctttccaacttacgtgttacttataaaaaaagtaaaagggtctatgctatggggaatccttttgacaatgttgatcggcattccgatgggaattaccgaatttaacggaatcgtcagtatacctccctcattggaaccggtatttttcaagttcgacttctcaaaagtgctcaccactcaaatggcttttactgtgtttacattgttatttattgatatgttcgataccatcggcacgttggtcggcgtatccaacaaagccggaatgttggttaatgggaaagtgccccgtgccaaacaggcatttatggccgatgctatcgggactaccgtaggggcaatgttaggaaccaatacggtaagcacatttgtagagagcgcatcaggcatcgctcaaggaggccgttccggaatcacttcttttgtaactgctatctgcttcggaatagccttgcttttcgcaccgcttttcctctccatcccaagtgcggcaacctgccctatcctggtgttggtcggtttattcatgatgtcacctatcaaagacattgatctggatgatttcacggaatcagttccggcattcatctgtatcattatgattccaatggcttatagcatttcagacggtattgttctcgggcttatcagttatgtactgaccaatctgctatcgggtaagttcaagaagatatcactcaccatgtatattctcgcagccctctttactctcaaatatctggtataagcgaaaaagataaaaaacaaatatagaaaaagagggtatgtcaatggctcattcgattccgaattttgacataccctctttacactcatctatttcaagcaattactgaagtctgaacattacaggcacagtatattttactcgaactttcttaccgttctgcactccgggtttccacttcggcatagaactgatcacacggacagcttctttatccaaatacggatcaacccctcgtaccacttcaggattcgttatcgtcccgtccttatctacaacaaactgaacaataacctttccttgtgagccggtttcctgtgaaatcatcggatacttgatattaccgcttaaatatttcattaaagcagccgtaccacccggaaactccggcataatctcaacgctgacatgaataacgtcttcaactaccgtttcggtttccaccacaggcggtatccatacaatttcatgaactgcattcatatcctctgatactgtagaaacctcatccgtcacctctatatcgttctttactatttctaatatgtctacgaccttattttcgggaggtggaggcggttccagtttctcctcagggaatgtaattggaactagctctgtcacaaagatggattcatcatctgatgatagtgccgcaaccctgacatcatgttgtgtccattcgaacgaaacgaacatgaaagcgagcgcaacaaccaaacccatcaacaaccaagaaccccgttgattctcaattgcagccttttttgatttcttggcttccataaaaaatgtgtttaagtaattaataatagaaaatatatag

SEQ ID NO: 11877 - DNA, 23950 bp, Unknown
  gut microbiota DNA sequence
catgcagcgacaccgttttcatagatcaatccgctaacagttcacccgaaagattgcaagaaagatacgacatatcataacctccccgatgattgagcgatttagtctgtacaatacgctccaaggaatcataatagctcacagaacaattaatagacacagcactatccccatacaaacacatatacaccgctcctgtgggcaaaccacggggaatacaggaggaaataggtgaaaaccctgaaacacaagagtcgcctaacaggaaaaccttgtgggcagaaaagagtgatgtatcaagaaaggaataatcatcataataattaattgccaacaatgtcggagacaccaaagagagacccgtcacactatatcccgaaccgccaagccccacggtatcacacaatcctgctgccactttcgccacatccacaacagaagtgatatacggagagatgtatatcgtctctttcgatttggatggagaccaatatctgaccgtgaagtacgtcagcaaatcagagaaagagggttgtatccgactcgtcagctacaacccgcatcacgaccccatggacctgcctctgaaatgcattcacacgatggctatcgtaaaattctcgatcaggaaaaacatgatgatgtaagtttcaccacagttttcaccacagagggcacagaggttttttccttttttttaaacctccgtgtcctctgtgtcctctgtagtgaaaaatcagatttcttcgcctttcagcgtagccgaactagcttccgtgatacgtacgttcacgaagtcgccgacacgatgtgtgccccgatcgaacactacgacacggttctgttccgtacggccgaacagctggtcacgcgagcgcttggagactccttccacgaggacttcgtacgtctttccgatacaacgctggttggactcggcggacagacggttctgcaaggcgataatctcgttgaggcgacgcactttcacctcttcgggcacattgtcttcaagatgtttcgaggcatacgttcccggacgttcggaatatttgaacatgaaagccgcatcgtatccgcactcttccatcaaagagagcgacatggcgtgatcttcctccgtctcggaatgaaaaccggagaagatatccgttgtcagtccgcagtcggggatgatacgtttgatagccgccacccggtccagataccattcgcgggtatacttgcggttcatcagcttcagaatgcgggaactaccgctctgcacgggcaagtggatatgcttgcacacattgggaacctgcgcgatcacttcaagcgtttcatcgctcatatccttcggatgggaggtcgtgaaacggatacgtacacccggagccgcctccgccacagtacgcagcaacatcgggaaagtgactgtctcgcccgtcggtttctcaaaacggtaggagttgacgttctgtcccagcaatgtcacctccttataacctttcgccaccaggtcagccacttcgttcaggatactctctacatcacggctacgctcgcgcccgcgagtatagggcacgatacagtaggtacagaagttgttgcaaccgcgcatgatggacacgaatccggaaatatggttgccgcagatacgcgacggaatcacatcccgataagtttcggtagtggaaagttccacattgatcgccttctctccggcttctacagcggcaatcagatcgggcaatgtcaggtatgcatccggccccaccacgaggtctacgtgatgattcgttatcagatcgtccttcacccgctcggccatacatcccagtacgcccacaatcaagtgttttttctttttcttcaacgaatggaagaactccagacggttcaggattttctgctccgcattgtcacggatagaacaagtgttcataaacacggcatcggcctcctcaagcgtttccgccacagagtaacccgccatttgcatcactgaggcaatcacctcgctgtcggccacattcatctggcagccgtaagtctcgataaacagctttttgctgtcatcagcagttgcggatttaaagtccgctcccgttaattcgttcatactcaaatctaaattaaaaattcggctgcaaagatacggcttcgcttttaataagatacaaattagcgcgaaaataacaccaaaacttgcgattaagtcacataacctgtaattaatgttaagggaataaacattttccggcagtattcttggcaattttaattttatttttcacatttgtgcaatgaaagaaacattagattttttcatagttaaggtttaggttaaaaaaattaaggggagctgtgaagctgcccttttttcatactgaaaagttatcctgaatcagatttaatacgtaactttggcagataactaaatagcagtgaagcacaatggaagatttcttaaaatttctcttgatagcaggcgtcattcttgtgggaatatttaaagaggtgaataagaataaaaagcccggcaaacgccccgtttcccctatgccatcgtccgacgaaataaaaccggacgcagttcctatgcccgaagcgtggagtaaccccaaacggaaaaagaaacgggaagaagtatccgtagccgcctccatagcgaacagcgccgcacaggacaaacgcaatatccggcaaaactcccaatacaacgctcccgacgagtcgtcgcccggcaacgaacaggatttcacaatccgctcggcggaagaagcccgacgcgccattatctggggagagattcttcaacgaaaatattaagcgataattaaccctaaaatatcaactgtattttaacacgaaattgtactatttatgccactaaatcgtatctcggcagcggaagctgcaagcctgatcaaacatggctacaacatcggccttagcggatttactcccgccggaacagccaaggctgtcacagccgaactcgcaaaaatcgctgaagcggaacacgcgaaaggaaacccgtttcaagtaggaatttttacaggtgcatctaccggagaatcttgtgacggcatactatcacgtgccaaagccatccgttaccgcgctccttacactaccaacgccgatttccgcaaagctgtgaacaacggagaaattgcctacaacgacatacatctttcacagatggcgcaggaggtgcgctacggattcatgggcaaagtgaacgttgccatcatcgaagcttgcgaggtgactccggacggaaaaatctacctgactgccgccggcggtatcgccccaaccatctgccgcctggcagaccagattattatcgagctgaacagtgcgcacagtaaatccggcatgggactgcacgacgtatacgaacctctggatcctccttatcgtcgcgagattccgatctacaagccgagtgaccgcatcggactgccgtacgtgcaggtagatccgaaaaaaattgtcggtgtggtggaaaccaattggccggacgaagcccgttctttcgccgctgccgatccgctgaccgacaaaatcgggcagaacgtggccgacttccttgccgcggatatgaaacgcggtatcattccggctacattccttccgttgcagtcgggcgtgggaaacatcgctaacgccgtactcggtgcattgggacgcgacaaaacaattccccctttcgaaatgtacactgaagtgattcagaactccgtgataggtctgatccgcgaaggacgtatcaagttcggcagtgcctgctcactgactgtcaccaacgactgccttgaaggtatttacaacgatatggatttcttccgcgacaagctggtgctccgtccgtcggaaatatcaaacagccccgaagtggttcgccgtctcggtgtaatttccatcaatacggctatcgaggcggatatttacggtaacgtgaactctacccacatcggtggcacgaagatgatgaacggtatcggcggctcgggcgacttcacccgcaacgcttatatctctatcttcacttgtccgtctgtggctaaggaaggtaagatcagcgctatcgttccgatggtgtctcacctcgaccacagcgagcattctgtaaatatcatcatcaccgaacagggtgttgccgaccttcgtggcaagagtccgaaagaacgtgcgcaggctatcatcgagaattgtgcgcatcccgactacaaacagttgctttgggattatctcaaactggccggcggcaaagcccagactccacacgccatccaagctgcactcggaatgcacgcggaactggctaagagcggtgatatgaagaatacgaactgggctgaatacgcaaaataaatagaatatagaatttacagtattccaggtcaaatagatacaattgtattctctggtaaacaaaatccggttatttttgtttattagagaatacaattgtatttttatagaggaattaataaaccactcttatgaaacaactatttgccacattctatcaactaagagaacgggtctccttagacttcgtaagatatctgtatcatgagattcgttgaaacaaccggttaatagccataacaggcgctcgtggaacggggaagacaaccctcatgcttcaatatataaaagagcattaccctggttatgacaatgatacactttatgtttcattggacaatatttggtttactacccactctctatttgagttggcggatgagtttcagaaaatgggagggaaagctttgtttttggacgaagtgcataaccggctcttctttgctcgaaatacataaaggtgaagccgatctttcaagaagagccgttacctatcatttgcacggactttctttccgtgagttcctgcaatttgaatatggatataaaatggaagtgctcccgctttccgatatattgaccaagcatatagaactggccatgaacgtaagcaaacagttgaaaccgcttgtagcattcaacgaatacttaacttacggttatttccctttttataaagaagataaaatattgtaccacgagaggttattagccatcttgaatacaattctagatgtagacttaccttctactgaaaaaatagattattattccattggtaaaataaaaaagctattttccatcctcgcaggacttgtgccatatattcccaatatatcaatgctcagcaaagaaatagaagtcagtcgcatcagtctgttgaattatctatcctatctccaaaaggcccaagccctcttgctgctcgacaaagaagcttccggcatcaaacaactgacaaaaccggaaaagatttatttaggtaatacaaactatgcatacgcactgggaggagaaaaaacagacataggaaatgtccgcgaaacattcttcttcaatcaaacagccgtaaaacataaagttacctattcctctcaaatagatttcacactgaatgagacatacaatttcgagattggcggtaaaaacaaaattcaaaaacaattagcaggagtggagaacggatatctggctcttgacaacatagaaattggattcaataacgagattccattttggttgttcggattaatgtattaacggagggatgacatcaccatagaccttataaagagaggaaagcgcagactttatcctgaaaagctcttgccttagcagccgaaagtacattctggttcatgatggcgaatgccacctcgtgcccgttcttcatacgcagataacccgcaagcgtatttatcgctgtaaacgatcctgtcttggcatgaacgttccgaaatacaggcgcactcttcattctgttttttaacgtaccgtctaccccgccaacgggaagagccttgtataacttctgaaaaatatccgtccgcgaataggcatatttcaagaaatcgaccaatagggcgggagagaggtaattataattggacagtccacagccatccgcaatcttatagtctttcgggtcgtgccccagccgacggatgagcttcataatctcgacaatcccatcttcggccgccacctgtttctttcccgtagcctgcgcgcccagacggcaaagcaaggcttccgcattcaggttatcactctctttcatcaactggttcaacactttctgcacggaagtattccagcacgccatctgctccactttcacactgtcacggggcaactcggcgaaatcatacgacggaggaacggcaattccttctccccgaagacgttcaagaaaggtgtgcatgaagaaacggggagtgtcataaatattgatatcatcttttctgatcgaagtgacattgcccgaaacagtcagattattcccgttcgtcagccaatccctagtaaaagagaactttccggcggaggaagcgcgtgttctcgtccggtttgtcaaagtataataagaagatacgggctggcaggagacgcttgccgtatccccctgcacggtagagggaactaccgatatccgcaccgttcccttgcagaacatcaacggagagagatagggctgataacctgccggagtatcatcccatgcccatccatgcccccagtaaagggaatctttcatcgaaatatccccatacacttgcccgttaatcacagaaaacgggtaactgattattttcttaaccaacgaatccattgcctggctgtcaaactccggatcgaatccacccaccacatacaggtttccttgcaatgtatcatgttctatcactccatcgtgccacacttccgtacggaaaggctcatcggcttcgggacgggagagggcggtaatggcagtcagcagtttcatagtagaggcgggacgggacagcttctccgcacgatagtcataaagcggtttcttagccgtcaagtcgtaaacggatatgccgacttcggatgattcaggaagcagttgcttgataagcgaatctatttgggagaagtccttttgtccccataggggaagaaaacagaaagaaaaaagaactgataaaataatattcttcatactacactgtttatactatcttacatttaccacatattctttacctgtccagtcacgcaccccaatcttattaattcgtactacaacgtttcccggaaaatttctcctaccgtgggatgtgggaaaacaatctttttccattgcgctgccgtcagtccgagttcaatggcagtccccgcaagagtgataatctccgaagcgggatttcccaatacgtgagcgccaatcacccgctgttgttcatccaacaatactttgcaaactccgttcacgccttcattttctgctacaaaacgaccggaataggccataggaagttttactactttatactgaatgccttttgcagaagccgattcttccgtttcgcccactccggcaatctccggattggtatagacaactcccggaacagcgcggtagctcatagtatcctcttttcccaaaatagaatgtacggcaacttccgcttcacggacagccgtatgcgccagcaaagagaatccggtcaaatcaccgcaaacgtagacattagaaagggatgtctgcattctctcatttactttgacggcaccacgctctgtcttttccagagtcaggttttcaagtccgaaacctttcgtcacaggacgacggccgacgctcatcagtaatttctccgcaacaactgttccgctcccctccgcattctcgtatgagacaacgacgccttcctctgtctgtgacaaagcaacgaccttcgtactaagcaaaaatttaattccccgtttcatatagtcagcacgcaacaaagcggagagttctttatccataccgcccaaaatctcatccatcatctctataaccgtcacctgtactccaagactgttgaagaacgaggcaaattccattccgatcactccaccgccaacgatgacaagtgaagcggacagctccttattgtccaatgcttccctatgcgtccaataatctacggaatcgactcccggaataggagggataaaggtttcagatcctgtacaaagtatcagattatccccttcataggtttcttcaccacaacgaaccgtatttttatcaatgatctgtgcttctcccgccactatcgtaacattgttggaagtcagtttggattttactcccaataccagtttacgcactactttacttttacgggcaatgatttttgccaagtcaaaagatacttcggagacattcaccgcatactttgacgcatggcgggcaccatcatacgtctttgccgaatacaataatgtcttggtcggaatacatccttcattcagacaaacaccacccagattatttttctcgataagcaatacgctcaaaccggccttaccggcagcttcggcagctgtatatccggcaggaccgccaccaataataattagttgatacttcatagtatataatcagttaatcttttttcaagcaattcgacaaattcccgttccttgacaggcatcacagagacgaacttaccctttccacattctatcaacacatactccgtcaccgaaaaacgtccgaacttcatagagtggcatttccttatggcagtaatctcagagatcggaattacttttttacggataaaacgcccggtagatatctccagaatcccgtcaggagtaactgtataaacagtatggataatctgctcgatcacaacaatcagcataagtatcagcaacactgccggcaagatatacttacaccacaatgcaccgacaacgttcacagtaagtactaccaataagaaatattggtaccaagcaatacgtgcatggaaaattcgattcattttgtcagatttttgcccgcaaggtagcaattttatgaattagtgacaacgaaaagtacaacgaagtaacttattttgtagctttgcggtgagaaataacaaaactatggtaagaaaattcgatttcctcgtcatcggctccggaattgccggtatgagttttgcactgaaagtagcgcacaaaggtaaagttgcgcttatctgtaaagccggattggaagaggccaacactttttttgcacaaggcggtatagcttccgtaaccaatcttgcagtagataatttcgagaagcacattgaagacacaatgattgccggagattggatcagcgaccgaaatgctgtggagaaagtagtccgcaatgctcccgaacagatcaacgaacttattcattggggagtaaatttcgataagaaagaagacggagagtttgatttacataaagaaggcggacactcggaattccgtatccttcatcacaaagataatacaggcgccgagattcaggagagtctgatagaaacagtaaaaaagcaccctaatatcacagtattcgagaacttctttgccgtagagatcatcacgcaacatcatttgggaattatcgtcacccgttatacaccgggtatcaaatgctacggcgcatacgtgctgaatgaagcaacaggcgaagtggatactttcctttccaaagtaaccgtgatggcaacaggtggttgtgaagctgtttaccgtaatacgaccaatcctttggtagctacgggagacgggattgctatggtttatcgtgccaaaggtgcagtgaaagacatggagtttatccaattccatcctacagccctcttcaatccgggagaccgccccgcttttcttatcacggaagcgatgcgtggatatggtgccgtactgcgtacacaagacggcaaagagttcatgcaaaaatatgactcacggctttcactggctccacgtgatatcgtggcccgcgccattgacaatgaaatgaaacaacgtggggaagaccatgtattcctcgacgtgacacacaaagacccggaagagacaaaaaagcacttccccaatatctataagaaatgcctcagtctcggcattgatattaccaaagattacatccccgtggcacccgcagcacactatctctgtggcggtatcacggtcgatctggacggacaatccagtatccgtcgcctatatgcattaggagaatgctcctgcacaggtctgcacggaggcaaccgtctggcttccaactcgctgatagaagcgattgtctatgccgacgctgctgccaaacatgcgctcagtgtattggaacgttatgactttaacgaagatatccccgaatggaacgacgaaggaaccatctccaatgaagaacgtgtactgattacccaaagtatgaaggaagtcaaccagatcatggaagcatacgttggcattgtccgcagtaatacccggttgatacgtgcatggaaccggctggacatcctctatgaagaagccgaacggttgttcaagagtagcaaggctacccgcgagctgtgcgaattgcgcaacatgatcaatgtgggttatctcatcacaaaacaggctatggaacgtaaagagagtcgaggcttgcattacacgattgattatccgcataagaaagattaacaggaacattccacaacttacaaagtgtaagtagaatattataaaaacgcgtaaaaagaacgattaccttgttctttttacgcgtttttagtcttctatacctatcttatatcacattcctaatatacaagtctataaatacaggatttcacagctatttccgaatatttattctttttattaaattacagactggatttattgtcttttaattattatattgtatttttgtgccatcatcctatttgccacagatatggcaaatataaaaacatgaaagcatgggaaaattcaaactaccaatctttttgctcatccttctagggatatccgtaaacaatctcaaaggacaaacaacagcgtattcaaactggtacaaagtgtataatgatacattgcagggcataaatatggaaaaagccttacactttctacaagaaaaaaagctaaaaccccaccggcaaatcatcgtgggtatcatcgattcgggtatagatacgacctctatcgatctagcacccgcactttggtgtaatccaaaagaaaaaatcgatggaaaagacaatgataaaaacggatacgcggacgatttgcacggatggaactttctcggaactaaagacgggacattcaacatgaccagtgccggaactgaagagtaccgcgaattcaaacggttatatcccaaatataaaaatatcgatccggcagatatacaagatactactgaatatgcctactacgaaaagatgaaaaagaaggcgggtatcatgagttatataaaatatgtgggttatacggccgcaaaagaccaagcatatcagctgatagattctgtgctgactactattcccggaataaatatagacacacttacagtcaatggattaactcatcttcctattgaagatccggcatggggcaacgcctaccaaacactttttgtcgatatgttcaagagtggaaaaaaatcattatggaaaaatgttcataagcaacaccgcaacacatttgccttgatgcagaaaagattatatggtatcgagcatgatgctgacaaaaggttattaatgggcgacgatttaaaaaatccttcagatcgtttttacggaaattcgttattacaagcaaaaggatgcgaccatggtactttcgttgcaggagtgattgccggacaaggaatcaataatgctgccatcaccggtgtctggcctcaagcgcggttgatgatcatacgtgccgttcctgacggtgacgaatacgacaaagacatttcaaccgctatccgttatgcagtggataatggcgctaaggttataaacatgagtttaggaaaatacacctcacccgatgccgacatggtaaatgaggctattgaatatgctctcaaaaaagacgtacttatcatccaagcggcaggcaatgacaaacggaatatcgatctcatcacctattttccttcagcaaaggatgcgcaaggaaaaatattccctaattacttgagagtcggttcttctgacaaaaaagggcaactaagtcagttttccaactatggagcaaaagaagtagatgtattcgcccctggagaagaaattacctcggtaacggtcggcaacaaatacatggtatcacaaggaaccagtatagccacccccatagtaagtggtgtagcagcaatgttacgtgcccatttcccaaagctgacggccacacaaatcaaagagatattaataaagagcgttcgtccggctgacaatttaaaagatcgttgtacaagcggaggaatcattgacgcactacaagcagtcaaattagcaaccgaatataaaaagagatgagaaaaaatactgtcataagttttataggcctgctgttctgcttatgcatacaagcacaaggaacatccacatcggtaaacagtactgtaaacgatgtggattgggcacgtgctgaaaaattttcctctgatgcactggagcaatatataaaaggcaaaagaccttatcccaactggattgaaggtagttcttatttttactacaatgtaaaagaagataatggagtttcttactatctggttaatgccaagaatggtaaaaaacgcaatatgataaaggataacctgcaattcgtgcaacaatatgcaagaatcacgggtgacacactcgatgcaaggaatatacagctttacgggtatcgatttaagaagaatgacttcaaccgcttttatcttgataagaaaggaaagtctatggtgtatgatatgcgcaccggaatactgacacagataaaggcagaaaacaaaaagaaggaacgtcctgttctcaaaccatcgtaccatagctctgactcactcttcactatgttgggatgcggatatgacctctatatacgtaacaaccgtacaggaatcatacaccgtctgacaaaagacggtaaagaggatgcgtcctatacttaccgttgctctaaagacacaatagagtctaacaccaaaggattctggctgggacatcgttatgtctgcctgatacaggatatgagtgaagtaaaagaaatcagccttatcaactcccttgcacggcaacgtccgacgacaaataccttcaagatgcctatgcccggtgatgccggagtgcgtcaataccgtatgttttggtatgatgccgaccatgaacaaggaaagatgttaccgattgggaaatatcctgaccaagtagtaactttagactatttccgttctcccaaagctctttttttcacgcgcagaagccgtaagggtgataaaatagacctttgccgtatcaacgtgacagatggcacagtcactgagcttatctcggaagaatgtgctccacacatcaacttgaccctatcgggctatcgcattatagagaaaggaaaatatttcatttggtggtcggaacgcacaggaaaaggtaactattatctgtacaataatgacggacgattactaaaccgcatcacacatggtgataaccttgtagcaggcagtatcgtacacatagataccttacgaagaaatatcatttttgccggatatggtaacgaacctgatactaacccttattataccttttattataaggctgattttgatggaaaaaaacaaacgctgcttactccgggaaacggtaaccacgaattaaccctgtccgacgaccaacgatatgccatcgatacatattcacgtatggacttggcgcctgtaatgaatgtattgtctatcgaccgtcccacacaatattttgaggtaaatcgcatggacgacagcctgttgcgaaaagcaggatggcaaccgcctttactgttaaagttgaaagcggccgatgggaaaacagatctttacggactcatgtatctaccgtctcaactggataaaaacaaaaaatatcctattatcagcaatgtgtatcccggtccccaagatgaccagattccgcaatcattcacacttgacgataatggtaaccaatcgctggctgagcttggctttatagtcatcaatgtggctccacgtggaagttctcctttgcgcggacacgatttctataacttcggctacggtaatctgcgtgattatccgttggctgatgataaaagcgtaattgagcagctagcaaagaactacccgttcatcgatcttaaccgtgtgggtatttacggacactccggaggagcattccagacagtagccgccatcctcacttatcccgacttttataaagtagcggtagctgcttcgggcaaccatgacaacaatatctatatccaatggtggggagaagcatttcacggactgaccgagaagactgatccaaagactggaaaaacggtattttccaccaagattccgaccaatatggaactggcaaagaacttaaaaggccatctgatgcttatcaccggtgatgtagataagaatgtcccgccttcatctacctatcgtctggcagacgctctgataaaagccaacaaacgtttcgatatgtttatcctgccgggaaaagatcatggagtaatgtgtccctattatcagaatttgatccgctactattttgtggagaatctcattcaaccggtaaagcaacatattgatatcatcaatcataattaaccctaactcaaaaagcttatgaagtatcagaaaacattcaaagcattcgtgtttgtctgtctctgttgcatggctacaatcctgttcgctcaaaagccgcaaggcgatgcgaccattctagtgaaagtaaccattgtagacgtagacaagaatcccttgcccggtgcaacagtaaaagttaccggtaaggcacagggagtagtggctaacgaccaaggagaagtttctctgtgggtagatcggaacacccagattgaatttaagtacgtgggtatgaaaccgctattcatgcgggtaaccaagccactgtccggctatatcacattagaagatgaaacctccgaactggatcaggtagtagtcaccggataccagcgtacgaccaaacgccgtactaccggttcattgacaacactgacagccaaagacctgaaaggagcccctacagccaatttggatatgttgatgcaaggaaaagttgccggaatggacgtgaaagctgtttccggtcgcccgggagaatcggccaaaatacgtattcgtggtacaaacacaattacaggtaatgcagaaccattgtgggtggtagacggggtacctttgcagaaagatattccaagcatatcaagcagccaaatccgtgcaggtgatttcaatgaaatctttgcaaatggtatctccggaattaacccaaacgacattgaatctatcacagtattgaaggatgcttcagcaacagccatttatggctctcgtgcagcaggaggcgttatcgtggtaacaaccaaacgaggaaaagaagggaaaatgagtattaattattcagccaatgtttccatcgtcacaagacctccgggaaatgctaatctaatgaactccagtgagaaactggcctgggagcaagagctgtggaatgaattctctgccaaaggttttgccgatggtactcactatccggttattggcgcggtcggcatgattcgatccggatacgggaaatacgccaatatgaccttagaacagcaaaatgcggaaatagcccgtcttggcgaacaaacaactgattggtttgacgaattatttcaaaattcagtttcaaacagccattatctttctctctccggaggatcggaaaaaaactcttattacgtttctttaggatatgcgaaaaacaatggactggtaaaaaaaaccgattacgaacgctacaatgtaagtgccaaacttgatatgaagcccaacaaacgggtgaaacttggcatctctgctgatatggctatacaggaatccacttcaccatcactgaatgttgaccctttcaagtatgcctattttgccaatccatacgaaagaatatacaacgaagacggatcatatgcagcagacaatacatattacagtataactcatgccaatggtgcttatgacaaattattaccggatggtggatacaatattttccgagaaatcaatgaaacatccaacgaaaccaaaaatatgtccgcatcattaatcgctaatctaagcgttaacatcttagacaatttaagtttcgaaggattggcttcttacggatatgtgacaaatgcctccgataatatcaatggcaaaaacacatacgccgcttggcaggaccgcccatttgaaggtagtgcaagtagtatatctaaacgtacatacggttccattactcagaccaatgcttataacaccaattacaatttacgcggccagctccattatttcaacaccttcggtcgcgaccattatataagcgcattgttaggctcggagatacgaggacaatattccaaaagcatctacgaaaaacgatatggatatgatcccatatccggtaattcttctatccccatatatccggaaagtatggatataggctataacaacctgatttcgtatgcagccatcgtcgatcagctatccggtcaaagtattgtagaagacgccttcgcttctttttacctttcattagactatgtattcaagcaacgttatattctcagtttgacaggacgtactgatggctcgaataatttcggtagcaatgaacaattcaaccctaccggctctgtcggtctatcttggaatgttgatcaggaagagttcatgaaacctttaaaacctattatcagcactttatctttacgagctgcattcggatatacaggaaacattaataagtctgtttatccacaattggtaatggattatgaaaactcattccgcaaagccgacaatgattattaccgcatgggaacattacggaatgccccgaacgccaaattacgctgggaaaaaacacgcgatatgaaaatctcaatggatataggttttctgaatgaccgtctacgcttacaaggtgaactttatgacagacgcacacgagatgccgtaaccagtgttccggttgtttacaccacaggattctcatatcaaagttataatacctcagaattactgaatcaaggagcggaagtgacaataagtgccaatgtattgaaaactaaagactggaatctttcattaactgccaatattgcttacaaccgtaataagttgctaaaatattcctcacctaatggaagcattttcaattctaactacgtaggctacccattaagttctattgtcagtggaaaagtaataggcattgatgagaaattaggaatttatgcttatgctacccgtccggacgttacaatgtctacggaagcagatcgtggtgaagctaaaaactatgctttctatttgggaactagtaacgcacctaccaacggaggatattccatctctttatcatacaagaaaataaacctgagtttaggaggttcttattctttaggaggaaaaatactgaacaatatcacttgtccggtatcttacaccatgctaaatgaatcatctgcagcagtcgaaagcattcctacgcaagaaaatgacctgtataccaacttcctgaacgtaacaaaagaccgtgtgaatcgttggacaaaagataacccgataaccaatggatacccacgtatcattgatgcgtatggagaatatttgggattggataattatatgataaccagcagccagatcactcgtgcctctatgttggaaaaagtatcttacttcaaactcggatcattactattgggttataactttgaaaatgaatggctcaaaagggcacatatcagttcattggcactatcattcagtgtcagcaatttattcataataaccaattattccggtattgaccccgaaaccccaggagcagtttatcctactccacgtactttttctatgggagtttctatcggattttaaaaacaaaacattatgaaaaaaaagaatataataagtatcggactaattgcattattatgcatatcgtgtaacaattatttagatataaagccttatggacgtactattcctaaaacagcagaagaattttctgcacttattcatacacgacttaacagtattgatgccgggtcagacagttatttagttggaaacgccaaccaatggatgacgtgggatgcagtatgtggtgacgattttgaaacctgtctgacaagctcaggcgcacgttctttggcaacatacgtaggcgatattattcgtcaaaatcaatatcccaattactaccaatctctttatgaatttatccgtgactgtaatattgtattgaacgaaatggaagaaagcgatacggaagaagctaataatattcgaggtacagcatatgctatacgaggtgtggcatattatcaattattacgaatattctgcgaagtaccccgcactggagaattcgacactcagcttggcctaccgcttgtaacaacatttgacatggaagaaaagccactccgcagtaccatgcaggccactatcaatcagatagagtctgatttgcaaaaggctgccagctatcatatcaatgataatatctaccgtttcacggaagatgtcataaaaggatatcaggctcgtatgtatttctggacacggcaatggagcaaagcacttccgatagcccaagacttattgaacaaatatcccttattggaaggtgaggcatacaaagctatgatgactaatgcatacgaattgacgggcaaccagcttttaaaatcatatcttgctgtcacagccaccggtagtgacgatctatccggagtaaataccacccttcaataccgtcccgttagtctgcgttttttaagtactttctctgaagaagaaaaaacaagcgatatccgctatgcactttgggtaaacacccaacggcaagcaaaaaagattttcttttgtggtatgagagcagccgaattcaaactgatagaagcggaatgttattatcacatgaagcaagaagacaaagccttgaaatctattaacgaattacgagcacatcgtatcagtaattataccgacctgacagttgacaaactaccaactctttcagataaagaagtcataaaaacggatgtagagggtaatgctctaaccccactaatgggattcattctgcaagaacgcagaaaagagttatttctggaaggagaccgtttctttgaacaaaaacggaatggctcaccggaatattggacagcactcaatggcctgaagtatgtgacagagaaatatatgtatacctttccaattcctttgcacgatttggatttagagaacggattgatacaaaatcctggatataaagagatacaaaataaataaaatggaggatttaaatatgaaaaagaaaatatatagcgggatatttatgatctccctcgcattatccggagcaatttacgcagcttgcgaagatatagatgaattgccaccgcaatcagatactaatttcataaataaaacttataaattacccaatcctactgtgttgactactgaagaagtagcggaatataatgcgataaaagcagaatatgaaagcagtataaatcaacagcaataaccacataaaatccaagaaatgttatgaagaaattagggcattatctatgtatattgatgagcatgacatttattcttgcttcctgttcatctgatgataaccagcgcctgcctcaaatctatatcgaccagccattctatacattggcaaaaggaagtatagaattgaaaataaaagctgaccaagctcctctaacggatgtctttattcccgttctatttggtggaacagctgtggaaggcgtagatttcaccgtatcagaaccatccatcttattaaaagcaggtgagacagaagctacttttacattaacccgtattgaagaaaatatcggtgatgaaaataaagaattatatgttaatctacaaaaagctccggaaggtttctcgttgggattgatgaattatgcttctgtaaacttattaaataataatggaatcataatgtcctttgagaacagtacaggaaaagttggattcagcgctgacttctctatcaaactgactaatatgaaaggaggagtatataaggtaaaagtagcgacaaccttcgatattgaagtagatgaaagttctaccgcaatagaaggggtacattatgaattcgtaaatggagcccaagttgttgttcctatcaacaaaaataaagggagtttctctatcaagtacctgaagaaagaagaaggaaaagataaacttatcctccgtctggccaataaagacggatatgccataggcagcaacggcacacttactgtcactataagcggaccggatatatttaccggaacttgggcatttgataaaataacaaatcttgatttgttcgagatgtatggagaagatatcagcaaagcacccaaagggacaccttcagaccgaataacatttgaaggtgactcttacttagaatatacattcactcccgatctatccggagacctgaagaattatttcgggacatctccccgtaaaatcacttttaaagaagaaggagataaatcgttccaagagaatagtggcgcaaacgtaaaagtatccatactggaaatacctgatgtaaacgtcaaattctctactacccacaaagacattcgcccggctcttgtcggtttccgactaatcacagtggatagcaaagaggtattggaatgcacattggatgattatgaaccgcaaggagaagattttggagccatgatttatgaatttatgagctctatggaagatgctcctcttcgtattcactttagcaaagtagaataaagtactagagccacacaataaaaaaagttccacgtccggaaacgaaaagcctcccgacgtggaaccaactatcttctaatcagaaatcctcttttaatagttttccttctttacttcgaagtaagcctgcgggtgcaaacaagccggacaaacttccggagcttccttacctacagtgatataaccgcagttacggcattgccatactacttcaccttctttagcgaatacagtcatattctcgatattgttcacgaaagcaagatatctttcttcgtgacctttctcagcaatagaaatattacgatacatagcggcaatcatcgggaaaccctcctgttctgccacatctgcgaaatgaggataatctagcgaccattcttcgtgttcaccggcagcggcagcgcgaagattttcgagtgtagtaccgattacacctgccggatagctggcagtgatttctaccataccaccttccaagaacttaaacatacgtttcgcatgttccttttcctgatcggccgtttcagtaaaaatagccgaaatttgttcgtaaccttcttttttagccacacttgcaaaataggtgtaacgcattcttgcctgtgattctccagcgaatgaagtcagcagattcttctctgtctgagttcctttaatactcttagccataattcttattatattttaaattggttgattaccacacgtaacttgtcgtattattcataacgcaaatataagctatttgttcataaaacgccctacttttctcattaataaaatctatgccctcattgataaaacctatcaaaaatcaaatagtatgtcgagaaacatacttctttcgattattttatataattttgcaacctctactttacaaaagacaaacgatcacgtaacaactcatagaaaatgaaactatttgaattcaaacctaaattggtttcttgcctaaaaaattattcaaaagaaacattcatggcagacttgatggcaggtatcatcgttggtatcgttgcgttgccgttagccattgcctttggtattgcttcgggcgtatcacccgaaaagggtatcattactgctattattgccggatttatcgtctcattgctgggcggaagcaaagttcagatcggcggaccgacaggcgcttttatcgtcatcatctacggaattatccaacaatatggagaggccgggctgattgtagcaacgctcatggcaggcgttctccttatattattaggagtgttcaaactgggagccgtcataaagttcattccttatccgattatcgtaggtttcaccagcggtatcgctgtaaccatcttcaccacacagatagccgatatcttcggcctgtcgtttggagacgagaaagttccgggtgactttattggaaaatggttgatttatttccgccatttcgacacggtgaactggtggaataccatcgtaagtattatcagtatcattatcatcgccatctcacccaaattttccaagaaaattcccggctcactgattgctattgtcgtggtgacagttgccgtttacctgacgaagatgtacggcggaattgactgcatcccaaccattggcgaccgctttacaatcaattccgagctacccgatgccgttgtacccacattgaactgggaagccattaaaaacttattcccggttgccgtcacaattgccgtgttgggagctatcgaatcactgttgtccgccaccgttgccgatggtgtgataggcgaccgccacgattccaacacagaactgattgcacaaggtgcagcaaatatcgtagctcctttgtttggcggtatccccgctaccggagccattgcccgtactatgacaaatatcaacaacgggggtaagacaccgatagccggaatcatccatgcagtcgtcctgttgctgattcttctcttcctaatgccgtttgctcaatatatcccgatggcatgccttgccggagtattggtcatcgtttcttataatatgagcggatggcgcgtattcaaggctttactgagaaatccaaaatcggatgtaacggtacttctgatcacattcttcctcactgttatcttcgacttgacagttgccatcgaaatcggacttatcatcgcttgtgtactctttatgaaacgtgttatggagactaccgaaatttctgttatcacggacgagattgatccgaactcggaactcgatatcgccgtacacgaagagaatctgataatccccaaaggagtggaagtatatgaaatcaacggtccttacttctttggcatcgccacaaagttcgaagagacaatggcgcaattgggtgaccgtccgaaagtacgtatcatccgtatgcgtaaagttccgtttatcgactctacgggtatccataacctgaccactctttgtgaaatgtcgcagaaggagaagattaccgttatcctttccggagtcaacgagaaagttcataaagtattggagaaatccggattctatgaactattgggagaggaaaatatctgtccgaatatcaatgtagcattggacagagcgaaagaaattgtagagtaataatcttatctaataaataataacatggtaactatcgtgatcgtatccgctttatcaccgtaccaagaattaaagacattcaaaagcggacagagttcgaaggaaaaaatgggaagtatcttcactggaaacaacatatcggcaatgagttctgtatccatccttcccctaaagaaccggtaggtctccgccttgctactcttgcattaactcaaacttacggagtacgcaaactgccatccaccggacctatgatgactaatgtggaatatactgacggcaaagcaatagtagcattcgacaatgctcgtgccggactattccccacgttcgaacaactggaaggattcgacattcagaacagatacatgggatgatgtgaaa

SEQ ID NO: 11878 - DNA, 524 bp, Unknown
  gut microbiota DNA sequence
catctatgcccacccgaaaaacgagatggaacgagagttcaacaacgatatgttgaacaaggcagaggctatccgctgtatcagagtgcaatcgctcatcaatgaagagtttggcttcttggataagagcaagcagaaagccgatttcctcgcttacttcaagaagatgtgccgaaacaaagaccagaaatggcaattcgtctatcagcatttctataacttcgtcaaaggacaatgtacctttggcgatgtgaatgtggacttatgcaagaagttccgtgagtatctgttgaacgccaagcaactcaaacacagtaaccgccccatatctctcaattcggcatccggctactattctacttttagaggtttgttgaagattgcctatcgggacaaatggtttcgggagaacatcaacgactatcttgataagattgagccgcaagatgtgaagaaagagtatttgacattggacgaagtgaagcaactcgcagccactccttgtgatatccccgtattaaaag

SEQ ID NO: 11879 - DNA, 2610 bp, Unknown
  gut microbiota DNA sequence
gacaatgtaatcagtgtttccggtaccgtaaaggataccaaaggagaaccgctgattggtgtaagtgtgttggtaaagggtactaccaacggtactgtgactgacctggatggaaaattcacattaaaagtttccgctggggatattcttgagttttcttatatcggctatgcttcacagtcggtgacggtaactaatgctaattccctgaatatcacattaagtgaagatactcaggctttggatgaggtggttgttactgcattgggtattaaaagagcagaaaaggctttaagttacaacgtgcagcaggtaaaatcagaagaactggtacgtactaaagatgccaactttgtcaattctcttaatggtaagattgccggtgttactattaataaaagtgccggtggtgccggtggttctacgcgtgtagtaatgcgtggcgccaaatcaatcgaaggtgacaacagtgcattgtatgtagtagacggtatacctttgttcaatacgactttgggtactggcaatgatgtattgggtgagggtagagctactaccgaaggcatcgctgactttaacccggaagatatagagagtatttctgtactgagtggtccatcagctgctgcattgtatggtagtagtgcagcgaatggagttatcctgattactactaaaaaaggtaaagaaggaaaactttcaatctctttctcctcttcttccgagttcagcaaagcttatatgacccccgagttccagacaacttatcggaacaagagcggaatatatgaaagttggggtgatctgatgactacacctacttcgtatgatcctaaggatgatttcttcaatactggtaccaattttataaattcattgactttgactaccggtaacaaaaacaatcagacttttgcttctatttcttctacgaattcaaaaggcattgtgccaaacaatgaatatgacagattaaacttcactattcgcaatacgtctacattcctcaatgataaattacagttggatttaggtgcatcttacgtgaagcagacagaccaaaatatggtttcacaaggacaatattggaatcctgttatggcagcctatttgttcccgcgtggggaaagttgggatgctatcagaatttttgaacgtgaaaattcggcacgtaacatttcagagcaatattggcctataagtgaaggtacttatgcttcgcagaatccatattggacagcctaccgtaatgttgctcctagcgaaaaaagccgttatatgttcaatgtaggtctgacttataaaattttcgattggttgaatgttgctgcccgttatcgtatggatgattcatacattgattttgagcggaaaatatatgcctcttcttatgatgtattcactgaaggttccaaaaaaggcctttatgaatacaaccattataaagaccgccaggaatatgcggatttcatggtgaatatcaacaaacaaatcaaagatttcagcctttctgccaatttaggttacagttattccaattactgggcagaattgagcggttatagaggtccgttggcattaatccccaataaatttacagcaggaaacatcaatgctagcaaagcgcgtgtcattgaaggtgaaggtgacagccgtgtccgcaataatgcgcttttcgccaacctggaacttggctacaagagtatgttgtatttgactttgactggacgtaatgactggaattcccgtttggtgaatacagacgaagaatcattcttctatccttcagtcggcctttctgccattgttaccgaaatgtttgatttacccgatttcatttcatatttgaaagttcgcggttcttatacagaggttggttcaccggtttccagatcaggtctgactccgggtactgtaactgtacctattgaaggaggggcgcttaaagaagacatgatttatccttttacagatttcaaggcagaacgtacccgttcttatgaatttggtttaagtcttcgtttatggaataagttgagtgcggaagttacttattataagtctaacacttacaatcagactttcttgggtgatctgcccgagtctaccggttacaaacagatttatttgcaagcaggtaatgttcagaaccgtggctgggaagcttctttggggtataatgacaaattcggtgatttcagtctttcttccagtctgactttctcgcgtaatattaatgaaatcaaagaaatggtcgaaaacttccatacagacattacttcagagccaatcaacataccggaagtaagaaaagataatggacgtactttattgaaagtaggtggcagtatacacgacatttatgcagatcgattctttaagaaagacagtcaggggtttgttgaaatcaaggaagacggttcttatggaatggaaaatacggaccctgtttatttaggtcaggttgcacccaaattcaatatgggatggaacaactcattttcttacaaaggtttcggattgagcttcctgatcaacggacgtttcggaggtgtagtaacttcttctacagaggctattcttgaccgcttcggtgtttctaaagcttct

SEQ ID NO: 11880 - DNA, 12454 bp, Unknown
  gut microbiota DNA sequence
atctatttactttggggaataatcaaaaaactaaacccacacggtccgccacctccattttccaaccgaaccaatactttattccatccctgtcggaactgaaaaggagcaatatgttcatcaatattataccaactagtgccataatcacgccatacatcttttccattaatccatacacgtccactatcatccgtgccaatagccaccaacattgtggttgcctcatcaaaataaagttctgtataggcatagtaggtcgaatgtcccgtagtcacaggcggtacattatgcattgattcactctgcataaacttccatcgaagtgctccgtcaagccgtacttcatcaccaataactttcaatggatcagaatctgtctctgcaatacctgtaccaacttgcccatcagtgtacactgcatcaaaatcaatagatatttcaggcggatgaacaatggagaaatcctctcgaccaaagctctcccaaggcccaatcatataccatgtattgatataaagccatcccttacgcttagcgtcttttgaaaaacgccgccccggcaaagcctgtgcccgtaccatctctttactcaatttcgaaccggaataggcactgaacgtacctgtgccacctcctggagcagaaacttctccactacctcccataccactaccagtgccatttccactaccacccaatcctccactacccggcttgccattaccttgccccatacccggatttccagcctgccgcactgcaccaaaaagaccttccaaacgtgattgcgctaatccagcctgccgggtagcctgcccgagtaatccacgatagttattcaaatcagcagtactctctatctgcaatcctccactcgcattactactcgccgaagtcatccactcatttcccctcaactgcatttttatcaattcatcaaaacctggcatacgcgaaacacccgctttcaacgaactatatacttcgggaaacgactgtcctttagacaatgattgtttagcagcattcactgccaaatggttttgctgaatctccgcctcataatcacgcaatgcactgtagagttcttccaccgaagcattgaccggcggattatctgcttgaggaatcgcccgtgctttcgatgtatcatttgcatcatcaggagccccccaaggcagttttctcttttcaaccttcgttaacagatcatctttccgccgtctcattgtttcggccatcgtccgaaactttttaatttgttcgcccaaatttttctttaccaagagctctgattgctccactaactgcctggcgtaattagcaggcaacgctcgttgtgcctgctcctgtttcatcttttcagtcaaattcttccgggagttttgatttttctgctgtttcatatgcagattcatagcctcctgatccggtgatggcatcatccatatataaagtgcacctcccgcaaaacaaatcagagctatcagccatgataagaaaaccgtcagacggctactccctgttgtagttttcgtcatatgtcctgattcctatattacttaaattataaaactgacaagcatccatcacttccacaaaccgtccgaatggagtatgcctgtccatatcaatacggatacgctttcccggatcggtaatgcacgtctgtcgcaattgttccatcataaaattagtagaacaaggttgcccatcccaataaaaatttccttccgcatccagtcccacaatcgcttgcttatcatccggctttaatttaatagccgattgggaagtaggcaagtccacaggaatatccctgtttttcacttttgtcatagtagacaccaaaaagaatataagtaacaggaacacacagtctatcaaaggagacatcgaaacttccggttcctcttcgttattaaataatgataatctcataggcttattcaataaggtttacttccaagacgtacacgtgtatgcgtgaacccctgtatctggcactgatcaaatatctcaatcacagtattcaccggcactgtgcggtaggctgtcacatcaatattcgtttccactccccggctattacgcaaatcaaccagaaaagcatccaaatctttcagtggcacgtaaacactctcacccgaataggcatcatgtcccaccacctgataaattttcttcttctcatccacagcgataatcacagcctcttctcctgatcgagtggtagacaggctcgaagtcatcgtaggaagtgtcagcggaatctgcatttcccattttttcatcatcgtagtcaccaaaaagaagataagcaatagaaatacacaatctatcaatggagacatttgcacttctaccttgtcatcttcatcatagttcagtctcatgattttcctccttattatccagatataatttggttatcacattttccacttctacttccaccaatgaagccatacgcatgatacggtttttgataataaaatacaatgcgatggcaggagctgctataatcaaaccggcagcagttgttatcaatgctttggagatagaatcggataaaatagatgcaccaccttcatcaccataaagagccaccaaaccgaatgcctcgatcataccgacaactgttcctaacagaccaatcaacggagccaatgaagcaataacagacagaggataaatacgcgccagatgggtacggatgtcacgtgcagccatatcacctgcagtttggctgacagcctcacgcccggctttcacatgctcaaatatgaaccgtaacgaattcgccagtgtagaaggatatttatcacaagcagccaatgctcctttcaaatcaccgtttaccaaacattcattgacactcttacataaaggttccggagccaaacgaccttggcgcgaagtaatcagtcgttggagcgcaataacaagtgcaattaatcccaataaatataaaggatacatcattgaaccacctgctttaatttgtgctccccaatctatttgcacaccttgatcggcagcaacactatctgttgcagcttcatcatacatcagagcatcatctctttcctcaactggtacggctgtagcaatctcgcttggaagcactttgggagcattttttatatcctcctgcgtctttgccaaaaagatttcatcaaagccggcatcccgtctttcaggacaaataaatgatattccggttaaagtgatattaccgaagtctttccaaaggtcacgtgtcattaccacccaatgtccgggcatatcgccaagattaagacctttcaactgattgatcagatctttcggttttccggcaatgtaggaaaagtcatacttctttcccttttgaccggcagattcttcggaaacattaaattgcatcccgatttgctcccctccccattttatccatgcaaaagtaatataacgatattcacccggtccaggattctcacgaataggaatagacaatcctgttaactcggcaggacttttagaggcttctacatatatgtagttttcagacttcttcgaatatcctccatgtcgaacatatctatgatccgacttagtccactgtgcgccatctggtactcttgtactaaacaactcatataaacctttacctgttttaccattagtctgcgcaccaacctgcaatgtaaagagcaatgctgctcctaaaacgaacatcatcataatgttcttctttaaataagttttcatacctgtgtagtccatgttattctaatttatttcttatacttaattatccgaattcacaattgcaaagttgggaaaaatctgatatattgatgtactcaaataactcaaaaaggttcaacttttcaaaagttcgttgacaaaaggtctattaatcactcaaaatggtccaagaataaaccaaacatgaaattgtcactaaataatagttgcagatattcatttgataagatacttttgtgtaaatccaattatattttatacatgagaaaatatccgctacacaatttaaaaatcacatttctcatgctggagatattcttctcctgcaacatcattcatggacaaatattaaaagggaaaataatagattcctctactttggaacccattccgtttgcaaccatctatgtgactcctgatattagcaaaagcactaccaccaacataaacggagaattcagcctaaacgagattttatcacaagactcaataagagtctcttatgtgggatatgaaacacaaacattaaaatatccttttgattggaaaaacggttggatcatctctctaaaaagccaaacttacaagctgccacaagttattgtcagcaatatcaacctaagacaattagtgaagaacatacgaaaaaaatggaaacataattacccttcccactatccaatactagaaggaacctatcgtaagcaagaaattgaagacaatgaacttgttacccttgggcaatgtcgtatgacattgcagatgcccaccgccaacaaactggaatctggcgaaagacctaaagtaaacatcaaaaacagaatgatactgaaccctatagaaacatctggcagaaaccagttaggagtatttctttgtatagaacctatgccctatcctttctttatagaattagcctctgatagttatgataattatttatggctaatagaacaaataatcccagaaagcgataataatgaaacttacaaaataaggtatcaaggtatcaaagctccctacttacaacacagagggtatttctatgtctctaaaaaagacaatgcacttctctccgcgcatatcgaacgaccggtcagcgatcttccttgcagcaatccggacgttttttttcattctacccgctatgtatgggatatattctatcataaggtagatgaaaaataccaatattcttatatgagaacagaatatatcacgaaatattctaatcaactcacaaataaagaatctgaatatagaatcgtcatcgattatctggtcgataaaaggactccggtcaaaaagtcgacaacagctttcaatacctatctccacgatccatttagaaatattcgagagattcccataaaactaatcacatcatttaccaaaatattgccagattatgaataagatacagactttcgttttcattctatccgtatttctttctatcgaagcaatacacgcacagattaataacaatatggataagtctattattatatccacttctgaagatctttaccaacttgcctgtaaggtaaaccaaggaaatagttttgatggtgtgcatataaaattggctaatgacttgcttctaaatgatactaccgggtggcaacaatggaaaaaaggaaactcccggctccgtccatggacacctattgggaatgctcaatctcctttccgaggtgacttcgatggacaaggacatacgatctatggaatatatatgaacgaaagcagtaataatcagatttatcaaggattattcggattcttagaagatggcagtatatctcatgtccatatccgctcttctttttttattggtcataatttcgtaggtgctatatgcgggtacataaaaggaacctatctaaagggaatagcacaaatcgatcattgcagtaataactcaagtgtagaaagttcacgcaaccacgcgggaggtatcgtagggttttcagaaggttgcaaccggatcattaattgcagtaacaatggtatggttaaggctaaacggtgcgcaggaggaattgcaggctacttccaagatggcacaatcattaactgctacaacagagggcgcattcatatcctctacgaatcagccggaggaatcattggcgaatattacgagaatccttacagagggtttaccgaatctgatacgattgccaattgctataatacaggaattgtgagcggacgagatgttgtaggtggcatcattggtaatcttcaactctattccaaagaatttgtcccacaaaagatacatattgataactgctacaacgctggtatgttgaagagtacctatccggtaaccacggatggacttataggatgctacacatattatcaaacagagcaagaagtattcagttctttaaaattgaatagaggaagtcttaaaaaacaactaaaaaatatgataccacaaattgtttatgggctcaatcctcgtaatagcctcacaacaaaggaagataacgatcttaacgatcctgcccacatacatagaggaacaggcactgtccggcgtatagaacgatatagcgcgaaaagttattggagtgatctgtgttgtagtcctgtcaatctcactcaaccacgtttcaatacccataaaatagcagaagaatattggagtgaattgatgcgatactcccaacattgtaagcaattcgaacgttgtgaggacgcatcaatgaaagcccatgcatttgtcaaacgactcaacaaatgggtaaaagaagaagaaaaaaaactgaaaaaaaagaaaagacaaacatctttatacttagagtggcaaacagatgcagaaaaaatcaatgaaggttatcctatattcatagaatcagaaaagaattaaaacaatgaaaaaaatatatttgctttcattcatcattctactactgtgctatatccaaccggtaaaaagccaacacacgctaacgaatccgtctttacaaagcaaacatctcaacaatgtggcacaacaaatcaatctgtatttccaagaaaagattcacttacatattgacaaaaacacttatctgaccacagacacaatatggctcagagcctatctggtacatgcaactttccatactccattacctatcagcagatatacctatatcgagcttatcaatcccttgggagctatcgtggaacgcatacaactcaaagcacgcagacggctcttctttggacatattgctttatctgacacattacccgatggtgattatactctaagggcatatactgattatatggcaaacactactaaagattatcttttcaagagaaaaattaaaatcatttctcccaaatggggcaatgtaaaaatgaaagtaaccacaaaaggaactacaccaaacagctcacaactcattttccaatttaatcataacgattctcttttctctgttcatcaccttgaagccatcctaaaaaaaggaaagagtcatattcccgaaagacaaaaacgaaaagatcagttcgaagtagaatttacggagaaagtgatggaaacgaataggagttttcgcctccgactaacagaccgattggacaataaatacgagcgttttttacctatagccactgataaagaacagtacaatgtgttcttttaccccgaaggaggcagtctggttaacggagtttctaaccggatagccatcaaagcaataggaaatagtgggaatacaacagctctctctctttgcatacgtgatgacgcaggtgattctctgactgttgctacgactaaaacaagtggtgtgggagtttttgaaatagtgccacaaaacggcaaacaatattatgcccactgtatgaatctatacggtacttcaaaaatcatcccgttacccaatgcccgcagctcttatggacttagaatagaagcaacagactctacttttcaagcgcacctacaaacttcaaccgccggcatatcacaaccactttacttgatagctcatgttcgcggagccatcgtatcatcccagttatggaaaaatcagcaaacagatattattctcgacaagaaacttttccccgaagggattattcaatttatgttattggaccaacaactaaaccctctatgcgaacggttggtcttctccaaaaactatcgtacaggaaattgctatattacaacaaacaaaaccgaatatggtaaacgagagtccataacagtaaacctcacaattaatgaccctacaggtaatcctgtacaaaactatttttctgtttctgttaccgatgctgaaacaacttctccggacacttgtcacactatacaaagttcacttctacttactaacgaactaaaaggaaatatctccagtccggctttatggctcactgatgaaaaaaaagaggctctcgactacctaatgatgactcataaatgggaacgctattcgattccagctatattaaaaggacagtacgaaatccctcatgcaaaacccgaacaagacatgtgtattcaaggaaaaacatatactcaacgaccttttatcggcaatataggaaagacttcggacaggcatgctgtaattgttacaggtacgaaaaacatggctggatatcaagagattgtaatgacaaactcaaacggagaattcaaattcgatcaattagatttccctgaaaattcaggtttccgtattcttgttcgtcaatccgaaggaaaagtaacagacagcctgaatatcatccccaaaagattcccagtacccaatgatccgtttccccaagaacctctacaagaatcaatcttttccaatgctgaatcggagaatctgactaatttccaacgcatcggcaacagacattacctattacatgaagtgaaaataaaatctccctactggggaacttccaattaccaaactctaacagaaaaagagatcagtcttgccaatgacatgaaacaagtactacaaaaaatgggattgaaaaacatcatgcgtgactacaattctttccaatactttcacaatggtacacctgttgtaatctttttagataattatttatgtgatcccagcgtacttatcaactggcttagccctgaatatttacgtgaaattacttttataacagatgtaaaccgcagctatgttaatgaaatgctgaaaggtacccgcgaatggagtacaaagttacttgatgaatatgggcaaaaagatctatgtgagcttcttcttcaaattgaccgtacaaaaaacaaagtagccgtacttaatgccactactaagtctaacttcgattcacgctgtttcggattcaacagtaataagtatatctccccttggaaatatggaaaaacgcaactctccatttacccactaggctaccaacttccagttgaattctactctcctcaatatgataatatctcttcaaaagaaaaccttgtaccagacctgcgcactacattattttggaagcctaatataaaaacggatattaacggacgagcaacctttacattttatacttccgacaatcccggaccatttttcatcattgtagaaggaatcacagataaaggagaaatgatacgagctacaaaattagttcattaatacacggttatggataaaattcttctgcctaacagcgattggagttattactaacagtaaggcaggaaatatgatactgcaataataacttgtctgacacccgggtctcgtgctgcctgacacccgggtgtcagcatgttcaacacccgggtgttggtatgtatgagacccgggtgtcgtacaagttaattctactaagtggaatagacgcaaagctatactattctagttctgtatagtataagtttactccatgtttataccgtttcaaagttacttttgattatcctatatttatggcagtaccttatattttgaagaagtacttagtataatacgaacagcgtttccgggtagttgtctcaattttccctgatattcgacacggcccgcccccgttccccgatgtttattaaaacttatcttttcaaaaccttcctttgaaagaataatcttcaaagaaaggctccctttaaatctttttgtcttatacctatagtcaatatcatcatcacacatcaaagattccaaattagtattatgcaacaaattaagttctgtaataagagtagaacagacatccaaagaccgcaattttatgttttcttttaaatccaaagaacttatggtatttcccgaacagtccagttgctccaactctttattgccacttacatctatagaagaaagtccattagactgacataccaatagattcagatgtgggaactttctaaaatctatcggttgagataaatccgattctgagtaatcaagctcttttaaataattcatattttgctccgctgtttgttccggcaatgtcaatgactttagttgacgatagtcatttccttctaccataataccaccacctgtaccgccttggtttccacaaactatagaatacagctttttaaggtgagcaaagtctaatgcatgaatataattacccgcacaattcacaatctccaattgcaaattggcagaaagatctaaactttgcaacttacaccatctacagtttaactctttcaaataaggcagacgactaagatctagtgattccaaagaattcccattacatatcaacttactcaccccatcccgcaattggcggttatccggtaaaataagttggaccaatgtccctcctctcggatctccatccatctgaaaacgttctttttgtctattcactacaatctacttcaaactgatatttcgatgcagatcgagttttgacaagaaatttccggaacaatctaatatttctaaacgacgattattccttaaatcaagtcccctcaaagaacaaccaacgcatttcagcacacgtaacagcttattgtggttgacatccagcatctcaccaacataataattttgtatttcaattacttccaattttgggtttccagacaaatccaacaatatagaatccgttttggagaaaaggctcctttttaaggataactcacgaagattcacaaagcattccagcccactcaatgaatacaataaacagtcagtattattcatctttatctgcaacctggtaacagcctcaacttcggaacgcataatacaagcagtatctgctataattttcaagttcttcagttcctgtcgaaaaactaaactagcaaacttagatgtaatatcttcatctttcagtttatctttcgctgtcatttgactactaccaatagtcagcaacagaataatcgcccatattaatgtctgtttcataatttctatattaccatacaataataatcttaaagtattttcttatctttccagataaacctctaatggttccattccccacttatcttgattatttttatgacagcaatacacttttttgtctttaaaaaaaacatattacaggaaaagaataacgatctctaaccaaagcgaaaaacatcccatcatccgaatggttcctcgcaaattcgacttcttcgtatctaagccctcctaatccgatactccatgattcggtcccctttgcacttcttattttctctataagcttatcagcgaactcttgcccgaaaagctctacattcgctctatacatctttggattcatatcctttgtaaaatgactattatcagtatatacagcccgaaaatacatcgtctctcctttttcattttgcccataaaaacagactatatctttactcatttgaaagagttccgcatcttcgttcatatctttccacgtccttgatactacaattgtcggcacgaatttgactgtcgattttaaatatggaaataatccttgtttatatccagtccgctctaacgctatatcagaagctagccgtttgagtatagtatcttggatatttctatctacatcagaaagtaacttacatccaagagtaagccggttaatgagtaagttcttttttgtcactttagtactagcaccaacttctgtagccaacttacaaggtgctccttgagcaactccattcaaagggataaccacccctaagacagccatttcagaaactaaatatttcaggaatagtccccctgacaatttaaatttcaagctaaaatgcttcataaggtatctcctcttcttccgaaaaaaatcattatcttcttaaataatcctccaatggtctcatacccaactcgtgctgttgcatttcacaacaataataaggcttgttattcacaaagaaacagacacgtggatatgttctccctctggtcagaatgaaaaaagaaccatcatcagaatgttctcttgcatattcaaattttttatgtcccgggtcttgtggggatactacaataatttcccatcgttcaggacctttggcatttctcaatttctcaattaccctatcagcatactcttgcccgaacatctcaacctggtctctatacatccgaggattagtttcttttgtaaaattactcctgtctgtatataaagcatagaagtacagagtctcccctttttcattctgtccatagaagctagcaaaatctttttgaggcatcagtattttatcagaatctgtaatagacgg

SEQ ID NO: 11881 - DNA, 4023 bp, Unknown
  gut microbiota DNA sequence
atatttatatatgaatacagcagatttaaactatttataaataagtgaaatatgattataaatgccataaggatagtcaagaatagaaattgattactctttttgatatacggttatcataaatgcataaaaaaagagcgggcagacataaatcatcatgcttaccccctctttcgtcaataatgagtccaattttcgaactgttccttaaaatctgtatgctgctccaatgtttatgaccccttgatcaaaattacttaccagttgatatctaaattcaaaattcatggcccagttacgaggtaaagtaagttcagctcctgcacccaaatttacaccaaaccgacactcattatggttccctccatcatcaaaatgaagatggtcgccatcccaatcaaggtccaaatcatacccatcaaacatccagttagataaagtcaaaccaaataaaggataaagtttaacgctcccggacactgcaaacagataatgaaaattcacattcacatccaacatgcttacgttgtcattctcaaagaaatagttcaaagatggttctatacgaataggattagttatattatactgatatttgatccccaatcctatactttcaatctctgtcccatagctgagtccgaaacctatagcttgcttccctttctgggcatatgagcagcttaacgtcagaaagaaaacgataaataaaacgaatatttttttcatactaaatgattatttggaagttataatatagaatataaatcaatgtttcaattctaagatagaaaaaacagaaagaaacatgctagctatcaactgcccgatttgaacaggctagaatttatatcctaaagtaataccaatattagcattatggggagcacttccgtccatcactttgcaaaaaccaagttgggtatcaagacctaccagaatgcgcccgaattccacaccaagtccgatattccatcctgcatcaaaccgattatagtccaatccgtcattaccgaatgtgtcaatcttatcatcaccggtgatattgatactgccaacggatgccccgccatcaaacttagtttttccacccactccgcaagccagatacggacctgtcgctatgacaagattagtgttatccgcaatattaaaacggaactgtacattgatgggcaattccaggtagagctggttgatttttacatcagcatcggcatctatgatgcttccgtcatatccttctgaatatttcgcacctttttgcgaaaagaacagcgaaggctgcaaggaaaccagatcggtaaactgatattccattcccactccgacacgtgcccccggtttgaatttggaatggtcagaattgtcgccaatgtaactgctaagattaaggccggcctttacattaaaagacagttgtgcaaagcccatcgtacaacacaacgctaaaaaaacagtaaaaaaaacttttttcatcacatttgtaaatttaaaaaaatttgattaatgtcctgcaaacagtacataaaaacactgttactttatttatcatgaaatttccgcaaaagtatataacatcttctataaaacggcaatttttcatacctcaaaaacggataaaaggaatttatgatctcttttacagaaataataaacagtaaatatacttttgggggtagaaaggaaagatttatattcgtattcactttataccttttctaaaaaaataaaaatgtgataagtcggattctacaaagttgttactatgaataaagcaaaaaatatttgggaatactggtctgtttttctttcttgccatactccctaaccagccggaatagatatcgggaaaacggttggtaccacattttatccgaacaaacagacagtatctccaaggaatctatcgtgacaactaaagatttcattttccttagactggagacagactattcggagaaatatacaattagcgggcaaatcagtaaatacaaaatgaataaatgggcgaaagaaacagaaagagcaacaggcaggcaaattgcttttgtattcaatgactctatcatagccaggccacgggttaattgcagaattgaaaatggagttttctaaattacctccatttctgataaaaaattgccggacatatacaaagaactgaaacaggaaaaaattgattccattgaagttcttttcaaggactgggaaaaggactccctttactgtaccatgtccccggaatgcagagactccataagaaagaatggcgactgattattgggaagtcactgcatggatagaccttgactactaagtccgaggagcactattggtacagcataacggattccactgaatatgaacagttggaaaaggcattgcaggaagaacttcgcaagcccaatctcagcagcagagcttcagactatatgaagtcaaaatcatatctggcatataaaacatacatatacaacaatcctgaatacatcaaccttatgttcctaagtttccttttcaaagaaatcaggggattgtacagctgtctggtagatgatattattcagaccaaatatacttccgctccaagtataaagacattcgtggaaaaaactggcaactttgatgacgaaagatttgccgtatataaatggcagtgaaaaggttggtttttgatgaacaaggagaaataaatatatgaagagggaaaagccatgttttcatatagaaagaaaaacgctgaagaaaggacaccgaacacgttccaagacaccgtgaatcttttcaaatgaccttcaacataatatatgtcatttcaaaggggacagttccatgtattcccgggacatatccagacttccatactctccaaacctgttataaactgcgaacttcgtggaagtaagttcttcaatatcccaataatggctctcaccgaaataaatcgtactggaaccctgatcataaaaagcccaccggtaataaatttctgttttggattcctcctcattcttgttggtccaaatgatggtacgtgtacaagtgccgtcccttttgaactgatagatttcccgggatgtttctcctgcatcatgaatggtattttcagtggactatgtcacgtcacaaaccaaagagatgacgttattctccccttccgtataatatccgttcttttcaacacacccggtcagaaaaaaactgtagagagaaccagacatatgcacaacctgttcatctgcataagaatttgggatccgcaatatatggaacatcctcatttagactgatcacctcaaaattccagttcatatcattgtttgtcaacaattcgaaacaggggactatatgataaccgacaccgtagaataacacactgacatccttcttctctatgtcatcatccagttcacatgttaccagaaacgcccatcctgtattcttataagcctgtggattcaaatccaaagacatctcaatataattgcagccatcaatataacactgtttctttatttggtgaagatgcctattcttatcaggggataattgctgtttctgatattagtgaggttgctaattatcagtcgtactttttgaaaaagcacagtctctgatgaaaaaccgtatcggttcggcacacagggatgacaaagctcattatgagggattacttataaaaataggaaacttattgaataaataacgtgaattcgaaataagaataaatatattttttgacaattagaaacatagcgataaaatcattaaatttgtagtgtccaattataacatttaaacgattaccactatgtttccagagtctaaagttacagagatttattgtatggccgatgatttttgcaaggaatttacatttcaacgggaaaaatatgtgattgagtataagaggaccaatcatcgtaacaaccccaaccgtatgagtgatgctgagattatggttattctaatcctgtttcactccggtggtttccgctgtttcaagcattactataagga

SEQ ID NO: 11882 - DNA, 7575 bp, Unknown
  gut microbiota DNA sequence
ataagaagaccaatcatcgtaacaaccccaaccatataagtgatgcagagattatggttattctaatcctgtttcactccggtggtttccgctgtttcaagcattactataaggaatatgtctgtaaacatctgaaacacctttttccgcgtcaggtttcttataaccgttttatagaattggagaaggaagtattgcttccactgaccatcttcatcaagaaagtcctgctgggaacctgtaccggcatcaattttgtcgactccactcccttacgtgtttgccgtaaccaaagaatccttattcataagacatttgagggacttgccgagcgtggaagtgttcaatgggatggttcttcggattcaagttgcatctgataatcaatgacaagggtgaggtcctcaatttcatgttcacgtctggaaatgtggatgaccgggaaccgttgaagcaaggtgagtttctggagaacatcaaaggaaaactatgcgcagacaaaggatatattggtcaggctctgtttgagaacctttttcttaatggtatacagcttgtcactaaagttaaaaacaatatgaggaactcactgatgagtattaccgacaagattttgctcagaaaaagagccctgatcgaaacagtcaatgacgaattgaagaacattgcgcagatagaacactccagacatcgttcattcaataactttatagccaactccttgtcggctatcgcggcatactgtttttttgaaaagaagcccgccattgacgtatattttgtcaatgacggacaacttgctattttttgattttatttcgaactcacgttatatattgtttggagaagaaatggacatcaacagccgttccttgacgatatgagtttggtaatgaattaacggatatgaacgaatcttggcccaggattacaattttagtgtagacctgggctaaactttatatgaacaatatgaaaaagcttctaagtattttgattttatgcttctgtttttcatcttttatacagggaaaggttaaataacctgctatgatgggagatcacatgataccccagcaaaatagtagtgttaagctgtggggatgggtagataataagaaagttactgttactacctcctggaataatcagacttatcaggtattaacggataagatgtaactatatcttttcagttgatatttacttattcttatttagtagggattctacttgatattgcttctaataagaagaggttataaaagtaattttcattttttgtgtttttattttccttatattgcattgatatatcaaaaagagtgatatatttgcagtgtaattgaattgataactgaaatttattctttaacttttttagaatagcttatttaagtagggactgtattgtatggatatggatataacatcaaaggatataaagagaataagtgatattgccatgatgcaatctggcatatatatgaaaagcgatccggcaggtgatataaagtatttgcaggttaaggatattaatccgaggagtaaacctgattacagtcggatcactacagtggtggatagggggattggtgaccaatacaggttacggaaaaatgatttattgtttgcggctaaaggagcctctaattattgttttttgtatgatggggtagtggaaaaaatggtagcttcttcgtcattcattattatacgtattatatcaaaagatatactaccagaatttctttgctgttttctcaataccccatctgttcttaataaattaaaaaaatcatcggtaggtacaggaattcaggtaattcctcaatcggtactaagtgatcttcagatcggcataccttctatgcagacacaacagcttattgtacagatggatcaattgagaagagagggggaaagtatttacagtgaaatcaatgaactaaaacggagtttgcaggaacagttgttgatggattctttaaaatgaaatatgttatgatagaaattgcatattatatagcgggtaaggcgaaacaaatcttaggtggaacgctttctgtcaaccagtataaggattatgtattggctttgctatttctgaaatctgcaagtgagtactacaaatcaaatgactcttttcagtcagatgagaataaacctttccttcggttgttagtgtctgaacgtagctcttttgactatctttacaaagaacttggctcgctggagcttggcaagttgataaatgttgctctttatgaattagagcaagcgaacagccgcgtaattgaaggttatgaaattaatagagctatcaacttcgaaagtaatatattgggagatacggatgagagattgagtaaattgcgtgaacttcttcatttttttcagaaactgacattaacagatgatgctggcaagttaatagatatcggtgccttatataatctgttattgtacatttttgccgaagaggcgggtaagaagataaataatgtccttactcctaaagaggttattggtttggtggcggaattgataggcgataataaagataataatagtttgtgcgatccggtatccggcagtggtactctgctagttgaagttggtaaaagggttggaatcaggggagctaatattttcgggcaagaggcaaactggaatcaatatgcattgacaaaaatgaatctgatgttgaatggattcaaagattccacttttttttggggagatagccttagtaatcctaaactgacggatgacggcgggttaaagcggtttgatattgttgcttctataccaccatttgcagataagtgggcaacagaggaagcagagtttgatcgttatggacgctttcaatatggtattccgcctagaagtcaggctacatgggcatatattagtcacattctggcaagtttgaaacctaatgggcgggctgttgtcgtggttccggcgggggttttgtttcgtactagtgaaagtaagatacggcatcagattattgagcataatttgcttgaagcggttattgagttaccgcaaaatctgttttatggtgcggctatttctacggctattcttgttttcagaaaagacaggaagacgacgcagactttgtttatggatgcgcgtaaaggatatatttcgaataaaggtatttataaactttcggatacaatggtcgaacagcttttaaacacttataaggggtttcttagtggtgaacaggtttggcaggaaaatagttgcccggcttatattgctacacaggaggaggttcgaaacaataagtatgattggcagactgtcaaatatgtggaggagaagattgaaagagtggaagttgatgtagaagcaactttgcaaagaattgaaaaattagagaagagactggagtttgtcaatgaacagttagagtattgtacacagcagttaatcaggctaacaaatagaaaatagatataccatgggaactataaattctataatctgtgctattatcagcgcactatttactgtttttttggcacacatgtcaagaagaaaaaccagagtgacaatttactgtatggaaaatacgttattgacacaaagaccgaatgttccgggccttgcagtttttgtgaagtatgaagatatgacgcccattgaaaatctttggagaatatgctatatgctaaaaaatacaggaaatcagaatattgtgggtgagggaatccagtcatctttggtgactaaagggcatggacttcctttgtatacgagaaatataaaacagattattcaaatatccgctacagacaatagtatagccgagttgaaagataacaccctatattttaaacaatggttgccggatgaatgtatcaccattgaagctttggtggaaagcgcaggtgagaaacctgaattgtacattgataagcgggatattattaatgccaaagttattgttaaaagcaatatcaataagtgatcttttattattttgaagtggtaaattgaatagcgtttgtccaagttggaactttacccaatcaatagtaagagttcttttcttagtcttttttgcttatgttcttggaataaggtcttatctttgttcctgtctgaaaaaagaatgaactgtttaggttgatagttaatgtaatactgaatcattgaaaatgaataaaattatgaaaaagatttgctttcttctctttttgttttctgcatgcatagttcaagcacagaactcttattgtaccgataaagatatatcttatgtccctgactctgaaatggacgcttatcgtctggaacgttgtaaacttgatatttattatcccgaaaataagagggatttttcgactatcgtatggttccacggtgggggtatggaaggtggaagtaaatttattcccaaagaattgacagaacaagggtttgcagtggtggcggtaaactatcgtttaagtccgaaggcgaagaatcctgcttatattgaggatgcagctgaagctgtagcatgggttttcaagaacatcgagaagtacggtggacgtaaggatcgcatttttgtttccggccattctgcgggaggttatctttcattgattctggcgatggataaaaaatatatggcaacatatggagtagatgctgatagtgtggctgcttatcttccggttagtggtcagacggtgacacatttcactattcgtaaggaacgtggtttgcctaacggtattccggtggttgatgaatatgctccggtaaataaggcccgcaaggaaacagcccctcttgtactgataacgggggacaagcatctggagatggcggcaagatatgaagaaaatgcgctgttggaagctgtcctgaaaagtataggtaataagaaagtgacgttgtatgagatgcaaggattcgatcatggtcaggtgctcggtccggcttgctatctgattgtagattatgtgaagaggtttaaataatatagttataaataataagagattggaagatgaaaacacgtagtgatacttttcagtttgagaaagaattggattggaagaaaccagctccgggaatccgccgtcagatgatgggatatgacgggcaattgatgatggtgaaggtggagtttgaggaaggtgccgttggggctgtacatcaacattatcatagccaggctacttatgtcgcaagcggcaagtttgaactgaccattggtgaccggaaagaaattctctctacgggcgacggttattatgtagaacctgaccagcctcatggatgtgtttgtctggaagcaggtgtactgattgatacatttagtcctatgagggctgacttcctattgtagtatctagatcgaaagtcagacagatgtggtatgaaattaccacatctatggtatttcccctgaacagaatctgcactatctttgtcatatcttgaaacaagaaaatttaaaaacatatatatatggaaaagattgcaaagaaattgacggatctagtaggtaatactccgttattggaacttagtaactataataaaaacaatgatttgaaagcccgtctgattgtaaagattgaatcttttaatcctgcgggaagtgttaaggaccgtatcgcattggctatgattgaggatgctgaaacgaaaggtgtcttacaacccggagcaacgatcattgaacctactagcggcaataccggtgtgggattggcttttgtttcagcagcgaaaggctataaactgattttgacgatgcctgatacaatgagtattgagcgacgtaatcttctgaaagccttaggagcagaattagtgctgactcctggtacggatggtatgaaaggggcaattgccaaagcggaagatttaaaaggtataactccgggagctgccatcttacaacaatttgagaatcctgctaaccccgccatgcatttacgaactaccggtctggaaatatggagagataccgaggggaaagtcgatatctttgtagccggtgtaggtactggcgggacagttagcggtgtaggtgaggcattgaagatgcgtgatccgagtataaagatagtggcagtggaaccatctgattctcctgtactgtcgggaggaaaacctggtcctcataagattcagggaatcggtgcaggatttattcctaaaacgtacaaagcttctgtcgtagatgaaattattcaggtgcagaatgacgatgccattcgtacgagtcgtgaattagccaaacaggaaggtttattggtaggtatatcttcaggagcagctgtatatgccgctacggaactggcgaagcggccggaaaatgcgggaaagatgatcgttgcgttattgcctgatactggagaacgttatctgtctaccattttgtatgcttttgaggaatatcctttgtaaggtataattggtcaaatgaaaatgtgaggtaacttccaaagattcaggttacctcacattttttatataaatattattctggattctttattgaacctcgaaacttcctttcaaccgaatatccaccgaagaagcccccaccatcaccgagaaacttcccggctctactgtaaactgattattcttatcccataaccccaagtcttgaggagtaagtgtaaagctaatcgtttgttcttctcccggttgcaaatgaatacgttcgaaaccacgtaatactttatcgtaggttgttacgctactaaaatcatcacggatataaagctggaccacttcatccccagctttctttcctgtattctttacagtgcatgaaagagtgatattctcttgtgccccgataactggtttggagattttcaagtctgaatatccgaaggtcgtatagcttaaaccatatccgaaaggataaagcacaccggcaacacggacttttcctttagaatccgaacccggtttgaatgggaaagcgaaaggtatctgtcccacagatttcgggaaagtaactgccagacgtccgcccgggttatagtctccgaaaagaaccttggcaatagcatctcccatgaattcgccggggaaccatgcatgaatgatggcaggaacatatttgtttgcccaattgatagtagctgctcttccgtctaccattaccagaacgacaggttttcctgtagcataaacagcttccaataattgctgttggcgcccgcagagatcgaggttggtacgtgagaattcttcccgaaccgtcttctcatttccacctaatacaaggatagcgacatccgaagcctttgctaattctacggcttcattaatcatcgcttgctcctgtgtgtctaatggaacattgtatagttcactctccgggaaatacttatcaataatatcacaaccttttgcatagcgaacttctgcattgggcagatattctttgattccctgatagacagtctttatagatgcattggcgggaccgtatctgcaagtcagttctttcacttcttccgcattcggaccgataacagctattttgctaaaactcttggatagcggaagcatctctttttcatt

SEQ ID NO: 11883 - DNA, 165567 bp, Unknown
  gut microbiota DNA sequence
gaataacggcttataaagtacgtaaccaatagcactgccaatacccaattctgccagattgaggaaacctaacagattttgcaatgtgcctgtcaatccgacaaaatccgctcctaacgtatcaagaaatatctttcgagaaaagaaagataatgctagagtcaggaaataaaaaataagattgacacgcgcgttaagcaaggatttccttacgcgagattcttgtgacataaattgtaattaaattattctttttctgaataatacccatttacatgcccgtatccgtagccatatccataaccttgcccgtaaccgtagccgtacttcttcttttctacctgactgtcattcaacacgatacacatattcttgaatttgccgtcctgatgcaagcgttccagttcgggcaagtaacggcggtctaacactccgtcacgaataacatagattgtgagatctgtcacacggctgacgatggccgcatctgccaccaccaaagcggggacattatccaagatgatgtaatcataccgtttcttcagttcgtcgatcagctgatcaaaacgttcattcatcagcagttctgccggattgggaggaatgattcccgcaaagatggtatcgacttgaggatggaaagctccgacggttatcagagtgtccggatttgaattcagaccggacagataggtacttaatccttctttcctgtttactcccgccaatttactttgagtgtgtttgcgcaggtctgtgtcgagtaatatgactttctttccggaaatagctaaagcaaccgccagattgcgggagacaaatgattttccttcgccggacaaggtagaggtgaacatcaggacacgggcttctttcgctatgaagttcagatcgacacggagcatacggaaagcttcggagatacggtcgtttctgctatcacttactacaatcgcatcgtctccttccgaatctttgcgtgccggaatctcaccgacaatcggaatggtagtgtattcttcaatatccttacgtccgcggacggatgtgttcaacagcaggatgatgacctgtactcccaatggtatcagcagccctactataaaggcagcagccagtatggaagaacgtgcgggagataccggtgaataggagccgaaaggttcttcaaccacccggatattggcttcggtaatggccagttgcaaggcgttctcttcacgtttgttgagcaggaaggtatagagggtctctttaatagattgctggcgcataatgctcaacgccatcttttcctgcttgggtactgcctgaatgcttgacgccaggcggttctccactgcttttgccttatccagacgaagacgcaaggttttcatataattgtccatagagcctgaaattgtcgcacgcattccttccagattcttatccgctgcctgaactacgggattcttctcgcccgaactttctttcaggcggttgcgttgcaacataagttcgttataggcggtaatctggctctgcatactgacatctcccactcctgtcacgttcggaatcagctggtctttgcgggtaacatccgccaggtaggtcttgatggaccgcgcaatagacaactctgtctccaattgtgcgctttcttcctttactttactgctctcagccaagtattgcgtggcattggcactcatatctacaatctgattgcgttgcttgaaatcggtgaggtcttcttctacgtcacttagttcacggctgataatagagatacgttcgtcaatgaatttagctgtgttggccgcaatgcggtttttatcttctatgatcgtctcgctgtatactttcaccaaagcggccagaatagcgtcggcacgggatatattggtatcggaacaggttatctgtaccaacgtggtgcgttcgcctgccaatgaggtcgctatcttggactggtaaatgtttgttgctatctccggactgatacggctgactgatatcggttgggaaagataggcggacaagttttccggacgcaactgcacgacgattcttcccgcttctgtccggatggtgtcattgtacgttaggtcctgctcctgcattcggcccttttctcccgccactttccagtcggatatacggaactttgtcgtgttgaggggagtaatattgaatgacactggctgattgtaagggtcgataaaatgaacttctaccggtgattccgcataaaggggagcatcacgcagtatgccgtctttggcataacccacatccagatgaaggcgattgactacttcacgaagcaactggtgggaacgcaggatatagatttcattatcgacactggttcctgttatgcctccgctcacttcgagcatggcggacatgtccgaagcggatttttctttatctttcaccagcatcactgcctggcgctgatagaccggctgaatggtcagtacataaaaataagctgatcccacgcatactaaaacggacaggacaaaccagtaccagttggctatgatcagttcgacgacatcacgaagattgattcctccttcgtctttcttgggtgttctctcgttttcctgaatatattccatattttctttttacttgcttagtacgacaatcagggatacaatggaggctaatacggaaatgatacttgctcccgctcccaaatatgacaatgcggagcttcctttcacgttgatggatttgttgggttctacatataccacatcgttctgctgaagataatagcagggagactcaagtacatcccgaccggaagtaagatcgaccgtataggtgtgtcttttcccttcttcttcacgaagtacgaggatattggtacgtttggccgtgggtgtcaggtcgcctgccatgctaagcgcttcgagcagtgtgatgcggtcgccagccatctcatgcacgccgggattgcttacctcgcccattaccgatattttcagtcctttgatgcggacactcacagcgggggctttgatatattgtccttcttccagacgttttttgatttcgtccgccagttggaggcgggtcagtcccgctgcctgtatctcacccaagacaggtacgtctatctttccgttcttgtctacctggactccggtggtttcctggatattcgtgcctccaccggatgtggatgagcctagtatctgcgtattggcaaagggagcaagcagttccggctccttactgctcaccatgatatagagctggtcgtccggtttgatacgtaattcatagtcctgctgtatcacctgagcgggatttgccaatgaatcaactccttgcaggtagatcatcttcttggaagagatgcaggaagttcctgtcagtaggataaataataaaagtccgaagtttatctttttcattatttgttgatgtatgtataaagtaagtatgtgtttgattaccaaaagaaattccgatatgtcttataccatttcctgcctgtggcagtttcatgtttcatgatgaaataacggatgatgaaatgagtagtcagccagaaagccaaatccagtaaaagcatgaaagtggtattgatatagaatgataatataaagttggagacaacgaaaaacagtgacagcatgagcagggttatcatcacggtacgtactttcatgcctgtacgcaacaggcgatggtggatgtggttcttgtccggtgtaaagggattgcgtccctcactgacacgggaatagaacacacgcacgacatcgagcaggggaatcagcagtgtggagacggtcaccatattcaggttcatcgtaaacgggtcccaaagctgtgtcttctgccagaaatgcaggactagaaagctgagtatataacctaacgtcagacttcctgcatcgcccatgaatagtttcctgccggaaacgctgaatacattataataatagaaggtaatgacgactcccaatgtcgctgccgccagaaaagcatgagtccattggccgacgagcgcacaaacgataataagcagtcccagtgcaatgcagctcagaccagaagccagaccgtcgataccgtcaatcagattgatggcattcgtgatgtatacagtaagaaagactgtcaacggcattccgatataagccggtatctcatgcagccccagcaatccgcccaaatcattaatccacaaaccggacaacgggaaaagaagagctgccagaatctgtatgacaaacttataacgatagcctactccgacaaggtcgtcggcaactcctaccaggtacaaaagggtgaggcctactattaagaataaatattgtatgaacagatcggaagcccatagcatatcgaccggatgattggtataataacggatccccgtgacagaacataaggctatcaggatgacaggaagaaaagaaagaccgcccagacgaggaatcggagttttatggactttccggctatcaggaacatcaaaaagacgtttcttgtaggagatgaataaaatacgcggaataattacagtggcaagcagtatggatagtaagaatatgcctgctagataagcaataatcatgatttccccaataaaattacattgattgttacaaacttatgcggcagagcgctcacataagttcttcatatataccccaattaataaattactacaccacccgttcgatatatcccacaggcatatcgacactggcacatccgagcatatccagccggacggcaatttttgtcttcccgttcaaagtaaccagctcaccttccagtcctctcaacgggccttttatgacacgtactttctcacccggactcaatggagtattactcatattgactgcttcctccgaatagtctaacatgaatttgaacttctccatttgggtatcgggtataacagccggagcgctctcaccatgaagcaccatataacggctgacggccgatagcataagaacgtctttctgttcttgtgcatcaacacgtacaaatattttcatcggaattacgatgtgatcgatctgcttgcgacgatcactccacagatgggtctttctttgaaccggaacatagttttctatgcccatttttgttagccgctcgcttgtctttttctcgtgataaatacgaacttgagcaaccaaccaacgctttttagacaaggctacgccgttacctgtcacatgtgcaggtaaaaccttagtcgttacgcgttcagaagtaagtttcattatttataaagatcaccccgtcgcccaaagagctaccggataattttgccgcaaagataaataaaaaaatacagactcaataaagaattcaaaaaactttttacttattactaaaaaccgtccacgcacatcttcctgcaaacacaagaaaacgattaacgcttttggaaaaatttggcataatattcctttttattatttaaaaaggtggctgtgacatagacagtcattggattttattctcttttctatatatttgcgcccgcatttatcatttgggattaattacctcattctaaaaaaacagcaaaatcaatttaaaacaatggagagtataaacgcagtaattacaggagtcgggggatatgtgcccgattacatcctgaccaatgatgaaatttccaagatggtggataccaccgacgaatggattatgggacgtatcggcattaaggaaaggcgtatcttaaaagaagagggactcggtacttcatacatagcgcgtaaagcggccaaacagttgatacaacgcacaaaaaccaatccggacgacatcgatctggttatcgtcgctaccaccacacccgactatcgtttcccttcaaccgcctcaatcgtatgcgaaaggttgggattgaaaaatgcttttgccttcgatatgcaggctgtgtgcagcggattcttatatgcattggagacgggggctaattttatccgttcgggaaactataagaaggtaatcgtaataggagccgagaagatgtcgtccatcatagattatacagatcgtgctacttgtcctatcttcggtgacggtggtggtgctgtcatgctggaggcaacaacggagaatgtggggattatggacgcggtattgagaacggatggtaaagggttgcctttcttacatataaaagcaggcggttcggtatgtcctccctcctactatacgttggataacaagatgcattatatttatcaggaaggacgcaccgtgttcaaatatgcagtagccaatatgtccgatgcttgcgaggctctgatcgaaaggaatcatcttagcaaggagaagatcgattgggtaattccccatcaagctaatcaacgcattatcgcggcagtcacacaacggttgggaataccgccggagaaagtcatggtgaacatcgaacggtatggcaacacaagtgccggtacacttccgctctgcctctgggactttgagaataagttcaaaaagggagataacctgattttcacagcatttggagccggattcgcttggggagccatttatgtaaaatgggggtacaacggaaataaagaataatagaagagagtaataaaaaatccctttgattctcaatgaatcagagggattttttattttttcttggttgagaagcggtgcgtacgggactcgaacccgtgaccccatgcgtgacaggcatgtattctaaccaactgaactaacgcaccaaaatatcatttgacaatcacaatcttcttgattgcggatgcaaaggtagatatttttttgaaacctacaatagctttcatatcttttttctgaaaaagtgggtttattaagaattatcgtgtacatttgcagctattacataaaatagaaaatagaatgaaaaatacaccaattgaacgacatctgattgatgaaaccataaatgagtttcaaattgtcgatttttctaaagcaaccattcgtgaagtgaaagctattgcttcaaaagcggaagccgcatcaggggttgagtttatcaagatggaaatgggtgttccgggacttcctccttctgccgttggggtgaaagcagaggttgaagcgctacaaaaagggatagccagcctatatccggacattaacggactgcccgaattgaaaaaggaggcttctaactttatcaaggcatttattaatgtggatttaagcccggaaggctgtgtacctgttaccggttctatgcaaggcacattcgcttctttcctcacttgcagccaatgtgatgaaaagaaagatacgattctgtttatcgatcccggttttccggtgcagaagcagcagttggttgtgatggggcagaaatacgagacattcgatgtatacgattaccgaggcgacaaattgaaagaaaaattggagagttatttgaagaaaggcaatatatctgcaatcatctactcaaaccccaataatcctagttggatctgcttgaaagatgaagagttgaggattatcggtgaactggctacgcaatatgatgtgattgtactggaagatctggcctatttcgcaatggacttccgtcaggatttgagcaagccgtatcaggctccttaccagccgtcggtagctcattatacggataattatgtcttgttgatttccggttcgaaagcgttcagctatgccggacaacgtatcggtgtaagttgtatttccgacaagttatatcacagaagttatccgggactgacaaaacggtacggcggcggaactttcgggaccgtcttcattcatcgggtgctctatgcactttcttccggaacgagtcattctgcacagttcgctatggctgccatgctgaaagcagctaatgaaggacaatacaatttcctcaatgaagtgaaaatatatggtgaaagagcgaagaagttgaaagatatcttcctgcatcacgggttccatctggtatatgacaatgacttgggtgatcctattgcagacggattttatttcacaatcggatatccgggaatgactagcggtgagcttgccaaggagctgatgtactacggtgtaagcgctatctcattagtgactaccggaagccatcaggaaggtttgcgcgcgtgtacctcttttattaaagaccatcaatatgcacaacttgatgaaagaatgagattatttgcagaaaatcatccggtagcctgacgtttgcggtaagacatccataaaagcaccctgctaaatcaaaaaaaacggaaataacgataattattccgttttttttattaatttaggggcatgaatatcaacctggacatatttaagattcaatcgaataatgtattgccgtcaagaggaaagattttgatatccgaaccttttttacgcgatgcaacgtttggcagatccgtaattctactggtcgatcatacggaggaaggaactatgggattggtcatcaataaacaattgccactgcttctcaatgatgttgtcatggaatttaagtatttggatgaaatacctctctacaagggtggtcctgtagcgactgatactttattctacctccatactctagagaaaattcccggctctatccctgtcagtaaggggcttttcctaaacggtgattttgaagaaataaagaaatatatattgcaagggaataaagtgaatgaatgtatccgctttttcttgggatattccggttgggaaagcaatcagttacatagtgagataaaggaaaacacatggctggtatccaaagaagagaactcatatctgatgagaaacgacaccaaagatatgtggaaagaggctttggaaaagctaggcagcaagtatgaaacgtggtcacgttttccacaagtgcctacgctgaactgacatttaggctttcattacctatcttataggaattcagttattttcggggattcagacattgaagaagtacggcatctttatagcatccctctacctgtaaccagttctttaagagtccgcattgggtaaagccacacgatgcaaatagtttcagacagacctcgttgtccactgccacgtgtgcatagagctgcttcaaggacagaaaaccgaaagcatattcgcaaagtagcttcagcgcatcggttgcatagccttgccgacgatagtttttatgcacggcaataccgacctctccacgcgaatggagcggaacaaaatcagtaatatcaatagtgcctagtatgtcatgatcggatttactcacaatcatcaagcgtaattgcttgtctgcaaagacatcacattgtgagccttcgatatattggcgcagtacataacgggaataagggactgtgaaattgctgatatcccacatagaaggatcattctccatctcgtacataatatccatatcttccggctctactgcacgaagatagatgcgctcgtttgtcagataagattgtttcatgcgctttagtcttttgtgatgtgaagttcgttacgcaatcttttctcactgggcagacagaaaagagaagccgtcaagccaatgagcatacaaagattgccggtactgcttaatgtcaaatagtaacataggatgttggctacaatggcaacttcaagtattcccaatcggacaatgctccattgcacataacgtttcagtgctagcgtgatagtcatattgtctattttctttttgagcaccaagctgaatagcttcaaagaaagaggtacgcaaagtgccgtcaacagaatgccgatagtctcaaaataataagtagcctgtacattatctaccagatttcctacgggcaagagatcgaactcccctgctccaagcagaaaagccggaaatacccaaaagaaaacataacctatattcaaattcctgacagcacgttttatctgttcttccatgttcgttctaaacttctaaatattaaattatacagttccggtgaaaagagtccggttcacaatactacgccccaaagttacttcatcggcatattccaattcatctccaacggatatgccacgcgcaatcacactcagtttaacccctagtctatccaatttacgatagatatagaaattggtagtatctccttccatcgttgtgctcaaagccagaattacctccttaattcctccttcggatacccgccgcaccagactttcaatctgaaggtcgctcggtcccactccgtccattggagaaatgactcctcctaaaacatgatagagcccccgatattgctgggttgcttctaccgccatcacgtcgcggatattctctactacgcaaatagtggaagcatcccgttgtggattggcgcagatctggcaaatttcagtatcagatatgttatgacataccttacagtacttcacctctcgtttcaatgtcatgatggaatttccgaaagcctctacggtggccgtatcctgacgaagcagatgcaaaacaagcctcatggccgttttacgtcctatacccggcaacttggaaaattcaccgaccgccttttcgagtaatatggaaggatattgttgattcatagataataattacggttctatcgatattttggcgcaaagatacagattattgttataatacctacaaaaaacactacctttgcagtcgatatgatgatacttgtcactataatatgctactttgcggtattattattaatagcccgtatcaccggatataaaggcggatcgaatgcagcgttcttcaagggagagaataaatctccttggtatgtggtttcttttggcatgatcggcgcctctatttccggagtgaccttcgtttctgttcccggcatggtgcgtggcatggatatgacatatatgcagacggtattcggctttttcttcggatatatggtggtagcgcatatattgcttcccttatactataaactcaacttgacaagtatatacggctatctcggcacacgcatcggaacgcgtgcctatcgtaccggctcgtttttctttttattgtcgcgtatgttgggaacggcagccaaactctatctggtttgtctcattctccacacttatgtatttcaggagatgcatattcccttttggataatcgctgtcggatcggttgccttagtatgggtgtatacccacaaaagcggaataaaaacgattgtatggacagacactttgcagactttctgtctgatagcagcactgatttttattatctattttacaattcaagaattaggactggattttaacggcattatccagaccattcagcacaatgaacacagcagaatttttgtcatggatgattgggtatcccggcaaaatttctttaaacagttctttagcggtatcttcatcgtgattgtaatgaccggactcgaccaagacatgatgcaaaagaatctgtcttgccgtaatcttcgcgaagcacagaagaatatgtattgttacggattctcatttattccgctaaactttctattcttgtgtctgggaatattactgattacattagccggacaaatgcaattggcattacctgctatgaatgatgatattttacccatgtttgcagcgcaaggctatctgggacaacccgttctgatactttttacaatcggtattatcgcagccgctttcagcaactcggactccgcactgacggccatgacaaccagcgtatgcgtggatttgctgaatacggaaaaagacagtgaagaaacggcacgccgcaaaaggaataaggtacatttatccctttcagtcttactgactttcttcatctgcctcgtagaaactctaaacaataaaagtgtaattgacgcgatctatatcatcgcctcttatacttacggtcccttattaggaatgtttgctttcggactttttacccgcagacaaaccaacgatcggtgggttccgttgatagctatcctttcacccctactctgttacctcgccgattggtggattggaaaagaaaccggatataaattcggttatgaattgctaatgttaaatggaacacttacctttgcagggctaatattgatgtcaaagaaacaaatgactagaaaatggaaataacaagcgcagaatttgtgattagcaacacagacgtgaagaaatgtccggcaggcacttttcccgaatatgctttcatcggtcgttctaatgtaggaaaatcgagtcttatcaatatgttgaccgcccgcaagggattggctatgacttctgccactccgggaaaaactatgcttatcaaccatttcctgattaataaaaactggtatcttgtcgatcttccgggatatggctatgcccgtcgcggtcagaaagggaaagaccagatacgcacgataatcgaggattatattcttgaacgggagcagatgacaaacctttttttattaatagacagtcgcttggaacctcaaaagattgatctcgaattcatggaatggctgggggaaaacggcattcctttttctatcattttcaccaaagccgataaactgaaaagcggacgattgaagatgaatatcaatgcttatctccgtgaactgagcaaacaatgggaagaactccctccctactttatttcttcttcggaaaaccgcaccggacggacagaaatacttgattatatagaaagcataaacaaagatctcaatataaaatgaaaatgaagaagaattttttatctgctaccttgatggtggtatttatgctgacggcaactaacagccaggcacaatcatgggcggacttgttgaataaggacaacatctcaaaagttgtgaacgccattacaggaaacactgaaacgatcgacatgactggaacatggagttacaaaagctcagccgtcgagttcgaatcggataatctgctgatgaaagcaggaggtgcagccgcagcgacaatggcggaaaacaagttgaacgagcagttgagcaagattggcattaaggacgggcaaatgagtttcacgttcaatgcagacagtactttcaccagcacagtgggaaagaaaacattgaaaggaacttactcctacaatgcttccaccaaacaagtggacttgaaatatttgcgattgctgaacctgcacgctaaagtgaattgcagttctaattcactggaattgttattcaactcggataaattgctaaaattaatggcgtttatcggtagtaaaagcaacagtaccgcactcaaaaccgttagttctctggccgataactatgacggaatgatgcttggattcgagcttgccaaatagcaaatacaatccgtttaatactatttcgcactctataaagtatattttaagggaaaaagcattacctttggcacttgtaatcaaaaaagagaaggaaaaatgaaaaagatacttttttttatgactttgttagtaatgggggcaagttttgcatttgctcaaaccaatgcagatattaagtttgacaaaacaactcacgacttcggcaagctctcagaaaacagtccggtagttagttgtacatttacctttactaatatcggtgacgctcctttggtaatccaccaggcggtagcttcatgcggatgtactgtacccgaatatacgaaagaacctatcatgccgggcaaaaaaggtacaatcaaagtgacttataacggaacaggcaaatatccgggacatttcaagaaatcaatcactttgcgtaccaacgccaaaacagagatggtaagattgtatattgagggcgatatggtagcaaaagacgctaaataaaaaattttaggctattacataaaggagaatctttcggttctcctttttttttgtttactttgaagacggaaacgtaaattgacacattagcaaattataaaactatgaaacaagaagaagacaaattcaccgggttgcccgagaatgcgtttagagaattgaaaccgggggaagtatacaacccgttgatgggtccctcaaaaaattatccggaagttaacttctggtcggtagcatggggtattgctatggcaatcctcttctcagccgccgcagcctatctgggattaaaggtaggccaagtattcgaggcggctattcctatcgccattattgctgtaggagtctccggagctgccaaaagaaaaaatgcgttaggagaaaatgttattatccagtctatcggagcttgttccggagtgattgtggccggagcgatcttcacacttcctgctctttatatccttcaggcaaaatatccagagatgacagttactttcatgcaggtattcatcagttccctgctgggtggtgtactgggaattctgttcctgattcctttccggaaatatttcgtaagtgatatgcatggcaaataccctttccctgaagcgacagctaccacacaggtattgatctccggagaaaaaggcggaagccaagccaaacccttgctgatagcgggaatgattggtggactatatgactttatcgtagccacattcggttggtggaatgagaattttacgacccgtgtgtgcagtgccggagaaatgctggcggaaaaagccaaactgatattcaaggtaaataccggagctgccgtattgggattaggttatatagtcggattaaaatatgcttccatcatctgcgccggttcattggctgtatggtggattatcattccgggcatgtccgctatttggggagacagtgtgctgaatgcatggaatccggagattacatccactgtaggaatgatgagtccggaagaaatattcaaatattacgctaagagcattggtatcggcggtattgctatggcaggtgtcattggtatcatccgttcatggggaatcattaaaagtgcagttgggctagctgccaaagagatgggcggtaaaggcaatgtagagaaaaacatcatccgtacacaacgggatctctcgatgaagattattgcaatcggttctatcatcactttgatactcatcgtactgtttttctactttgatgtaatgcaaggaaatctgctacacacattggtagcgattcttctagttgccggcatttctttcctgttcactacggtagccgccaatgcgattgcaattgtcggtacaaatcccgtatcgggtatgacattgatgacactgattctggcctctgtagtaatggtagccgtaggactgaaaggcccttcaggcatggttgcagcattagtgatgggcggtgtggtatgtaccgcactttcaatggccggaggtttcattaccgacttgaaaatcggttattggctgggaagtacccctgccaaacaggagacctggaagttcttgggaacaattgtatcggctgcaactgtaggcggtgtaatgattatcctgaataagacatatggatttacgagcggagcattagctgctccacaggcaaatgcgatggctgctgttatcgaaccgttgatgagtggtgtaggcgcaccctggttattatatggcatcggtgctgtcttagcgattattctgactctttgcaagattcctgcattagctttcgcactaggtatgtttattccattggaactgaatgtgccgttggttgtaggcggagctgtcaattggtttgtgaccagccgcagcaaagattcgactatcaatacggaaagaggagaaaaaggaacattgctggcttccggtttcattgccggtggcgcgttaatgggggttatcagtgccgcaatgcgcttcggtggaatcaacttggtgaacgaagcatggctgaacaatacttggtcggaagtgttggcattaggggcatacgccctactgattctctattttatcaaagcctcaatgaaaattaaataagcaaacatgaggagacttttatccgtcatagtatcgtttataagtgcaatgacttttgcccaacaacagcctgcggagcttactccgcaggactctcgaacgatgctgcaaatcggaaagtcttatttgggaacccaatatgtggccaatacgctagaccgggatggagaagaagagctggttatccggaccgatgcagtggattgcctcacttttgtagaatacacactggcgcaagctctcggatcttcttttactgagaacctgcaaaagatacgctacagagatggaattatcgacggatatccttcccgtttgcattacacctccgattggatcgagaatggtatccgtcaaggattccttacggatgtgacggcagagaacagcgtacaaactcttcaattaagcctctcttatatgtccgctcacccaaaactatataaaaagctagccaattctccggaaaacgtaacccgaatgaccgaatacgagaaagcattatccgggaaaatcgtacattggctgccgaaaagcgaattaccggaaaatggattatcctggattatggacggagatattatcgccatcacaacgaaacttcccgggctggacattgctcacgttgggatagcgcaatatataaaagggaaactgcatctgctacatgcttcctctacactgggaaaagtagttgtcagtgataagcccctcaatcatatgcttaacaataataaatcgtggacaggtatacgtgttgtccgaatgtctcactaaaaaaataacgaattatgaaacgagttaaacatttccttctagcctcgtgcttattccccgctttgctgggagcacaagaaatggcaaatgccaactttctggaacttactccggatgcccaatcggcaggtatggcaggtacaggattagctatcaccgataacggtagcacagctatctttcataacgcctctacaatcgctttctcacaggaagcaatgggcgctagttattcatacgctgatatcaacaaggactgtgcgctgcacagcgcatctcttttctatcggatcggaagagaaggtattcatggatttgctttgggattccgccacttcaaggatcctaaaataatggattaccgtccccgtatatgggatttggaagctgcctacttcaggaatgtagccaagaacttatcactgtcattgacattcagatatctgcaagaaaaagtagcaaaggaagcagatagcaagagcagtgttgctcttgactttggtgccacctattatcggaatacggatcttctggatggaatggcttcttggtctatcggtttccaagccgccaacttgggcaaaaagctggatggtcagaaattgcctgcacgattgggattgggaggtagtgtcgaccttccattcagcgtggagaatcgtttgcaagtagcacttgacttcaactatcttcttccttccgaaatccggcatttgcaagcaggaataggagccgaatataacttcctgaaatatggagtagtccgcgcaggatatcatttcggagacaatgataaaggaataggtaactatggtgcgctgggttgtggaattaatttctggccaatgcgcgtcgatttctcttatgcactggccgataaggattgccttatgcaccaaacttggcaactgggattcggagtagttttctaaattcattttcaaggcgctgcttcacttcgtccataggtatctcacgtttcaattcctgacgaagagaagtgacgcctttatcaataaacccgcaagggtgaatataactgaaataccgtaaatccgtatttacattcaatgccaacccgtgcattgtaacataatgactgctccttactcctatcgcacaaatcttacgggcacgaggggtatcaccttccaaccatacgcctgtagctttctccaacctccccgcttcaatgtcataagaagcacatacacgtatcaccgcttcttccaacaaatgaacatattcctttagtcctaatgcaaattcatccaaattcaatatcggataacacaccaactgtccgggaccatgataagtgatgtcccctccccgatctatatgataaagagtagcgccaatcgccttcagctgctcatcactcagcaacatattattttcttttccactgcgccccaatgtataaacgtgcggatgctcacacataataatgaggttctcatagacttcactctgggcttttgcccgaactacaccgtcaaaccactccgcctgccgttgccatgcttcggcatacggtattaaattccaatcgataaaagttgttttcataaaaacaaaggtaagaaataaaaagaaaatatgtacttttgcactgtaaatataacaaacacaactatgaaaatggacttcccacaggtagacttgcctaccgaagtattagcatggacgaatgttacggaagacattctcaatatttataagcaatcgtgtcggttgcaggcatgtattgttgccatctgcaccgaaggctcgatgaaagcctccatcaatctgcttgattatgaaattcgtcctaatgacctgataacattgttaccgggaacaatcatccaatttcgggagaaaacagaaaaagtatgcctctgctttgccggtttctccgcctattgtgccgaacgaatcaatctgatgaaaaacatcggtaatgaatatccaaaactgatagaacagccggtaatccctctcaatgaagaagtagccagctatctgaaagactattttgctctattatcgcgtgtcagttgtaatgagaactttgaaatggattctgaattggttgaattatctcttcagactatcttgacaagcatacggttgatatatcgtaaatttccgggtgaaaacaatagttcgaaccgtaaaaaggaaatttgccgggaattgattcaagccatcaccgagaattatagagatgaacgtcgtgcacaattctacgcagataaactaggaatatcgcttcaacatctaagtacaaccgtaaaacaagtgacaggcaaaagtgtgttggataccattgcgtatattgtggtcatggacgccaaagcgaaactgaaaggaactaatatgactattcaagagatagcttattctctaaatttccccagtgcctcattctttggtaagtattttagacggtacgcaggaatgacaccattggaattcaggaacagataattcctgtgaagagcgatagaggataaaattataaataacgaccccaaaaaaacgaacggtgaacaagttgcgcataatccgcaaagtattcaccgtttattatttacttacagtttgttttctttttacagtcgcttactcattttcttcccaagctcaatgaattgagcactacgctcacactggagaaggccattgcagcacttgccaacatcggattcaataacaaaccgttcaatggaaacaagataccggcagcaataggaatgccgatcagattataaataaacgcccagaaaagattctgatgaatcagtttaactgtctgctttgacaactgaaaagctttaggaagcagcaataaatccgatgtcatcaaagttaccatagctacgtccatagcaatatcagttcctttccccatggcaatgctcacgtcagccagtgccaaagcctgcgaatcgttgacaccatctcctaccatagcgactttctttccctgcatttgaagctcacgcacaaactcggccttatcgtccggcagagcgtcagcgacaaaacgttcaatccctaaacgggaagaaacagctaatgccgtccgttgcccgtcacccgtcaacatacagatgtcaataccttgacgtttcagttcttttaccgcttcggcagaagtagcctttatcgggtcagaaacagcaatgatagccaataattcattttcacgtccaaagtagatgataccattgccatccgattcatagcgaaccagcatttcagccatcacatcatttactgtcgcactgaaatcttttaggagtttatgactacctacccaataggtatctccctcataagagaccttgattccttttcccgtaatactctcgaagctgtccaatgcagcgggttttaccttctcctcgttttgaagagcagacacgatagcaccggcaagcggatgttccgatctcatttccgcagctaaaagcacatctttgaaataaggttcctgcgattgtgcccataaccatccggtagcagtagggtgtccttcggtcaatgtcccggttttatccagtacaacgacatccactttacgcatttgttccaaagctaccgcgtctttaatcagaatatgctggctggcagctttgcctattcccaccatcaatgcagtaggcgtagcaagtcccaaagcacacggacaagcaatgacaaggacagaaacagccgacagaataccataagagatatattcactgccaccgatggcaacccataaaacaaatgtcaggatagcaatccccaatacgacaggtacgaaaattccggtaatgcggtcgacaatacgttgtacgggagctttgctgccctgtgcttcctgcaccatggaaatgatgcgggcaagcaccgtttcactacctacctgtgtggcatatatgatgaacgagccacgctggttgatcgttcctgccaagactttatcgcctttcttcttttctaccggaaccggttcaccactaatcatactttcgtcaacatacgaatcgccttcggaaagctgaccgtccaccggtatctgttctcccgggcgtacaacaaccatatcacctatctggaggttctcgatcagaatctcctcttccgctccattgcgcagaacccgggcaactttaggctgcattcccatcaacttgcgaatagcagtcgaggtattgcctttagcacgctcctccatcaattttccggtaagaacgaaagcgataatcactgcagaagcctcataatagacgtgcggttccaatccacgagcataccaaaattcggggaagaacgtattgaacagactgaacagaaaagcaatggaagtactaagtgcaaccagtgtatccatattgctccgtcccagtttagcctgtttccaagccccggtaaagaaaccacctccgaaaaaggccatgacagggatagcaagtaccatctgaatctcattagagtatggtacatgcatcagtatcatggaaaacaccagcaacggtactatcaaaatccaagccccaaccactttccacgtcaaacgagtgtaccgcttatgctgctcctcttcccggcgttcctccctgtgggcttcttccacaatcaggtcataacctgccgcaagcacagccgcacggatttctccgggagtcagttgatccttctcataagaaacagtcaacgtattggtagcaaaattaacggaagcctcgataactcccggcatttttttcactgttttttctacattattagcacatcctgcacagtgcatattaagcacaggaaatgccttctttattgtgttacccatataattatagtttacgcctttcccgactccttaaaaggagtcgggaaagaaccattgtttattaatagaaacaagctaacacaggtatttgttcaattacttcttatcagtcttttgattacctttctttttttctttttcaagtttctttgttcgctatttcctgtttttactcactattcctagctaaattaaaacgtattccgatatatccttttgccccgtgtaccggtatattattggatcatcaaccttttaccctgaaagaaacggaagctgccgacatcgacttgcaattcagagggcatacacaccacggacaaacatggcctatcaattgggtgactgattatatatgcaaagccacggttatcgccaatggggaaacacacatatatatgtatcttccggattgtctctatggggaccacccttcagaatagggacacatggcgaaatggttattttcaattttcaatgaatattaatataacattgtcacatatgttacaacctccgggcaatctctgccttatctttgcagaaaaaatgatggaaggcaatagctactcggaagcatcattacgggaagcaatcattcaaaaattcggtaaacaacagcatttctatgcctgttcggcagaagatatggatgtggataccctcatcgaatttctgaagaagaaaggaaaattcatgccggtagaaaatgggtttacagtagacataagtaaagtctgcaaccactaagcctaattcccgcactctacaagaaaagcagcttaccgaaagagcgaatacctgaatatttttctgtttttattcgtccgattcatgaatttcatctatatttgtcaatagtgaatgatagaacaaatgtagaatttatagaaaaaacgagtatgaaaaaacaatatgtcagtttgcttgctattatactttcagtaagcggctttttcttttcttgtcatgacaagatgaacaaaaacactggtgcgttacagttcgatagtatccgggtaaatgagacggtacacctctttaatgatacagccaaaccggcatgtaacatcatcatcaatttcacctattccgacaagtcaacggatgatatgctgaaagacagtctgaatgcctatttcatatccgcttgtttcggcgacaagtatatcggagaaaagccggaggaggttataaagcaatatacagagaattatgtcaacgaatatcgccgtgatctggaaccgatgtatgccgaagacgaaaaagacaaagaggacgaatcctccatcggtgcctggtattcatattataaaggtatagaaagccatgtacaactatatgaaaaggacttgcttgtatatcgcatcgactataacgaatataccggaggcgcacacggcatttacatgactacctatctgaatatggacctcacactgatgcgtccgctccgtctcgatgacatcttcgtaggagaatataaagatgcgctgaccgacttaatatggaaccagctcatggctgataataaagtgacgactcacgaagcattggaagacatgggctatgcttctaccggagacatcactccaaccgaaaatttctatttaagcaaagaaggggtaactttctattacaatgtctacgatatcactccatacgctatgggtcctgtgaaagtgaccgtgccgttcccgatgatggagcatttattaggcagtaacccgattctgggagaactaaaagattaaacttcataaaaaacgaaacagcagtggaaatcatactgaaatattttcctgatctgacagaagagcagcgtaaacaatttgcagctctatatgacctctacatcgactggaactcaaaaatcaacgttatctcccgtaaggatatcgagaatttatatgaacatcatgtgctccattcgttaggcattgcaaaagtaattcaattccgtcccggcaccagtgttatggatttaggtacgggcggaggttttccgggcattcctttagcaatattatttccggaaacccaatttcatctggttgacagtatcggtaagaaagtgcgcgtagccactgaagtggcaaatgccatcggattgaaaaatgtcactttccgccatgcccgtgccgaagaagagaagagaatgttcgatttcgttgtcagccgtgcagtcatgcctctggcggatctgataaagatcatcaagaaaaacatttcttccaaacagcagaatgcgttgccaaacggattgatctgccttaaaggcggtgagctggaacacgaaacaatgcctttcaaacataagacggtcattcacaacctaagtgacaattttaaggaagagttctttgaaaccaaaaaagtggtatatgttccgatttagaaactatatgcttgatatataagataaatcatagagaaccatgaaaataaagagatttgagtttaatatgtttcccgtaaactgttatgttttatgggatgaaacaaaggaagcggttgttatcgatccgggctgcttttacgaagaagaaaagcaggtactaaaaaaattcattctatcaaatgaactgaacgtgaaacatctgctgaatactcatctacacttggatcacattttcggaaacccgttcatgctcaaagagttcggtctgtcggcagaagcaaacaaagcggatgaatattggatcgacgaagcaccgaagcaaagtaggatgtttggttttcagttgcaggaagcccctgtgccattgggcaaatacttgcatgatggagatattatcaccttcggacatacccaactggaagcaatccatgtgcccggccattctcccggcagtctggtgtactattgcaaagaagagcactgtatgttttccggtgatgtcctgtttcaaggcagtatcggacgtgcagaccttacaggaggtaacttcgacgaactgatagagcacatttgcagccgtctgttcgtactccctaacgaaaccgtcgtatatccgggacacggtgctcctacgaccatcggaatggaaaaagcagaaaaccctttttttagataaaatataatcccccacaaattatgaaaaccgatttgttagctagccgtcacatcggcatcaatgaacaagacacagccgtaatgcttcgcaagattggtgtagaatcattagacgaacttattgacaaaacaattcctgccaatatccggctgaaagaaccgcttgcattgactagtccgttgacggaatacgaatttggaaaacacatagccacattggctggtaaaaacaaactttatacgacctatattggattgggttggtataatacgattactcctgccgtcattcaacggaatgtattcgagaatccggtgtggtacacctcttatactccttatcagacggaagtatcacagggacgtctggaagcattgatgaactttcagactgccgtatgtgacctcaccgccatgccgctagccaactgctcattgctcgacgaaggtactgccgctgccgaagccgtaagtatgatgtatgccctccgctcacgcgcacagcaaaagtccggcgccaatgtagtctttgtggacgaaaatattttcccgcagacattggctgttatgacaacacgtgccgttcctcaaggtatcgaactgcgtgtcggcaaatataaagagttcgaaccttcaccggaaatattcgcctgcctcttgcaatatcccaattccaacggaaatgtggaagactatgccgcattcacagagaaagcgcatacggcagaatgcaaagtggctgttgctgccgatattctgagccttgccctgctgactcctccgggagaatggggagcggacatcgtgtttggaacaacgcaacgtttaggtacgcccatgttctatggcggtccgtctgcagcctacttcgccacacgggatgagtataagcggaatatgccgggacgaatcatcggatggtctaaagataaatatggaaaactctgttaccggatggcattgcagactcgcgaacagcacatcaaacgtgaaaaagcgacctcaaatatatgcacggcacaggctctgttggccacaatggcaggcttctatgcagtctaccacggacaggaaggaatttcgaccattgcctcccgcatccacagtatcacagtgtttctcgacaagcaactgaagaaattcggttacacgcaagtaaatgcacaatatttcgacacactgcgttttgaattgcccgaacacgtttccgcacaacagattcgcacgattgctcttagcaaggaagttaatctgaggtattacgagaacggagacgtaggtttcagtattgacgaaacaacggacattgcagccgttaatgtgctgctttccattttcgccattgcctccggaaaggactatcagaaggtagacgacatcccggaaagaaatacgatcagcaaagccttgaaacgtacgactcctttccttacccatgaagtgttcagaaaatatcatacggaaacggaaatgatgcgttatatcaaacgcttggatcgaaaggatatctcattggcgcaatccatgatctctctcggatcatgcaccatgaagctgaatgcagccgcagaaatgttgcctttaagccgttccgagtttatgggaatgcatccgttagttccggaagaccaggcggaagggtatcgtgaacttataaggaatttgagtgacgacttgaagattattaccggcttcgccggtgtcagcctacaaccgaattcgggggctgcgggagaatatacgggccttcgcgttattcgtgcctatctggaaagtataggtcaaggacaccggaacaagatattgatacccgcatcggctcatggaacgaatcctgcatcggctatccaggcgggatttacaacaatcacctgcgcgtgcgacgagcacggaaatgtgaagatggatgacttacgtaccaaagccgaagagaacaaggaggaattggctgcgctgatgatcacttatccctccacccacggtatatttgaaacggaaataaaagagatctgcgacattatccatgcttgcggagcgcaagtatatatggatggagccaatatgaacgcgcaagtgggattgactaatccgggattcatcggcgcggatgtctgccacttgaatcttcataagacattcgcctcaccacacggtggcggaggtccgggagtaggtcctatctgtgtagcggaacatctggttcctttcctgcccggacacggtatcttcggcaatacacagaatcaggtatcgtccgctccgttcggtagtgcgggtattctccccattacatacggatatatccggatgatgggtacggaaggactcacccaagctacaaaaatagcgatcttgaacgccaactatctggctgcctgtctgaaagatacatacggcattgtctatcgtggagcaaatggttttgttggtcatgagatgattctggaatgccgcaaagtgtacgaagagaccggtatctccgaaaatgacatcgccaagcgtttgatggactacggttatcatgcccctaccctctcattccctgttcacggcacattgatgattgaacctacggaaagcgagagtttggcggaattggataacttcgtagctgtcatgctgaatatctggaaagagattcaggaagtgaagaatggcgaagcggacaagaacgataatgtattggctaacgcgccgcatccggaatacgaggttgtgaatgaccgttgggaacattcctacacacgtgagaaggcagcttatccgatagagagtgtacgcgataataaattctgggcaaatgtagcacgtgtagacaacacattgggagaccgtaagttgctacccactcgctatgatacctttgagtaagcccggggctcacattccttgaggtgtgggcttatttctataagccaagggggcaaacaaactgaagccttggagaaacattgatttccccaaggcttatgctttgtgacatagaagataagtccaagtgtaaatctgaaagtatgatttctacttaacaatagttacagtatccgcttttaccttcttctctttcattggaatcttcggatcgccatatcctaacgcaacacagccatatactttatgactaaccggtactcccaatgcagtgataaattcacgtactccgggatcatcacaagtcgtacctaactgattgatccaacaagagccgatacctaaagactgtgcagccaaaaacatattctctattgcacaagcgcaatccatacccgcccaccattgagtaggttcgttcgaaacgattaccaaagtcggggcatgatagtaacagcaataagccttattgcgggcacgttcctgcaaacggacatcatcacttttagcaaaagctccttttatgcgttcatttagttctgccagtttactgacattctggatagcagtgaaatgccatgtttccaaatgcattccactcggagcatacgttgcagcctccaggattgtccgcaaatcttcttccggaacttgttgctccgtataagcacgcacgctacggcgcgccttgatgttttctaaaacttcatttgttttcatgggcgacaagtgttttatataagtatatcatcattattagtttgacagtctcaatactttgtactttttcctaccgtttgaccaatccgatctttgcgtttagtttgaaataatagaccccattctccctctccaaaaatccgtatttatccttctccaaagatcctttttcgaagcgagtattcagaaacaagaaatcttccatcacttgtttctcggatttatggtagcaaagcacatctccattaccatctaccagcagaataccttccactgccgaatccagcccggtataaatctttgcaggacgcattcccaatgccagtgccatcagaaattgctttattttaaattcatagaacttatgcttgtttatcagctcatccttgatcttcagcggattcatttgtttgataatctccgtcaactcactcacacgcgatatgccgtcaaggtgcataatacgaaccatctctgtcagtacacgcgggaaatgcaaatcaatcatcaaaagattgctacgaaatacacggtcggccacatccgaatatttaagtactcctcccaaacgttcgatcatcatcatacgctcggcaacttcattagggctctccggcaaagcattgatcttgtttactgtcggagtagcaaatttaatcccggtctgctccagcttaagattcgccgcacgccctccatccaacaatggattcatggcactcaaccgcgaacggacattaaatcctctcaaaggcgcttccgaatgccagaatgcaatagagaaatcggtgcgatcctccgtttttgcctccaagtcgaagatagccgcttcatccagaaactcctctactccatccggagaggtcacatcgttttccgaagaggatttaaccgctttcagtatcaagtccgctacgataccgaaatcttcacgagacatagttttaactcctgtttccccttctatgcgaatcgtctcttcctcaatataataccgacgtgtcccgtcgtgctcttccctctgaatcattgcaacaggccagaatatatctcctgcctttgcttccgccgtgcctaacgctactctcccgtccgccaacaaacggaagaaagtataaagttcacaccattcttttttagttgcttcgaatgccatatattttttctttattttgctacaactgtttttatcttaatctaattttatcctatctctgcgactgctatcttccttattatatataggctataagcaactcctactgattgataacctgcggcaaaattgcagacggcacaaccggaggaaggatatgagtcacctcttccaacggagggagcttgccgacttgtgcaaacagggagttccgtatccattctccgggagtgactacgataaatcgtcccgtccagcaaccatcaaaataagaaggattgcccggctgtttcttaataggataacagatgttttcccctttgctccgcatctccggtgaacgtccgggatcattcacccacacatatttgtcatcaataccgcgaagtaccatccaatgtcctctcggaccgggacgcaaaccacgaaccgcacctgtatatctcacattcacaagcacaggtataccacgatcgatataatctttcaatatccgataatctttctgctggaaatgttcggcacttatcatgttttcataatagcgtgccaaagaatcaatttcaaaagaatagtatcctccttgccctatcgaagtgcgacgacggaaaggagcacgctttttcagaaagtaattccgctgatattcaatcagtttctgttctgcatcctgagctgtgcgttgcgtatcagccgtcatccctttaaaataatcaaagaccattaacgaggaagccagagaacaatgcgaataagggtatcccgctattttctgcgaataccaaggaacaggaatgttgttgggagcgaacttttgagcttcctgtgcacaggcttgtacaccgttccacacaagaaaaaccaaaagtaatctcgatatcatgtagtatttctttctcatccggttcaatttctctttctctcctattctactttcagtatattaactggcacttttccattcaatgattttcttcttcatccaaaatccgagccgtttctaccttttccagccgagcacgcagtttcgccatcatcgaacgacgaatgcgcaatgtcatactgcaatccatatcatacgactgattgagtatttccggttcttcttccttcacgatacgcattatatcattcataaaaggatactcaaacataacagtcacttcctcgtccaccgttttttctatgattgtagcggcagcaatggcttcggcagcagcagccttgtaagctacaatcaatccgcttgtgcccaacttgattccaccgaaataacggactacaatgatcaatatatctgtcaactcgttcgaattgatttgtccgagaatcggttttcctgcagtgcccgaaggctctccgttatcattggcccgaaaatccttgcgtgctgctccgagcatataggcataacacacatggcgcgcatcatagtatttcttctgatacgtttcaagatgcgcctttatttcatcaaggctacgcacaggaagagcgatagcgataaacttgcttcgcttttccgtataaataccttcagagggttcggagatggttttataagtatcttcagcagtcatgttgcaaagatacggctttacacggaaaataccatctgtcgtttggaaatattaaatgatacgtttgccacaaatatacggttgatgtggcacaaaggagcagtcgtttcgctataaacaaccgctctttttcatcgaaacaagcggtcgatctgacgcaattaaccgtatgattgcaacagatcgaccgctcaattttataagatatcagctcttgttataagatgacggttattaatccaacttatgaatcacaagtcccgaacggagtttgggttcaaaccaagtggttttcggcggcatgatattaccagtatcggcaatgtccatcaactgtttcatggatacgggatagagagccaaagccactttcatttcaccgctatccacacgcttcttgagctctcccaaaccacggataccccccacaaagtcgatgcgtttatccgagcgtaaatccttgattcccaaaatctcatctaaaatcaaattggaagagatagtaacgtccagcacaccgataggatcattgtcattatatgtgcctgctttagctgtcaagctgtaccatttgctatccagataaagagagaaattatgcaaaccggaaggcttgtagatatctgtccctttttcttctacgataaagtttttgcctaacgcatcaaggaattgtccgggagtcaacccgttaagatctttcactacacgattgtaatcgataatggtcagttggttggcagggaaacagacagccataaagtagttgtactcttcgttgccacgatggttaggattctgtttcgccttttctgcaccgaccaatgcggcggcggcagaacgatgatgaccgtcggcaatataaagagccggcattttagcaaattcttcggtaatgagggcaatgtcttcctcccggtcaacaatccagaaagtatgaccgaagccatcacccggagcgatgaagtcgtagacaggtttttctgccgtatacttcttgatgattgcatccaacttgtcatcatcaggataagcgaagaaaacaggctcgatgttggcattattcacacgaacgtgcttcatacggtcttcctctttgtcacggcgggtaagttcatgctttttaatcaccccattcatataatcgggaacgtatgcgccgactaccaatccgtattgggttttcccgttcatggtctgggcgtaaatataatagttttccttgccatcctgcaccaaccagcctttatcctgaaacagttggaaattttctgcagctttggcatacacacgctcatcatgctcgtctgtacctaccgggaaatcaatctccggtttaatgatatgataaagagacttttcgttaccttccgcttctacgcgggcctcttcggagttcaatacgtcgtaaggacgtgaagcgacctgctctaccaggtcttgcggaggacgaatgcccttaaaaggtttaattattgccatgatattagtattttagatgtaaaaaataaaagccacagacttatttaaaatctgtggctcaaatatactatttatttctatgaaatattatttattcacacggaatttttcgcaaccgtccttcaagaagcctacaatctgtttagcggcagcaataccggcattgatattggcttcggccgtctgcgctcccatcttcttcggagtagagaaataacgtccggcaaacttctctgcaaattccgcattagcggcaggcataatatctgtgatatatttgaagtcggcacgttcctccatcaatttaatcagctcagcctcattgataacttccttacgggctgtattgaccaacatcgcacctttcggcatgtccttcaacagagcataattgatagaattcttcgtttcggcagttgcagggatatgcaatgacactacttggcaagtcttatagagttcttctgcagaatccagcgctttcacaccgtctttctcgattacttctttcgggcagaatgcatcgtaagcatacacttccattccaaaacctttggcaatgcgggctacgttacggcctacgtttccataagcgtgaatacccagtttcttacccatcaattctgtaccggaagtaccgttgtagaagttgcggacagcatataccatcatacccaaagccagttcggcaacagcattcgagttctgtcccggagtgttcatcacacatacattgtgggcagtggcagcggccaaatccacgttatcgtagccagcaccggcacgaactacaatcttcagttctttagcggcatcaagcacttccgcgtcaatgatatcactacggataataatggcattcgcatctttcactgcatccagcaactgggctttatctgtatatttctcaagtaaagcaagctcgtatccggctgcttctatttctttacgaataccgtctactgccactttagcaaacggtttctcagtagctacaagtactttcatattctgattctatttataaaggctcaccacagattacgcagatttccacagattatagaaccttagaaatctgtgccaatccgtgtaatctgtggtgaaaataatatattaatgaagtttctcaaattcctgcatacaatcgatcaatgcctgcacgctttctttcggcatagcgttatagcaagatgctcggaaaccacctaccgaacggtgtcccttgatacctaccatacctttttcagtagcaaacttcaagaagtcggcttcgaggtctttgtattcgggagccattacgaaacagatattcatgcgtgaacggtcttccttagcggcagtacccacgaacattttgttacggtcgatttctgcatacaacatatcagctttttcgatagcacgacgttccatttctttcacaccaccctgtgctttgatccagcgcaaagtcagcaatgcagcgtagataggcacaacaggaggagtattgaacatagaaccgccatcaatgtgagtctgataattcaacattgtcgggatgtagcgggaaacttttcccacagcgtcattcttcacaattacgaatgtcacaccggcaggagccaggttcttctgtgcaccaccataaatacagatatatttggaaacgtcgatcggacgtgagaaaatgtcagaagacatatcggcaaccataggaaccggagaatcaagatctttctttaattccgtaccgtaaatggtgttgttagtagtaatgtggaaataatctgcatctgccgggattgtatagtctttggggatataagtatatgtagcttcagcagaggaagcaacttctacaacttcaccaaatcctttagcttctttcatcgcttttttagcccatacacctgtgttcagataagcagcctttttttccaggaagttataaggaaccatgcagaactccatactagcacctccacccaggaacagtaccgaatagccttcggggatattaagtaattccttgaataatgcctctgcttcgtcaaccacaggttggaagtctttggcgcggtggctgatttccatcaaagagagaccagagccgttgaaatctaaaatagccttcgctgtatcctctatcacctcacgcggaagaatggaaggtcctgcattgaaattatgctttttcatttgaagtttgtttttggtttaacaatttcgttacttttgtcttttgaccttgcgaatttacgaatttatttccgccgcacaaatctttccttataaaaatactgttttaaagcagattttcctttctttttattggtttatacaggatatatacaccatattgttatccgtagatgtcaacctatcctactttgcctcctcaataatggttttcataccttttatcttctcgccttgaatcagattcaggagttgtttgacctttgcacgccggacagcgacaaaagcataatgctctttcacatctatcgctcctacatcttcacgagtcagattacctttcttatacaagaatccggcaatgtccattttgcttagtttttccttcttgcccttacctatatatatagtactccaaacagatttgggcggacggggtggattttcaggcaatgcgacggtttccatatcttccgggatataggcagggagtttctcctcggcatgaagaatcaaataagaagttccggtagcgtcccaacgtgccgtacgcccgttccgatgcgtaaaggcttcctcattcacgggcaagtgatagtggatgatgtgctcaatctccggaatatccagtccacgggcagccaagtcggtagatatcaacacgtggcaactgccgttacggaacttatataatgcccgctcacgatccggctgttccataccgccatgaaaacgttcggcaaacagtttcttatccgccagcagtttttgcacacgatccaccgcatcccgatgattgcagaaaacaatgctcgaactgcttcccaatgtgcaaagcagattgtataaagtatcaactttatcttttgccggagaaaatactttcatcaatttcaaacgggactcctgttcgtcggcagcatccggcaagaagttcagtctgactgtacggttcagccctgtaaattccgggatctcttctgcgtcggttgcagaaagcaacatccgctttttcagtccgggcagttgcgtgataatctctgccatctcatcatggaaaccgaattctaatgatttatcaaattcatcgatgatcaaagtttcaatcgtttcgggattgaaatttcctttagatagatggtcggtaatacgtcccggagtaccaataataatagcgggatgattgcctgatatactcttcttttcttccgcgataggatgtccgccatagcaacaacaggtcttccaagcagttcccattgccttaaatacactatcaatttgcagagccagctcacgtgaaggaaccagaatcaaaacctgtacattgtcattgccaggtttcagcgtgagcaataaaggcaacaaataggcaagtgtctttcccgacccggtcggcgacaacaagataacgtctttccttccggtagcctgttccagtgacgcttcctgcatcggattcaactcttcaatcttcaggttgtgaagggctgactgtataatttcatttttctctaacatggcgacaaagatagcaaaaagaagcgggaaatctgagaagcacatcggctttttcagatttcccgctctgtcttatattatccgccgatcgtcctaccgaccggtttgacacttctcagatactatcctccgaagttatcgaacatcaagttctgtgccggaacaccgagatcgtcgagcattttctcaacggctttcgacatcgggccaggaccacacatatagtattcaatatcttcaggagcttcgtgattcttcaagtaagtttcataaatcacattatgaacgaatcccggggtatacttcacacctgcggcgtcggcagcaggatccggacggtcaagtgccagatggaatgagaagttcgggaaatccttttcgatttgcaggaagtcttccaagtagaacacttcgttcaaggcacgggcaccatagaagtaagacatcttgcggttggtagtatgcaacgtcttcgtcaagtgcatgatttgcgcacgcaacggagccataccggcaccaccaccgatccacatcatttccttgtcggaattgaagatcgggtggaagtctccgtaaggaccactcatgattaccttgtcacccggtttcagggtaaagatataagaagaagcgatacccggcatcacatccataaatccaggtccctgatctttcggtttgaacggaggagtagcgatacgtactgtcaacatgatacggtcaccttcggcaggatagttcgccatagaataggcacgaatcgtctcttcgtcatttctacatttcaatcccatcaggccgaatttctcccatgcaggcaagtattcgtcaccgatcagactcttatcaatatccttgtcatagtccattgagaatttaggaatcttgatctgcgcgtaagaacccggaataaagtccatgtgttcgcccttaggcaaagcaacgataaactctttgataaatgtagctacgttcttgttggagataacctcgcactcccactcttttacgccaagtatagactcatcaatcttgatagacatatcccctttcactttcacctggcagcccagacgccaatgatcttgttgctgtttgcggctgaaatgaggaatttccgaaggaaggatctctccaccaccttcgagcacctggcatttgcactgtccgcaagaccccttaccaccacaagcggatgacaggaatataccattcacagacagcgtattcagcaaagtagagccggaagccacctccagttccttttcgccattaattgtcagtttcacgtcacctgaaggcaccaggaagttcttggcaaccaacaggataaccacaagcaagagaataaccacaaggaataccccaatgctcgctaatattaaattcatatccattgtcttattcctttctttttagatgttcaaaccagagaaacacataaatgcgattgccatcagacctactgtgataaatgtgatacccaaacccttcaacggagcaggcacatcagagtaagccatcttctcacggatagcagccagaccaacgatagccagcaaccaaccgatacccgaacccagcgcgtatgagatagcatcccagatgtcaccgatatatttcggatcgctcggacctaggttgatacgttgttgcataaacagagaagcacccatgatagcacagttaacggcaatcagcggaaggaagatacccaatgaagcgtagagcgaagggctgaaacgttccaccaccatctccaccaattgcacgataccggcaataacggcaatgaaaagaataaaactcaagaaactaaggtcgacaccttcgataatagcgttggcagccagcaccttagtctgcaacagatagttgaccggaagcgtcaccagcaacacgaaagtcacggcgatacccagtcctacggcagtcttcacattcttcgatacagccaggtatgaacacatacccaagaagaacgcgaatatcatgttgtccacaaagatagagcggacgaataagcttaataaatgttccatatcttttaattaagaattaagaatgaagaattaattactttcttcctgcagttctttgtgacgtgaacgttggtaccagataatgcaagcgacgataatcagcgccatcggaggcatcaacatcagaccgttgttcacgtatccgattttctgaataggctcgtagttcaagatgttgaaaccgagcaatgttcccgaacccagcagttcgcggaagaacgcaacgataacaagaatcttggcgtaacccaatccgttacctacaccatccaggaaagattcccacgggccgttctgcatggcaaatgcttccaggcgtcccatcaggatacagttggtaatgatcagacctacatatacagaaagctgcacgcttacatcgtatgcaaatgctttcagaatctcacttacgatagtcaccaacgcagctaccacaaccaactgaacgatgatacggatacggttaggaatggttttgcgcaacaatgaaatcaccacgttagaaaacgccgtaataaccgtaaccgaaagtcccatcacgatagcaggctccagttttgcggtaacggcaagtgcggaacagataccgagcacctgtacggttaccggattgtctattcccaacggagcagagaatacttctttattcttcttcgaaaacaattgtcccatattctatttttctcctcctcattatttagttaaaaatttcacgtattctttcaaacactttttcagcatagtgtccacgcctaccgaagtgattgtaccaccggagataccatccacctgataatcagctttctccaccttaccatgtttcaccacactcaaggcaacactatcattcgccaatgttttcttgcccacaaattcctgttggaaccagtcagttgcgatctcagcacccaaccccggagtttcactcgcatgagagaaataagtaccgtatacagtatctttgtcctcattcagtgcgacatatccccagatagcgccccaaagacctacaccgtaaacaggaactacgtatttcgtctgtccgtccacttcgcagacaaacacatgaagacgttttttctctttcgcttctttctcatagttcgtagcaaagtctcctgtgttttcggtcaacgtaccgtcagcgttcatcagcatatcgcctttcacatatttcttatattcagcatccgcatcctccacattcttaatattcaatgcggcaagaatctgcttcttcgtatccaactgtacattcttgtcttgcgtagctttcagtgaagagctgacgaatgccagaaggaatgcaacgataataaccattaccgaagcataaatgatagtataactgttactatttgtattcattttcattcggtatttattggttagacttgatagcacgtttttcacgacggctgatattgccctgtaccacacagtagtcgatcaacggagcgaagatgttcatcaacaggatggcgagcatcataccttccggataacccgggttcagcacacggatgacaacagccatcacaccgatgaggaatccgaagatatacttgcctttttcagtacgtgcggacgttacggggtcggtagccataaatacggcgccgaaacagaaaccgccgagcacaagatgttcgtaccacggcatatttgccatagcattgccttccatgccgatcgcgttgaatacccatgccatgaacgcgccacctacaaatacggaaatcattgtcttccaactagcaacgcctgtccaaagcaagataaccgcaccaatcagaatagcgatcacactggtttcaccgatcgaaccgggaatcagccctgtcaccatgtccatactgaactcaggagcagcgcctgtcgtagcggccacaccgagcggagtggcaaccgtcaatccatccaccgtctgtcccaaaccgaagatactgtcgcccgacacccaaacggcatcaccggacatcttggtcggatatgcgaagaacaggaatgcgcgagtgatcaatgccacattaaagatattcatacctgtaccgccgaaaacctcttttgcgaagatcacagagaatgcggtagctacggcaagaatccacagcggacagtctaccggaacgatcatcgggatcaggataccggaaacgaggaatccttcctgaatttcctccttcttccattgagccacaacgaactcaatacccagacctaccacgtatgatacgataattttcggcaacactgccaggaatccgtagataaacatctcaaagaaactaccggtagcgcccgtgtgagtgaaatgctgataacctacgttgtacataccgaacaagagagccggtattaacgaaataaccacaatcgacatgatgcgtttgctatcgattgcgtcgtgtatgtgcgttcccgttttcgcagtcttgctgggcacgaacaggaatgtttcgaagccgtcgaacaccgactggaatgcgtggaatttgccgccttcttcaaagttcggctttatcttatcgagataatttcttaacgctttcattaatatatttactattttactatttacaatttactatttgccgacagtcgggcgattatgccatttcagctcgcagcatatcgagtccggcacgaacgatgcgttgcagttccatcttcgaagagcagacgaattcgcagagggcgaaatcttcgggtgcgacttcgtagataccaagcgcttccatacggtcgatatcaccggcgatgatagccttaatcagaaattcgggcaggatatccatcggtaataccttgtcgtactcaccggacatgatcatatggcgttcgccacctttcacgcgggcatccaatgtatactccttcttgcccatcagccaactgaagtatgagcggttggcactgaactgattgaaacgcggcatgatccatccgagcatttcatgaatatcatccccttcgggaatcaccgtcaactggctgtggaacgctcccaagaatccgttcggagacacttgctttccagtcagcacattaccgctgatatagcgcaagtccttgtccttggtgacattgtcggcaaacacgttggtgagcagcgcccctacctgaagtttgcagtaagcaggtttcagcacttcggaacctgtcactgccaccgtacgggtgaaattcacacgaccggtattgaaaagacggccgatgaagataacagcttgcggatcaatagtccataccgtttctcctttagagacagggtcgagatggttgatctgaacgcccacgttaccggcggggttcggtccgtcgaatgcggtgattgtaacgttcttggcctgcgtcagagcggcagcattctgtttcacgctgatactcagataagtttttgccagtttggcgagcgcatcgagtcctgtctggaaatttgcttcttcacctttcagcgcaaactcaaaatcgggtgccagcggattggtatcgaaagcagaaacgaagatacctttcggagtcaccgtcggatctgcgataatgtcataaggacgttgtctgataaatgcgaaaagaccggcttccagcaaagcgttctttacagcctccgcatccatcgttgccacattcttcttgccaaattcctcgtagtcctgctcagtagcagcttctaccacgatgttcaacaccttacgacgagctccacgctctacactcgtcactacgccgctcacgggcgaaacaaatttaatttcaggatgatacttgtcgataaacaagggtccaccggccatcacatattcctgttcctttacaagcaccttcggtgtcacaccaggaaaatcatcgggcacgagggcgtaaaaacccggctccttcactgttgtgtacgtttcagcagctttacctttcaggtttatgtcaaggcctttgcgtaactttattacatttgccatgctatataaaataatggtttcataaatttgccgcaaaagtaataaataagattgggattcgggaggaaaaaagggagtaattacggagatttttccgtaattatcttcgtgctcgcacacgtaccccatctttcttttctcccgaaagcaaagaaaaagagcgaatttacatttattatctatgaatatgaaaactaatcagaataaaagcgttttctttgtatcctgaaattaagaaagaatatgaaacagccgaagctctacaagatgaagaaatatataataggtatatggatggcgttgttgcctatcggtgtcatgctggcacagacagacagtacaaggacggtaaaagataccaaacgcgagttacgccgccagcgtgtggcgaagcggaatttgcattacaacattctgggaggtcccagctacacacccgatttcggttttctggtgggtggtagcgcgttgatgacgttccggatgaatccgagcgacaccacccagagacgttccgtcgtacccatgtccatcgcgttgatattcaaaggagggctcaatctcatgacaaagccgcaactcttcttcaaaggcgaccgtttccgcatattcggcactttctcctacaaaaacaccatcgaaaacttctacggtatcggatataacacaaacaaggactatccgcgaggggaagatacgagtgaataccgatatagcggtattcaggtgaatccgtggtttctgttccggttgggggaaagcgatctcttcgcaggtcctcaggttgacttgaactacgacaagattaccaaacctgcggcgggaatgattgagcaaccgtcatatatcgcagcagggggtacggagcatggatacaccaatttcagttcgggactcggattcctgctgacctacgacacacgcgatgtgcccgccaatgcctatcagggcacttacctcgactttcgggggatgatgtacagcaaagctttcggaggtgacgacaatttttaccgtctggagatagactaccgtcaatacaaaacggtcggaaaacggaaagttctcgcctggaccgtacaaagcaaaaacgcattcggagacgttcctttgacgaaatatgtattgagcggaacccctttcgaccttcgcggctattacatgggacagttccgcgacaagtcctctcatgtaatgatggctgaataccgccagatgataaatacagacaaaagcacatggatcaaaaagatgttgagccacataggatatgtggcctggggaggctgcggattcatgggacccacaccgggaaagatagaaggcgtcctgcctaatctcggagtcggcctgcgtattgaagtccagccccgcatgaacgttcgtctcgacttgggaagagacatggtgaacaagcagaatttattctatttcaacatgacggaggccttctagttcaacgtaacagaggccttctagttccaatgtcagggcccttctagcacaaattagcaagaaagaatgcaaaatagacaacaaaagactgttcataaatgaaattaatccttatatttgcgcaagctatgtcacaacaaaacacagcagaagcaaataacagggttattttatgaaacaaattatatatatctgtttaggattactccttctattcacctccaacacaccgattgttgcgcaagaggtcagtgattatactcaattaagcgaagaagattacagcaatatcactcttcccccactctccgtcctgtttgagaatgccaaagacaatcccatctatgagatggcagatgtcaaagcggcggtagagcgcaaactgctggcgaaagaaaagcgtgcatttctcggattcttcagtctgcggggaagctaccaatacggtactttcggcaatgaatccacctatacggacgtttacgtagagccataccccacctactccacccaagcccagaacggatatacggtaggagcgggagtcagcatcccattggacgacctgtttgacctcaaagcgcgtgtcagtcgtcagaagctcaatctgaaaagcgcggagcttgagcgggaaatcaaatacgatgagatcaagaagaacataatcgaaatgtacgcgatggctacatcacagatcaaagtccttcagatgcgaagcgagggtctggtgctggcgaacgtgcaatatgagatttccgaaaagaattttgctaacggaaccatcgaatccatcgacttggcgacagacaaggaaaggcagtcgcaagcccgtgaagcatatgaaaagagcaagttcgagttaaccaagagtctcatgatgcttgaaattatttcacgcacgcccattatacgaaaataaaagactaagatatgaatctcatcatttccatcatacggaccctatttcggcatcgttggctgatactgatagggaccactctcttcacattactggtcatttattacacacgccatatgcgaggcgggtatgatgtgaaagcaaccctttacacaggagttgcttcgggctacaacctcgaaagtgacaaacgcaccgattgggcaaccgtgcagaactccatggacaacctcatcagtatcatgcaggccgaaagtacgctgaaaagagtcagtctgcgattgttcgcccgcatactgatcaaagggaatcctgaaaaagagaatgacggaatcacccctgccagctacaactacacatacaaccatctgaaaaacagccctccgggagacgagatactgaaactgatcgacaaatcgagcgaagataagacagtagccaatctggaagcatatatgcgcccgcacaaggacaattacatctacgggctcttttattattcccatccctattacagctacggtgctctgaaaaacgtaaaggtacagcgccgcctcaccagtgacctgctggacatcagctatacttccggtgatccgggtatcgcctacaacaccgtaagtatcctgatgcacgagtttgtcgaggaataccgccgtatccgttacggagagacggacaaagtgatcaagtatttcgaagaagagctgaaacgtatcggcaagcaactgagagcggaagaagaagacctgacgaagtataatgtacaaaaacgcattatcaactacctcgacgagaccaaggaaatagccgccatcagcaaggaattcgagctgagagaacaggatgcgcttttcgcattcaacagcaccgcgtccatgctcaaagagttggaaaaacacatggacaacaacgccaggcaagtactgaaaaacatggaattcgtagacaagctgcgcgaagcctccaacatcaccggcaagatatcggaagccgaagcaatgaccgattccagcaagaaagacctccattcgctggaaggagacaaaaagcggttgaacgagcttaaacaagaactgaacgccctgactacctcatacgtaggtcacaaatataccaaagaaggtgcgtcgcgcaccaatatcatcgaccaatggctggaacagacattgctctacgagaaggcgaaagccgaactgaaaatcgtacaaagcgcccgtcgcgacttgaacaaccgttacgtattcttcgcacctgtgggtaccaccatcaagcagaaagaacgtagcatcaacttcacggaacgcagctacctgaccgtcctgcaaagttacaacgaagctttattgaggaaaaagaatctggagatgacctccgccacgctgaaagtcctcaatgagcctacctatccgatcggagccaactcaaccaaccggaaacagatcgtcatagcagcctgtattgccatcttcgtgattatcatagctttgctggtattggtagaattgcttgacagaacactgcgtgacgccagccgcaccctgcgggtgacgggatataaggtgataggtgccgttcccagcctttcgaccgcccgctacggaggactgaccagaacgtacatacaactttccgtaagagagctgaccaactccctgctccgcttcctgaccaagcggaaatcccccggtgtgtttatcatcaacctgttcagcactagcgaggattccggagaagacataatcgggacactgatctgcggattcatgcaaagccgcaaactgaacacgaagttcatctgctacaataaagattttgacattgcatccacccaatacctgcttgcaaggagcgtcacggatttctatacgccgcaaggagaagacgtactgatcgtcgcctatcctcctctgtcaaagagcagcatatcgagtgccctgttgcatgacaccaacgccaatatactggtgactccggccaatcgcggatggaaaacgatagacaagcaactatgcgagcagctcatgttgcagttgggcaagagcaatgtgcctttccgtatctgcctgaccaacgccagccgtgaagccgccgaagacttcaccggacagttgccgccatataccctgttgcgcaggttcagttatcacttcagccagttgtcattgacagaaaaaatcatattcaacctcagaagaaaagcaaaggaagcagaagacgaggacgatgacgaataggaacactactttccatatcctgcttgccgcacaattcgcgctaatagcggtaagtatgcttgtaaacgtcaagacaggactgttctcaatggttcttatcttgttgctcactaccgtttgcctgatacagctcagtaacggcaagtccaccgaatggaagcgcgggcaaaacatcatgacctggctgttcatcgtctggctgttgtactatatcatggagatcatgaaccccaactgcgtgttggaggcatggaacatcaacatcacgccctacgcgctcattcccctgatatgcgcatttgtcgttccggtcgtcatacgtaccaggaaagacatagaactgctattgctcgtatggtccgtgttcgtcatcatcttcaccctcaaaggatactggcagaaaaatcacggtttcagcaccaaagacctttacttcctgcacgttctcggcggtgcgcgaacccacatcatctggtcgggcatacgatacttttcctgtttttcggacgcggcaaactacggtgtgcactcagcgatggcagccgtcaccttctccatctccgcattctttgtcgactccagatggaagcgcctctatttcctttttatagccttgtgcggtatctacggcatgggtatttccggaacccgttccgctatgggagtgctcatgggcggtatgctgatgattactatcatagccaagaactggaaagcgttgctagggggaatattcatatctatcggcattttcgtatttttctattacaccaatatcgggagcggcaaccagtatatccataagatgcgctcctccttccatcccaccgaagacgcctcctacctcgtgcgtgtcgaaaaccgccagcggatgaaggagctgatggcaaggaaaccgataggctatggaatcgggctggccaaagcgggaaacttcgattcgaaagaacaaatgccttatccacccgactcgtggctgattgccgtctgggtggaaaccggaattgtagggctgatactttatcttgccatacacggcactctcttcgcctggtgttcatggctcctgatgttcaaagtacgcaataagaatctacgaggactggcggcggcatggctttgcatgaatgccggactcttcattgccgcctacgtcaacgacgtgatgcaatatcccaaccaactgactgtatacacaggcttcgccctctgcctcgccgcaccttatatagacaaacacatcggtgaggagccggaggaaagtaaaaatccggaggaaagtgagaaacaagaaccgcacctgattaaagaaccaaacgaataaaaaaatgacagacagccaccggacggacatatcatttatcacgatctgctacaatggtttcaaagacacttgcgagctgatagaatcgttacaggagaaactgcattccgtaacctacgagatcattgtggtagacaacgcctcgcacgaggacgaggctgccaagatatccagactatacccctcagtcatcgccatccgcagcgaggtaaacagaggattctccggcggcaataacatcggaatccgtgcggcaagaggaaaatacctcttcttcattaacaacgacacctatatcgagtcagacgcaatctcctgcctggtagaacggctggaaagccgtcccgaaatcggaggcgtatcgccgaaaatacgtttcgctttcccgccgcagcacatacagttcgcaggcttcacccccttgtcgcgaatcacgttacgtaaccatatgttggggttcggctgtcccgatgacgggaaatacgacactccccaccccactccctacctgcatggcgcagccatgatgatcaaacgtgaggtagtcgagaaagcggggatgatgcctgagatctttttcctgtactacgaagagctggactggagcacaagcatgacacgtgtcggctacgagctatggtacgagccccgttgcacggtcttccacaaagaaagccagagtaccggacaactcagtcggctgcgtacctattatctgacccgcaaccgcctgctctacgcccgccgcaacctgaggggagccgcacgtctgggctccgtgctctatcaaagcactgtcgcagccttgaagaacggtctgctctatgctttaaaaggacgcttcgatctcttcctggccgtctgcagaggcgtcaattcaggactgatccttccgtcggccaccaaagaaacaaaagaacaaaaaaacgaatactatgaacatcattgactgggttctctacatccccctcacgctatgcgtatgctacttgctgctttacgccatcgcctccaagttctaccgggctccccaatatcccgaagcccgtacgctccggcacattgccgtgctcttccccgcctacaaggaagaccgtgtgatactctcttcggtccgcagttttctcgagcaggactatccgaaggagttgttcgaccttgtcgtcatttccgaccagatgcaaccggaaacgaacgaagccttacgcacgctccccatccggctactgatggcggattacacggaaagctccaaagccaaagcgctggctatggccatgaacaacatcgacactgatctctatgacatagtggttatcatggacgccgacaacgtgaccgtccccgaattcctgtcctgcatcaaccgtgcgttcgacagtggcgtaagatccatacaggctcaccggacaggtaagaatctgaataccgatatctccattctggacagcgcaagcgaagagatcaacaacggcttcttccggagcgggcacaacgcgctcggactttccgccgggttatccggctcgggaatggccttcgatgcaaaatggtttcaacagaatgtgcaatacctgcaaacggcaggcgaagacaaagaactggaatccatgctgttgcagcaacggatccatacagtctatctgaacgacctccctgtgttcgatgagaagacacagaaaaaagaagcgatcagcaaccagcgcaaacgttggatagcggcgcagttcggagcactccgcgcttcgttgccccacctgccgaaagccctgctgcaaggcaatatagactattgcgacaagatattccaatggatgctgcctccccgcctgatacagttggcaggagtgttcggactgactttcgttttcaccgttatcggtcttgtcatgagcctgcgcaatggaggaaatgaatggacgatggccatcaaatggtggattctgtcggtagcacaggtctccgccatgattctacccgtaccgggagggcaactgtttaccaaagaggtagggaaagccatcatgaaggtacccatgctggctgtcaccatgacaggcaatttattcaaacttaaaggagcaaataagaagttcatccatacagagcacggtgaacatcactctcattcataaacacattatcccaaacaagaagcaatgaaaatagccattgaagcacagcgcatcttccgccccaacaaacatggaatggatttcgtcgctcttgaaacaatccgtgagttacagaagatggatcacgaaaacgagtatttcattttcgtcagtcccggtgaagacaaatgcctgaagagttcggagaatatgcacgtcatcgaactgaaatgcgctacctatccgttgtgggaacaggtggctcttccgcgagcggtgaagcgcatccgccccgacttgttgcattgtaccagcaatacggctccgttgaactgccccgtgccgttggtgctgacgctgcacgacatcatttatctggagaaacgccaatcgtccagcctgtcgctatatcaggagatgggatggcattaccgccgcctgatagtgccccgcatactccccaaatgcaagaaaatcattacagtttcccagtttgaacgtcagcgtatcctcgatgctctgcacctgtccgacgaacagttggttgccgtatacaacggattcaacagccatttccatcttcagcccaaagctccggaaatcacccggaagtatatagatgcggacgaatatctctttttcttgggaaatactgatccgaaaaagaatacgccgcgagtgctgaaagcgtacagtgactatctgaaacgttcgcagaagaagctcccgctgctcatagccgacctcaaggaagacgctatcgaccggatactgggggaagagaagattacggacatcaaaggctacctccgttttcccggatacattgcgaacaccgaccttccggcactgtatagcggtgcattcgcattcctttatccttctcttcgcgagagtttcggtatccctatgctcgaagcaatggcctgcggtacgcctgtcattgccggaaacacttcggcaatgcccgaaatagcgggtgaaggggctttgctggctgatccgttcagttcggaggacatcacggcgaagattcttcagttggaaggagatgcggaattttaccggcaacaagcggactgcggagtggagcgcagcaaactgttctcatggaagaacagtgcgaaagcattgctcgatatttataggaatatggcgttggaaaagcacgtataaccgtatcgctggacaaagctctgatttatggaaaaagatcgaatctcttttgtggatatttctgcatttgcaacaatctcttttctatctttttccatttgaaaggtgcagagcccagcattcttataggttcgtcaaaattaatatcttcccaatatgtaagggccttcagaggcatgattacatttgctttatatttatgttcataggcctccagcatttctcccaatgaaagcaaagtggagagataggccaaatcgataaagtcctttatacgagtgccgttgcccgcaatagcattcagtttcatagcagcaatatcgacaggagaagccaaacggataacatcttcctcaacacacggagacaaccaaggatattggtgcgaaatacagtctatctggacccctctaatttcccctttcagcgtacttctggaaataaaatccaactctaaatcataattttccaccaaataggaagacagttcggattcatcgaacgacaaatctgagaacaaatccaaatcaacacttatacgatgccccaactgcaaggataatgaagttccacccaccaatacaaagtgtttgagtcggcagtctttcattaacgttgtcaagagttccaatgttgagggtgagacagtttccttgtgtaacattttaaatcctccttttttaagtcaaacacggcacagacaaaagaaatgtctttcgcgttcattgtcggaatttccttgatactttcctttactccttccactccatacctatttaagatggcaaagaaatcatctttccgcccccgttcaatcacccgctgaacgaccagcgtacgcatcttctcccaatcaaaacgtgacatatcatactcccaaaatagggactgacgtatctgcgcatctgtatgttgcttataattgtcgaaaaacatcctcatcaaaattagatttcctatcaacaaagtaacaaataaaattccacttttcctcatttgaaaaagaaaatatataaaaagacttgcaacaccggtattcagctaccagtgttgcaagtcttgtttttccattctactcttgaccggagaagaagtcggattctttcacctcaaagcacggacacgccttaatccactcttccggctctatctccccgtttccgttcaggtcggggctcaagtcacgatgaccgcagatacggcaaccgggataatcacgcagcaacgcgagaacgagcacacgcatggaatgaatctgccactcggtacgggtatcggcgggacgaccgtgacaatccagcccaccctcataacagatgccaatcgaacgggcgttatagccacgcacgtgagctccgatacgttctatttcacgggtagacttgatgtcgccattttttcggatataaaaatgataccccacaccgttgaaaccacgacggcgatggcacacgtccaggtcgtcttccgtgaaatccctgtccgccctagtggcggaacagtggatcacaatcaggtcaatcttcctcatcaacctgtcctttcattcttttagcttttctctttctgcgaaagaaaaacaacacttccaatacaacttccaagattttgtcaaccatagctttgcatttttaattgattatttattcactgaacatccccgccggattactccgccggatccggagcttccccattgttatctccgtcctctcctccgccagaaccattcgggttgtccggactgccgccatcacctcccgcagcgttcttcttatccgagagcaactcaaacaccatattattatctccgccacgagtagtggccgtactgtcgtttgccagtctgagggaattgtcgactttgaaacgaagattgacacgggtaatgcttttcacggtgcagtctttctccaattccacaccgggacaggtcagcgtggtatagaagattcccaacccctccactttcactttattgcctgccacaaggactttcttcatcgcgcggacaaaggatttcatgacgtgcgacacatcctccaccgaaagcgaaccgatcgtttcgatttcgcgcgccagcgcctctattgaatagatttttgactcccccgacttaggtttgagggcaaataccatcggcgaatccgcatcgctgattcgttttctgcgcttatagcgcaccactgtaactgttgccataaaaattgttgtttctacgaaaagaaggacattcttcctttctgttggtacaacaaaagtacgacaaccgaaagacggattaacggattacaccggactaggagggattagaaaggattaaaaaaggataacaaggaataagagcaaaaaacagttttttttaagctgtgcgctcacttcttaccaattgctccacagcattaatgaatgcttccgcacgcggacgaagcacatccaccagagcagcgtcacaataagcaaagtcaccatagtcgctactatggcgtttatcaaaaagcaaaccgaaagttgtactatgttccaaatcaagcaaacccgtccggacaaaatgcattgaaagttgtgtttttactccattatgggtattagcctcaatatgacggttcaacaacagagcagacgcggcataataacaagcataatactttcataacacaatgccttcccgattaatgttaagtgtcagtggtgtagtaatattttcccatacacgtttcaacacgaccaatgtattaatagctacccccgtttgcgcttccagttcgcttaaaggacggcgcaaagtaagctcggtttccggtgtcagttccttctcatccactacgataagcaagtctatatcagaatcatgccgggcttccccacgagcttccgagccataaagtatggtacgtgccgtaggcgctatgcgatgcattgtctctgcaatacgatgaacaatatctgtacgtttcataagctattttcctcctctcccacaaagttaagaaaagaatagctaaaacctatattttctttcattttctttttatctcatccccaaaaacagcctgaacagcttggcaaatccggtaaaaaagcgtaactttacactctataaatacggactaaaaacaatcagaaaatgaagacagatgcagagccgaccgatgacgaaaagaaagagaaaacatttgaataccgaagctacggaaaaggggagcttgccatgttgtacctccccgacatacaacaacagagtgcggtagaccgtttcaacaaatggatagccgccgctccgggactgaaagaacgactcatcgccaccggcatgaatccccgaagcagaagctatacccccgcacaagtacggctaatcgtagaagtactgcaagaaccctgagtacgagtgccgcttacgactcaaacagctccttatccggcagccagcaactggagtcgaacgtcacacctccgacgcgctgttctacgggaacagccggatcatgcgattccacgcacggcaggtaacgcccgctcacgggatcatacgcgaaagtcaccatcccacccattccgagatgtttgaacttcaccttatccacatacacacgggtcacccccacccccttgtcacgttccaccacaataccataatccgccttattgaagaaatcggcagagccgttgatatcatacatctccacgcgcggagtagtgttcgtcaccgggttacggttcatcttgcgcggatgggcgacaagcaccaccaggcaattatgctgcaccgcaaattccgtaatcatattcaggaaattggaaagatactgcgtctccgtctgtcccggctgcggagtgtggtcaagccggttgagcgggtcgatcaccagaatacggcacccccgccgcaacaccagctcgtgcgccttcgcaagcacccgctccggcgtggcgttccccttcagagagatatgcgacacgttatcggtaagaaactcctccgaccgcatcagcagcccttccgaaatgccgcaccccttctggaaacggtgtccggtcagcttctccaccaactttcggatgtgatagacaatcggcgtattctccggactgaaaaaagcgatcttccactgatggcgcagacaaagccgcaacaccagctcatcgagccactccgattttcccgcacccggcactcccgtgaggatgataagcctcccccgttcgtaagtgcagatcttgtccatttcctcccagccggtttccgcgcccggtccgaaaccattctcaaaaagagcaagcaggtcgctgtgcaggtcggtggccgtgaacaccccttcgagcggaacctccgccgcctgctcgatggctacccgcagactggcaaccccgtatttgcacagatgctcgttcgcatccttgcagccgggcccgtacgccaccacacggcaacgctcggcacccaaacggttgatcaattcgtcacgcagttgcagtccggcagaatcggtatcgacggcaatgataacctccgtcaaatcctcgaaatgcgtctccatgaaacggtcgagccaggacaagttcgagttggctccggcagggacggaaatcacgctcttgaatccggcggcaagggaagaggcggcatccagttcgccttcgtggatgatgcaggaagtctgtccgagcacggagtcgatgttgtagggaatcagttcggcaccctgaaccatcttgaaatgcttcgcgtccacactacggaatttcgtgttgaccagttgtccgtcctcgaaatagttgaagcagacgcaacgctccttctgaccggattgcggcatgaattcctcctgttccgtgatgcgcagtccggcgatgacgccctgcgggatgcaacgtgtctccaccagccaacgttctacagattcggaaagcgtagtccgtgccggatcgaacaccggacgctggaaatgacggggaacggctgccgcacgacgctggcgggcagcacgccgttcggctttctcacgctcttccgcttcgtcggggacgtaaaagtccgccccgcaatgataacagtgacaatgccccgtatcaacgttgacacgcagcgaacggtcgcgtttgttgtggcgcgtggcctgacatttattacaaacagttttcactacgccgcttgtcctccaacggacatcgacatcgtaactggcaaaatttctcataacttgctttatttttaaatgaataattatatttcccacacacagggaaaggaagacaaacgcttcgtgtagaacacggagagattgatactttcaaatacgggataaaccgctttcggacgtgggatgaatgacattcaagcatggggtgaacggcactcagacgtgggatgaatggtgtccagacgtaggatgaatggtgttcaaacgtaggatgaactaatgcccccatcttttgtgcgcatcatcccacaccgccgagttgtcgggtcttggcggtgcgctgtcgggaataagacgtcccagatacatccgttttccatccacaacactttcaaaacggctcacatccctgctctcccgctccttgatttcccgcatcaactcttcgcgcagcatacggcaagtaggcgatccggcagcgatataattggaaaaatagcgtttcacgtcctcaaagaagagcaagccgctctcctttccgtagagaaggatatgctttttgaacagaccgataatctgctgctgatggtcgataaaaagccgtcccagaccggaacgctgccccgccagctccatatacaagcgtgagtcggcaagccggtctaccagcgtttcccaagacagcaccggctgcaacggttgctgcccctcctcatccaccgcccgaatcctcattccccttccaacaggaacggaagaagcagttcggacttccgaagtttccgaactccccgaagcagaaatcttctcctccgtttccgccacaaccatagcagcgtcagcagctcctcccgcgagggtattgctgctgttgtttacaacaggagtaatacctatcttctcctcttctctcctctcttgggtttcgttgggttttcgccctttggtggcgggcgtttcagcgcatttcgcacgcttcttcgggcgccctccttttttaccgttttcggtatccattctccacttttcctcaagcctttgcatcacccggtcgagatacggagcccggaacgtctgccgctcctcgtccacctcaaaaagattataatcatggagcaccttttccagcatatccaactcaaggtcatgccgccgcgcgaacgccctcaacagaagcggagtgcacgacgcctcataattatctttcgtgcgcaggtgcaacagcaacatcacataaatgccgagcgcttccgccgcatccagttccgacatcataccggcgatattatcgtcattcagcagatttacttccagattaaaatactgatccttcttcattattctttctattttaataaattattcacgaaaatcatccttttcggacgagctaactcagtgagcgcaaaggtattttaaatgttttggttacacttgttgaaaaaaacagagggctattacgattcttttaacaacctttgcagcaatataataaccataaataaaaatgttttttaaatgaaaatgaagtcaaatgtcatcctgaatgacgacaaagtaatcaaagagagattgaaatattgtgtccacatcacgttaggacgttttctgaacatccaacgcaccgtatcgcccctgtcgcacgagaaagtggcgggacagaccaccatcaattccagcacgacatggaacatggaacaagtccggaattacagcatattatcgtacgcgcaagtgatctacacgcatttcatagccttgaagtgcaatttctacgtcctgcatctctcaaaggcgatgatcaaagcgattcaaaacgggcagtgcgtcatcatcaaaaccgtagatcccgacaaactggacgattaccttcccggcgaaatcctcctcgaacagcaccccgacgcggaagaactggagcggaggacaaaggcgagagaggcgttactgagcaaatccatgcacctgcggataagcaaaagtcaagaacaggaaaaggaaaatgaaaagaagaaaaagggaaaaggaaagaaaaaagaacaggaaaagaagaaaaaagagaaagataaaggaaataagggaaaaaagaaatcggaaaaaaagagaaagttatcataagtttactacctttgtagcacaagaaggatacaaaagcaaggacatgaacgattgtgaagagacgaatggcaaggcaataaaagcgctcatagtattcagagaaataagtgatacggacaatctgttcgctcctattctatgcgatgctatccgcatgacgggtattgacgtacgatgttccaaagaagcattttgggaatcagacacggcgtatgacatcatacacttccaatggccggaagaagtagtaggctggaactgcgaagaccccgacgtgatacgccggctcgaagagcgcatccgtttcttccgttcgcgcggggcgcatttcgtctacacgcggcacaatgtgcgcccgcactacgcaaacgacatcatcagccgcgcctacgacatcatcgagacgcaaagcgacatcgtggtacacatgggacatttcagcgcggatgactttgccgccagatacccccaaagccggaatgtcgtcattctccaccatatctatgaatatacttatcaggaggacatcagcgaggcgcgcgcacgccaatatctcaatctgccgcagaacgcgttcatcgtcaccgccttcggcaaattccgcaaccgggaagagatacgcatggtgctcggagcattccatgcatggaaacggccgcataaactgctgctcgctccccgtctctaccctttctccagacgcaacaggtacggcaagaacttcctcaagagatggctctcgcgcttcggctactacgtggtcaggcccctgctcaaccgttggctgcatctgagagccggaggtaacgacgacctggtggacagttgcgacctaccttattatatagcagcttcggacctggtaatgattccacgcaaagatatcctgaattccggcaacatccccctcgccttcctctaccacaaagtggtggtgggtcccgacacggggaataacggcgagctgctggccatcaccggaaacccctcgttcgaccccgacgaccgggaagatatcgtccacgcgctcgaaaccggcgcacggtatgccgcttacgaacacggggaggcaaactacgactacgccatcgaaaacatgaatatcaaaaaaacgggacgcgagtatgcacaagtctataaagacgcgataaatggcagataatctcaaaagtcagctgttctccggagtgttctacacagcgctcgccaaatacagcggtgtcgtcatctcgcttgtggtggcgggtgtactggcacgcctgctctcgccggacgacttcggcattgtagcgatagccaccgtaatcatcgccttcttcaacctgttcacggacatgggtgtatcccccgccatcgtgcagcacaagacgctgacacgggaggaattgtcggatattttctcgttcaccgtgtggaccggcataggcataagcgccctcttcttcgccgcgtcatggctgatagccggttattacaacagcgacatcctgcggacactgtgccaactgctgtccgtcaacctgtttttcgcttccgccaccatcgtgccgggggctttgttctaccgcaacaaggagttcaagttcattgccgtgcggagcttcgtcattcagatttcggcaggggcggcagccgtcaccgcagcactctgcggagcgggactgtatgcgctgattatcaacccgatcgtatccagcatactgatatttgccatctcctaccaacgctatccgcaacgcctgcgcctcacgctgggcctgacggtgctgcgcaagatattctcctattccgcctaccagttcctgttcaatgtcatcaactatttcagccgcaaccttgacaagctgctgatcggcaaatacatgggaatgtccgacttgggatactacgaaaaatcttaccgtctgatgatgcttcccctgcagaacatcacacaagtgatcacccccgtgatgcacccgatattcagcgattttcaagacgacaaagggaagctcgccacctcctacgaacggatcctgcgctttctcgccttcatcggactgccgctcagcgtgctgctctttttcacggcggaggaagtgacgctgatcatcttcggcgaccaatggctcccgtccgtacccgttttccggattctgtcactgtccgtagggattcagatcatactgtcttcttccggctccatcttccaggcggcgggcgacacgaagagtctgttcgtgtgcggactgttctcgtccgcgctcaacgtggcgggcatgctgctcggaatcttctatttcggcacgctgacggcagtggcaagctgcatcgccgtcacgttcaccgtcaacttcgcgcaatgctactggcagatgtaccgggtgactttccggcgaagcgtcctgccgttcgtccgtcagctcctttctccgatggcggtaagcctgctgatggcggccattctcctgccgatacagtacgcgacggaaggaataaatatttttcttacaataattgtaaaaagtatagtaagttttactatctttgggggatatatacaagttacgcgggagtacgacctcttggggaaaatacgaagcatggcgggaaaaggaaaataaatgaacggaatagacaacatacatcaagacaaagagcacgcatgaaagccttatttctgatatttcacggtttcgacaaagcaaacggaatcagcaagaagatacattaccaagtgaaggcactcgaaaagtgcggcgcggatgtccgcttgtgctactacgccaccacgcctttcggcaaccggcgactgatgatcggcgacgaggtgatggccgatttcggcaaagggacgatggcgaagttgctgaaacgtgtctactactcgcctatcgtgaagtatgcgcagcgagagaagatcgactttgtgtacatccgttcctatcacaacgccaaccctttcacgctgcggctggtggaacgcctgaaaaagacgggggcgaaagtgacggtggagataccgacatatccttacgatcaggagtacatctcatggtctatgagggcttcgctcgctgtggaccgttgtttccgccaccggatggcgaagctgctggacggcatcgtgactttctccagcgcggaaacgattttcggaggcaggacgatccggatttccaacgggatcgatttcgacgctaccccgatgcggagcggacagaacgacacttcgcacgagctgcacctgatcggtgtggcggaggtgcactattggcacgggttcgaccgcctggtacggggcctcgcggagtattaccggacgaatccggaatataaggtttatttccatatcgtaggtccgctatcgggcgaacgggaacgggaggagattcttcccgtgatacgcgaccatcatctggaggagtacgtgattctgcacggacccctgcacggagaggaactcgacgagcagtttgaacgcgcggactttgccatcggcagtctgggacgccaccggagcggtatcacggaaatcaagacactgaaaaaccgggagtacgcggcacgcgggtttgccttcacttactcggagacggatgcggattttgacgctatgccgtatgtgtggaaggtgcctgcagatgagtcggcggtggacgtcccgaagctgattgcgtttcaacggtcgttgaagatttcgccggttgagatccgggagtcggtccgcccactgtcatggaaagcgcagatgcaaaaggtgattgaggaggtaggacttaaaaaaacaactgatgaataaacaattaagaatagcctactgcattccttcgctttattatcccagcggtatggaacgggcactgactctgaaagcgaattactttgcagagcatttcggctatgacatacatattatcctgacggacggaaaagggaaagagccttactatccgttgcatccgtccatcacgcttcatcaactcagtatcaattacgacgaaatgtacgggcgttcattgctgaaacgtatttcgggatattcgaagaaacaacggctttacaagaagcggctgaacgagtgcctttgcgaaatccgtccggatatcacggtgtctctgctgcggcgtgagatcaacttcatctgcgatatgaaggacggcagtgtcaagctgggagaaatccatttcaacaagtccaactaccgcgagttcaccgacaaccgccttcccggattcgtgcagcgaatggtgaagcagtattggatgcggcaactgatccggcaactgcggaaagtgcgctatttcgtcgtgctgagcaacgaggacgcagccgaatggacggaactggacaacgtgaaggtgattcacaacccgcttcctttcctccccgaccaacagtcggacggcacgcaaaaacaggtgattgccgtaggaaggtatatgccgcagaaaggattcgaccgcctcgtgagtgcctggcgcatcgtcagccggaaacatccggactggacgctgtcgatctacggggacggtatgcgcgagcaactccaacggcaggtggatgaggaaggggtggcttcgagttgcctgctcaaacacacggtgcagaatatcgtggataagtattgtgagagttctgtatttgttctgtcttcgcgctatgaggggttcggaatggtcatcatcgaggctatggcgtgcggggtgccccccgtttcgttcacgtgcccgtgcggaccgagagacatcatcgcagacggccgcgacgggttgttggtggagaacggtgacatcgggggattggcggagaagatctgttatctgattgagcatgaggacctgcgcaggaagatgggacggcaggcacgggtggatgtggaacgtttcaggatcgagcatatcgcggagcaatggaaagagttgttcgaggaggctttggaaaaataaacagataagcggtacgcttaataaatcaggaagtgagttatgggagtttggtataagaaatatttgcaggtgtacgagagaccgtttgcggaagctccccaagcagtggtggaggaagtgcggcagaagatcgccgggcttcagagcgagaatccggtggttaccgtctcgctgataggctacaacgaggaaaaacatctgctggcttgtctgtggtcgctgagcgagatgcagtgcaaatatcccctagagatcatcggggtggataatgaatcgaaggaccgcacagcggagatttttcaggcgtgcggcgtaccttattatacggagacgcagcatagttgcggttttgcccgcctttgcgggctgaaccacgcacgggggaagtatcacatcaacattgattcggacacgatgtacccgcccaaatatgtggagacgatggtggatgcgctggagcgtccgggcgttgtcggggtaagctcgctatggagctacattccggacgaggagcattcccggtggggactgaagctgtatgaggctacccgcgacctgcatctgtggctgcaatcgttcaagcgtccggagctgagtgtgcgggggctggtgttcgcttaccgcacggatttggcacggaaaacgggcatccgcacagacatcatccggggcgaggacgggtatctggcactgcaactgaaacagttcgggaaaatcgcttttgtgagaaaacgccgcgcacgtgccgtcacgggatatggcacggtgggagccgacggatcgctgttcaacagtttcaaggttcgtgtggccaacgggctgagggggatcggaggactgttcaccaagaaaaaggaatataaggatgaggagagcaatctcgtgaaaaagaaataaaggaaagatatagagaaataacccaaacaaataatatatagcattatgattacccgtatcccgtatgacagagatgatttgaagatcggaaagaaggacaaggtattggaagttggtcccggtcataatccgactttcagagccaacgttatcgttgagcagtatttggacagtaatttccatcgttgcggaaacgtgaagatatacccgcatcaggagttggtcaatgcgaacggtgagaatttaccgtttgaagataaggcattcgattatgtgatttgcaatcaagtacttgagcacgtggaaaaccctgcagagtttatccatgagcaatacagggtagcgaaaaggggatacatggagactcccagtttgctgggcgaatttctctttcccaagaaatcccacaaatgggtggttctttacttggacaacaaactgatcctttttgagaaatccagaatgccgggaaattacgagaataactatggggaactgtttctgaattatctgccataccaatcgctgacgtataagctattgtggtttaccgaagggaatctgatgttgaaccgatgcgaatggaaagatgatatcgaatttatcatcaatccgacagatgaaaagtataccgattttttcactaagccgtggagcagacagatggtggaacagatgtatccgcgcagaagcgcgatgaaagagctgacaaagatcggtaccgctttatattatattgtgaaaaataaagtaaaaaataaaacccataagcactctccgataagcttggaggagtatatgcgactaaaagaataaaagctaaaaaatcatgaacgatacacttactctttgtctcgaaattcttttctggtttgccctgtttgttgtgttctacacgtatctgggctacggaatcctgctttacatccttgtcaagctgaaagagtttttcgtgaaaccagtgagacgctcgctcccggcaacggacggggaactgccggaggtgacgctgtttatcacggctttcaacgaagaggaggtggtggacgagaagatggagaactgccttgagctggactatcctgcggataagctgcacattgtctgggtgacggacggcagcaatgacgggacgaacgaacgcttgcagacacgctggcagggaaaggcgacggtgcatttccaaccgctccggcaagggaaaacggctgcaatgacgcgcggaatgacgcttgtagacacaccgctcgttgtcttcacggacgccaatacgatggtgaaccgggaagcgatacgggagattgtactcgcttttcaggatccgaaagtgggatgcgtggcgggagagaaacggattgccgtgcagacgaaggacggggctgccgccggtggcgaagggatttactggaagtatgagtcgacgctgaaagcgttggacgcacggctatattcggcggtgggggctgcgggtgaactgtttgccgtacgccgcgaactgttcgaggcgatggaaccggacacattgctcgacgacttcatcctatcgctgcgcatcacgatgaaggggtacacgattgcttaccgcaccaatgcctacgccatcgaaagcggttcggcggatatgagggaggaggaaaaaagaaaggtgcgcatcgctgcgggaggattgcagtctatctggcggctgcgcccattgctgaacccgttccgctacggggtgctcagctttcaatatacgtcgcaccgggtgttgaggtggtcggtcactccgttcctgctgttcgcactcctgccactgaacgtggcgattctgctgtcgggcggtccgacggcattctacggggtgctgcttgggatgcagctcctcttctacgggttgggatattggggctattatctgtctgccaggcagattaagaacaagatactcttcatcccctattattttctttttatgaatatcaatgtgttgaaagggatccgttacctgaaaaagaaaaaaggaaacggagcatgggaaaaagcgaaacggtcggagaagtaaaaacaatttgagatatcttttgttatcttataaaaaaatcatacatggacagaacattacacaatgcaaacaatgcacaaagaattctggaactgacggcagacacaatgttgctgatagacaggaatggtatctgcgtggatatcgattctcattgcgatttatggtttctgcaggaagaagttcttttagggaaggatatcttcgaacttttgccagagcggacaagggataaggtaatgccggtgttcgagacggtgatcggggaacaccggagtgtcagcaaaaacttcaagctggagctgaagaatgagacattctatttcaagtgtctcatgcatccgtatgatgatatggtgctttgccaatatagggatatcacgcaaagaagtaacgtgaaacgccagttggagcaggcaaaccgcacgttgcgcgagattcagaaggtggcgcaaatcggacactggacgtataatacggcggaaaatgtgtttcattatacaggatacacgggagtattgtgcaaggaggatgtgcagcatatctctttcgatatgtacaagcagttaataatggaggaggatcacccggctttcgagaattggtgcgaaaagaatgtgtcggaattcaaccaggaaagtatcagttaccggatccggctggacggggatattttctatgtgcgtatccagacttatctgcgggaggaattgcccgacggcagttgcaatatagaagggtatatccagaatatcactgttctccaacaccggaggaatgatatcaatacactgactcatgccattaataatgcgaaagagagtatctttgccgccaaacccgacggtacggtgatctttgccaaccgacgttttctgtacaatcacggtctggtggataatacggacatcagccggctgaaaatctataatatcgttgcagatatgccgaccgaagaggcttggcaggaacggtgcaggaatgcggtgcagaacggcagcaatacgtttatcgcgcatcatccctccagaattcataaggatattctggcttacgaatgtacgatgtacaacgttatcagtgattccggcgaggagagtttctggtcgttcgctcatgacatctcggaaagaatgaggtatgaggcgcagatcaaacggctcaaccggattatggatacgacgatcaataaccttcccgcagggattgtggtgaaagagattaacaatgatttcagatatgtgtatcggaaccgcgaatcgtacaaccgcgatcatttcagtgataatccggtgggtaagaatgactatgacttctatccgccgattgtagcggaaaagaagaggcaggaggatattgaggtagctgctaccggaaaaggactgcattggatcgctgagggaaaggacaggaacgggaatctgattattcttgataaacggaagattaaggtggatggtgacgagttgtcctctcctatcatcgtcagtattgagtgggatatcacggagctggagatgatcaagcgggaactccagtcgtcgaaggagaaagcggagatgtccgacaatctgaaatcggctttcctcgccaatatgagtcatgagatccgcacaccactgaacgcgattgtcggtttttcgcatctgataactgagagtgatgacgcggaagaacggaaaacgtattatcagattgtggaagccaacaacgagcgtctgttgcaactgattaacgagattctcgatctttcgaagattgagtcgggaacgattgagttttcatttggacttacgagtctgcataatttgtgtcaggagatacatgatgcgcatatattccgcacaccggagggtgtgcaacttgtctatgagccttcggacgaaagcctgcggatagagacggacaagaaccgtgtgttccaggtgatttcgaacctgatcgggaatgcggtaaagtttacgaaggaaggtagtatcaagtacggttatgagttggtggatggtcagatcgtatttcatgtaacggatacgggcacgggaatcgaaccggaaaaggtgggacgtgtgttcgagcgttttgccaaattgaataatcatgctcaagggacgggactgggattgtctatctgcaagtctatcgtggaacggctcggcggacagatttccgtcagttcaatagtgggcgtgggcacaacgtttacgtttactttgccgtacagcacacaggaaacgcccaaagaggtcgattcggagatgaagacagtgctctacaaagaggaggtgccgcagagtggaaacggcatatccgcgaatgaaggaacgggaaaggaaaagatacatatgacgaaacagatctgtatcctgattgccgaagatacggacagtaactatgatttactgaacgctattctaggcaagcagtatcgtctcgtccgtgctaacgatggtatggaagcggttctcttgtacgatgaggtgaagccggatctgattctgatggatatcaaaatgccgaatctggatggactggaggctaccaagatcattcgcgaactgtctgctacggtccctattatcgctcagagtgcttttgcctatgagcatgatgtgaaagccgcgatggaagcgggttgcaatgacttcatagcgaaaccgatagctcagtcgaaactgaaagaggtaatcaataagtggttgacgatggaatgactgtaaatagttgacgacggaatggctacgaatggctgacgacggaatgactacgaatggctgacgacagagcggctgtgcccgaatcagaatattgtgtaaggataaagtaagattattatgaaagccttttatagactgttctactatttttctatcctgctgacaggtgttttggcaggtgttaccctagtgggtgcttttgccggaaacactgcaccggagagtttcaaacttatcccttttatcggtctagggttgcctgtacttttattggctaatctggcttttgccatttattggacgatccgctggcggtgttgggttttcctttctctcattgctttattcggtaattgggggtatataagttgcgtccttcagtttcctcttttcagcccggcttcggagccgatagccaagctgggaacctatacacccggaatattgaccgtagcgacttacaatgtggatgctttcaaccacgaatacatggggtattcctgcaaaggtattgctactcaaatgcagaatctgcaagcggatatcctctgcttgcaggaggtcggtatcaattcctcatttaacattgacagtgtatgtgccgctttttctaactggccgtatcagtatgttccttccgctcccgaaggaaaggagcttttgcaactggctgttttcagccgttatcctatcagggaacagagtcttatcacctatcctgactctaagaattgcagcctgtggtgtgacatcgaaatacccggtcgcacgatccgcctgtttaataatcatctgcaaacaacggaagtgacccgtaacaaaagagaactggaaaaagagctttacaaggaggatacccaaaaagcggaacgtgccgctctgactctgatagacggtctgcacgagaacttccggaaacgtgccggacaagctgatgtcctcaaacaactgatagccgactccccccatcctaccctcgtttgcggcgacttcaactctctaccgtcttcttatgtctatcacaccataaaaggtgacaagaaaggtgataagaaaggtaacaagaaaggtaacaaactgcaagatggcttccagacaagcggacatggctatatgtatactttcaaatttttcaagcatttactaagaatcgactatgtcctccactctccggaactgaaaagtacggattacttttcaccggactggagttatagcgatcataatccggtggtgatgaggatgaagctataaaaaagaaagccgaacagacttatttgtccatccggcttttccttatgatatacttcgtcttagaatatatatcttaaaccaagttggcatctccatcgagaacttatgtttgagatctctttaaacggatcgtatttatctccttgagtatattgaaattcacctccttttgagtatgtgataggagaatatgaattattggacatataactttcaagtccccattttctattaagcaagttaccaacattcattatatcaacagagaattgcaaagtatgtgtttctttagctactctgaatttaaaatcttgcaagaaacggaaatcaaaatgatgctcaaaagacatacggtctgagtttctttcataatactcaccacgatggtctttcagatacttcgcactgcccaagaatgctttcaagtctgctttttgctgatctgcatccagtttcgctgtagccttaaactgcatcgcatcaatctgctcatctgtaggaataaaaaccaaatcattaccattactaccgtcaccattcaaatcaccgtaataagtcacattatatggagcacccgactgacctgtatataccagactgaccgttgatttaaaacgtttggcatattccttgccataagatagagatgccacaatgcgatgcgggatgctataatcggatacactcagctccggagcattcgaattacctgttgtctcattatatctccagtttgaataggctacggaagaagtcgcagagttgatagacttactttctccataagtgtaagctgccattacatccagaccgaagttaaatgatttttccagtttaagagacacattataggtatagcctttacttgtattgtccaacaacattatgtcagtgtatccggcattttgctttttaaacataggtcggttatcaaaagaaagcgacggataagtagaaccgacagtagcatcaccatccatctcataattcaaattgcgataatatatatcattcaacgtctttgaataaagaccttccaatgtcatctttacatcgcccggaagcatatattcgaaagccaaattagcacgaaggttctgggcgaatttaaagtctttagaaaagacatccacctctgttgtagatgccgttgcattttgtaacatttcagcctgtcctttgggatcagtattgaaatagaaagcatcacccaatttctttatatcgttactatataaagagtacttctcaaattccatacctgtatttgagaaactattgcttaaccatacaaaaggtatacgacctgtgaaaacaccgagtccaccacgcaacaaggctcttccatcatcagtcaatttccaacggaatcccaaacgcggagaccacaagggagtactactcagtttacgattagtataaacaccataatttttagctatatccgtattgttgaaagtatcgttttttgtaggagtatccaaaaaaatggggatgtccatacgaataccatacgtcaatgtaaaccggttggtagcattccaagtgtcttgagcataaaatcctaactgcatagctccgaaactaggagcccaatcgtccctacccgttacatcaacctttgaacgaccgtagtaatagttattaacgactccattttctaagtcatcaatgctgttaaaagtataagcaccatagagattctgaataaacaaattctcaaattgatacatctcattatgagtaccgaatatcaatgagtgattacctaacaatacagagaagttatctgataatgtaaaaatgtcctgatccaaacgatttgcacaagaagagtattccgtacccaatagcattgaagatgcccctttctttacggtgattgccgggaatatatccccttgaggctcacggttatcacgtacacgtacatatgaaaaacgagcttcattattcatattatcaccaatacgggaatttaattcggcagtcagtgaatgtgtcttattggtaaaaacaaacgctacatcggaagcattcagttttgagtatgaacgagagaaattataacgttgtgctcctacaaaactataacgagccgtaaatttattacgatcatttatattccagtctatttttgttcctactttatctgaacgtgtatagatatctttcggatcaaaatcagcattatatttaccacctgttttatccttcaaaatattcaatacgcgctgcgtctcctcaagtgtgaaatcggaaccatcaccaacattatatgctgtcggataagatttatccgttttttcgtaattggcaaagaagaatagtttgtctttaataataggaccaccaatcgttacaccccattgataatcatgctgtttatctaattttgtacgtttctgtccttcttccatctctccggcagtagttccgatcaaagcttgtgtatttccaaagaaatatgcggaaccgtgaaacttatttgtaccagacttagtaattgcattaattccaccaccggtaaaacctgactggcgaacatcaaaaggtgcgatatttatctgaatctgttcaatcgtctctaatgaaaccggttcaacgctagcttgtcctccgttcgttccattggaagtaaggccgaacacgtcattattcattgctccatcaatttggaagctattatagcggttgttggcacctgcaaaagaaatcgcaccattggaatttacagtagcctgcggagtcagacgggtgatgtcattcagactacggctcattgtcggcactgattctatattctttaaagaaaagctggttgcagctccagtacgactggctgccacacctttctgacctgtaacaacaacctcatccaataattctgaggattcttttaactgaatatccaactggtaggtttctcctaattgaagattaatcttattgaaaaccgcagtgctatatcccacgtaggaaacttcaactttataaggaccgccggcacgcataccttgcatcgtaaatcgcccgtctacatttgttattgctccataacgggttccggaggcctcatgtatggccactaccgtcgcacctatgataggttctttctgcgctgttaccttacccgctatactggaggtcgtaacttgtgcatttactgtagcaataagcataagcatcagcatcgctactactaaaaaagatcgcattctcttttgcataatgtaattgattagttaatactaattgtttgatcttaaaactgcggcaaatataattaatattatttagaactacattacgattataccacaaaattttaagagagataaacattttattgcgttataaaacaataaaggctctacaatgcttgtagagccttttattttgaaactgaaagtattagaattatttcagtctattactttctctagtcagtcattaactttctgtaacgaacacgcttgggttcttcattgcctaaacgtttcaatttattttcctcgtattcggaataagaaccctcaaagtagaatacattggaatcgccttcgaaagcaaggatgtgcgtacagatacggtcgaggaaccaacggtcgtgggaaataacaaccgcacaaccggcgaaatcttccaatccctcttctaatgcccgcaatgtattcacgtcgatgtcattggtaggttcgtcgagcaacagcacgttcccttcttccttcagtgccatcgccaagtgcagacggttcctttcaccaccggacaacactccgcaaagtttttcctgatcggctccggagaaattgaaacgtgaaagatatgcacgcgcattcacatcacgtccacccatacgaagcaattcattgccacccgaaataacctgatagacactcttattcggatcaatatccttatgttgctggtcgacgtacgccacctttacagtctctcctacttcaaattcgcctttgtctaccgattccagtcccatgatcaggcggaacagcgttgtttttcctgcaccgttagggccaatcacaccgacaataccgttagggggcagcataaagttcaaatcgtcaaacaacagtttgtctccgtatgccttcgccacgtgcttggcttcaatgactttgttgcccaaacgaggaccgttaggaatgaagatttcaagtttttcttccttctctttcacatcctcattcaagagtttgtcgtaagagttaagacgtgccttaccctttgcctgacgggctttaggagccatacgcacccattccaactcacgctccaaggtcttacggcgtttgctggctgtcttctcctccatttccatacgtttggtcttttgttccaaccaggaagagtagttacctttccaaggaatgccttcaccacgatccagttcgagaatccatccggcaacatgatcgaggaaataacggtcgtgcgtcactgcaataactgttccctcatactgttggagatgttgttccaaccagtcaatagactctgcgtccaagtggttggtaggctcgtcaagcaacagaatatcaggtttttgcaacaacaagcggcagagggcaacacgacgacgctcccctccggagagatttgccaccggctgatcttcgggcggacagcgaagggcgtccatcgcacgctccagtttgctatccagattccatgcgtctgtcgcatcaatgatatcctgcaactctccttgacgggtgaaaagagcatccatcttatcctgatcctcatagtattcaggcagagcgaatttctggttgatttcttcgtattccgtaagtgcgtccacaatgggttgaacgccttccattactacttcttttaccgtttttgtgttgtccaaatagggttcctgtgccagataacccacagaatatcccggcgagaatacaacttctccctgataggatttctccaaacctgcaataatcttcaacaaggtagatttaccggagccgttcagaccgattataccgatcttagctccatagaagaatgacaggtagatgtccttcaacacattcttattgggctggaaagctttgcttactccaaccatcgagaagataatttttttatcgtcagcagccatatattaataatgtatattgttgataatggcacaaagataagaaaaatgtttgaaatcttttggagttataaaaaaatgttctacctttgcacccgcattcgaaagaaagcaaacaaggattgattcgctagctcagcaggtagagcacaacacttttaatgttggggtcctgggttcgagccccaggcggatcaccaaataaagcacgagtttgggacgattcaataagcgtaactacttgtgctttaattatttacatttcaatatacttgcaaatgcatattatttaaatgtactgttttataagggtttattaagatatatgcgcattttggataccaaaatcggataccgtttttgctaaatcggataccaatttttaaaaccaaactgcgttatgaacagagtacaaattagagtcgttttcgacagaaaaaaaacagcctcatccaagaaaagaggcttagtgcaaattgaggttagatttgagaacaaacgaaagtttgtcaccacaggaatcaagctatacaaaaaccagttcaagactggacgtatagtgaatattgatgatgcggatcgcttaaacaagaaagtcacagaacaaatcaacgaaatcaacgagcttgttgaccgattggatcaaaacaagcaaaaattctcccttgattatcttgatcacatcaatgatgtttatattggcggttcattcgttgaattcatggaaaaacgaataagcgagcgtcctacatgtgtaagcacacaaaagcagcactataaggtgcttaattttctaaagaatgaatacccgcacttaaccttcttttcagacttgacatatcccaatattacactattagatgaatatcttaaaaaacgtaaggtagacggacacctcatgatgcaaacaaccatacacacctaccataaggttatcaaattgtatatcaatgaagctattaaattcgaaaagatgcaggataatccttaccggaaattccacgacagcctcggaaccccacgcgaacgcaccgtgctcagcttgcaagagatagaccttattaggaattacaagacactttcttctttagaaaggaaagcgcgagatttattcatagttcaatgttacaccgggctttcatattcagaccttatgaatgtcgatttcacaaaagcggaacgccatggagaagattttatactaaaagacgaacggttaaaaacgggcgtgacttttttcgcggcccttcttccgcccgttatagaagtgctagacagatacgactaccaattaccgcatcttgcatatgatgtatacaacagaacattaaaactggtagcctcatcagcaggagttaagaagcatattagtacacacattgggcgacatacatttgctactaccatcgctttaggctcaggtcttcccatagaggttgttgccaagatgttgggccatcgcaatataaagactacacagatatatgcaaagattatgcccaaaactgtcctagaagggtttcaaaagataaaggaggttatataaaaaagaaaggcagtcggatagactgcctttttacttcaacagaaagagactttaatttctcgctatctatttttatcattttattttgttttatcggacatcacataacactttgacagtctaatcgacgtattttagacttactatctatcaccacaaacagctattttactatcaaaatgatattcactattacaaagaaactttatccctaaacaaccttaactggtcaactgttgggtaaaacgtagggttctcccaattcttgcttatcaccaatatcatcgaatcaagatacttctcgcaatcaagaatctttgcacatttatccagttgaaattccccgaccgggtatctcttattgttgagcgtttctttagcccagcttagcaactcgttgatcgagtcgtggtcatatttctgttcttcagccataatatttagttttcggcaaaggtataaaaaatccccgactacatagtcagggacaaacacaaagatgcaaccttcgctatcacagcgacagacacaagccaatccagagtattttctaagcgttccacagcataaccatgagcagacggcagaaatcgtaatgatacctgtcgtccgcttgctctagtaatatgtcgaggttagtcctcatagttcattgcggtcatatactcccaaaccttgccgaccggggcatcctcatctgcgaaatagaaccggaaagcggcttttagcaacgttgcttcatcgaggactgcacacatgtctgcgtagaatgagttgaaagcgacatatttgtcccagggagttgtgccttgcgggaacggcatggatttcgttgcatcgagaatctgatccatattccaatgagcaccggatttcttttcgccggatgcattggtatagcgaatcttttccacgtccgcatcggcaaaatgcctatcataatgaggaccatacagggattcatgctgcttcctcataaaagccatgtatagttcggggtgttcttcctttacgacacagagaatttcatccacgctctccacgctcttccacattgccttatcggaggtcacaccgtccgccttggctttcttcatcatatctatatacttcataaatctattttttagcattaatattctttcccttctttacggactttcccgatgatgactttaacaccggcatgtattcgttaagcgggaaaggtggcggaaatagtcagcggggtagcaaggcttacgccataggcacgattgcagcatttcacattttccggtgtcacctgtgtaacaagcggagtcaaagagatagtaggaacagcaccggcagcaccgataaatgcgactttgaactgctcaacccattgtttggtgacagtacggcaggagcctttcggagtgtaagccacaaggacagcagcgtttatcgtcacgatagtctgagtattcaccgtttgttgttcagcaacggtaaaattaacaatgccggtaggctgtacaccattgtcagcgcaaaacgcctggcataagttttccactacattagtcagatattgctggctggtagcagcgattgcaattggggttaattgaatcataataataaagatttatatgttatttttcgtccgcatcttcaccttgcggaataggctcttctgtcaatacgctataagatgaaaccgtctctttaataggcagattgtatttgagaagggttttcagctcttccaaatcctctacttcgaactccacctttccttcaaatagtgacaatccaccattttttatagcatcatccaccacgttatgggcaagctgtgggatggagtcatccgggattccgcttatatatctggcaagaaaaggctcaaccaaagaggatgaaacgccatcaagaacaggagatatctcttttgccatactccacatcgggcttacccatccggtagattttatttttgattcaatgctggaaagaaaaggcatccggctcaaattgctacccaacaattcttgaatagcgggctgcgcccatttattgagcacagccgccagtttttgtgcgttggaatacataacgcttacccgttacagcaacatcctgtatcacacacctttctctgaggaacaacaagctcgctcaatgcagccagttccgcaatctgctgtttcatacagctaagcgtagcggtattggtgccgttgtaaactgcctggttcatgttgattgcattttgatcctctttgtttctgttgatgatagtcaacaggcggtcgtagacatccgcaagtttttggtctgtgtaggtgttagacttaagcaacgcaatctcggaatctttcgctgcaagcttatccatcataccggcttcatagcggctaacaggtctgtcttccgaagtaattacttctaccggacctgcgtaacctgcattacgtccgttaccacaaccgccaaggatattcccggcattcaccccaaaaaaagacgctaatccagccgaacctaatacggtattcagatttccctgaccctgcccggtgacactgtattcctcaccactcattcctttaatcttcataacttataagtattttatacacggtcaacattaaccgtgtaacaaaggacaggaaaagtgcgttgctcctaaattattccgttgctacctcgttgctaatatgttgcaagttcgttgctacactccatttctttatcttgtactgaaaattgttgcgtatcttgttgactgattgacgggtcagtcgggtaagagaagatatctgggtgtcggtcagtttctgcgaaagcaaatgtataaggatatatcttgcgtctaccgcttcctcggagttactatgaagcatttcgtattcttcaactcctgtctcatttttcaccgcaacgaccacttctttgtataaatctatatttttcatgctgttaaacatatacagggttaaaacaaaacatctcaaaatctgttgataaagctatgaagccccattaacagtccctgagatgttagcccgtgtatgatttggtcgtcgaaacgggttggggctttcttctttccccgcccctggggtatttgttaacgattaccggtcttctactttaccggataaacttattgcttagtattaattaatgtatcattttatcctcctttctttatgaacctttttccattggaaattgttatgtagtaaaacttaagcttttcatattacttaaggtgccgtctgggaagatagcacctttttctcaccacatgaacaagttgtaactaactccagctcctacgtaccaaccgcccggataaccatatccagcctgcaagcctaatccccatcgtttcttcttctgtaaaggtggaaaagtaataattttattatctctgtatatttccatagaatcaagagtaggattatatccactgactaccgcccggtaattatcggtcttatactctttgcttgtaatcggtattagtaccgggatagagtcgtcttctacagttctgtcggtggtagtatctatcaaaatcggtaaatataccgtatcagtacgtttcaaagtctcccttaccggcttaaggattgtgtctcttactgtatcccggatatgaactgtatctccttttacatacatatgttgtggctcgtgcgaattacaacgcatccacacgatcacgccaagcagcaggcaaatcagtatataaggaagggttttcatgctacctcaacgtaaatacctacaaggtcttttagtgagttgtaaaccgcttgcccggtagaacgggtgcacttataggtaactccgtcctgcgaatagtatttgccctcttccaatgccatattgttgttatatggaatcggatcatcctttgttccggcagcggtctcgttgatttcctcatagagagctgcggtgttgatgcttggcggttgattctccaagacggtagcaatgtcctgacgaacccggtagagtttatcgttgtactgcactttcattccggttgttagtgatttgctgataaactcgttccaatacggatacatggacttcactttcaacgcttcgttgtctgtcaagttcattgtctggattccggctttggtcacattcaaaaggttctgcgctgccgccacctgaataaactgcgcactgcctgccggatgttcttcttccgtccatgaccattcatcacttgacagaagggcgttcagttccgggctgtcaaaatagtacctcggaaactcttcatccttgtaaggggttagaaactcttcgtggaggattaccttacttccgtctttactctttctcattgtggggatagccagcagaccgtgctgggctagccattcgattgttactactgcgtatttcattgctttattatttaattacttatcagactaattatatttgttcccaagtgacacttccatcctcattgaaaatgagtttcttgtttccaagtagtacaacctctgtttgtactgtcgaaccaagaatcatttgtccatcttttgatgccttagtattattgccgagaatgattacatcatttaattgattaacactacctccattatcagcaccaaccataatattgctacttcccttacagtacctaccagctttataacctatataggtgtttttttgattgccataaacccctgcctcaaaacctacaaccgtacacccttgtgtcttcactttgagatctgccaaatctcgactcgcacggcaaccaatgacaacacattgagaagagcctgcgcccgaataagagcttaatacttcggctccgataccaacagtctcttgattttcttcaccccccaaagccgatctcccgattgcaacattactattacattcttttctgcttgggtatagagtatcagctcctatcgcaacattatccttaccactcggtatatacgcagaagaataagtaccaatggcaatattacgagaaccggaaatcaattcagaaagtgaatttgttcctataccaatacatctcgttgagttttcagatttttcaagtgttttgtaacctaatgcgacattccaccaacctgatacatcattatcccctattttaaaatatatattttggcgaccgtaagatatgtattgttttgcggatgatttatcaaccacttcatataattcaatctctagtgttgaagcatatttagctgatggatacactttcaatgaaccaccatcgctaatcattcctatatagataaccaattcgccattatacgtatctatcggtgtcttatctccgatacctactaatatagaattctcattaccttctatgccttttgttaatttggcaagatattttttgcctttggtagtagcaagtgtaaaaacaagagcgttatcgtatccgcttgtatgggtatatataccattttcatagctccatccttcggataattctgctggctgtgtaatcagattatctccgcatggaatattatctgctaatagaaactttactgtatcatcaaagttcccatcaatcgcagtagctaaagtcccccacgactgttctttgtcctttgctatatcaaatatcttttccataatatcattcgtttttaattaatgtttcatttgaaattaaagttaagttaattagttgggtgagagttccccaaacatttccctctattcctacacactcattcagctcctttatctcatcttcactagatatttctgggaatagcataaaatcgaagagagccatttgagcataagctgaaccattaacaaataaagtcccaatcttaggtgaaaccgaatttacatcagtcacatcttcgttggcaatagttatgttatgagtgatatttgccaattgtctacccttaacggaagtattaagtactccatcaatataggttttaccactattaccatctgaataggcgatagcttcattattggaataaatacaaaatgttggtaaccatcgggcaggttctctttggtcatagatagtacaagtactattacttaatttataatttaccttcatcaatacttgtttaccaccatgagacaaggtaggaatggtaatatagtcatccgttccatcaaagcgaatactaccgtcctcatttgctccactttcttccgtgtaggcgaagttattcaatctaccatgattacctttacctgtcaagtccggaatgtagcctagtatcttgtagctagaatttggaatcctcaacctattaggtgacaggatacagctcggctcattggcttttaggtaggtacgtgcattatcaaacaccatagacttctctacctttatgatagtgtttgggtaaagcgttacaccattataccgtgtctcggatacagtatatagctccggtaaaaggttggcacttcctacaaagactatatcactgcctactttcaacttatctccccaagtgatagttttaccatcttgttttagattaattattgctggataaggctgtacaatatcctcgtatcttatataaggacggtcggaagtattagcccggtgggaaggcgaaccgatctgattcaaaccaacccgattcaaccctattacatttaatggtaacttgttaagcttcattgccggattcggttactgttccacttaatacttcacttccactctcgatgcggatagttttcggataaactaaagctgagaagtcatagtcaaagataatccccgaattatacgggatgatgttgggaaccgctaccatatcaaagcctctctcagtggcagtccgaccgtcaacagcttccgcatattcaccattcttctgatagattttaagaccaccattggacacacgctccaagtgaatattaaaatctgcatttaccactacttccgccacatattcctgagtatcattattctttgtaaatcttaaatctgccatgattgttcctcctattttaatttataacaattcccatccggcttctatgtcagccatgacagccgggataccgttctctacatgtgagatagcggcagcgaaagcacacatggtcgctttgtcgttgatgtccgggacgtatgtgttcgggacttgcatttcactgcatacacggctgatatatccggctgtattattctcgttctccggtgcccaccggtggataaaatctgccaccgtctgacagccgtgtctcttacggtagttctgcaaagtgcggataagggcacggtagccccatctcatttccgtaaactggaagaacgacttatcttcctgcttttctctcaatccctgccatttgtcctttgtgatgcggatgttgcccggattattgtttcttagtcctcttggtaaactcatatttatttcctcctataatatcaatgttaatactccgatttgaatcgcttgtccgatgaacccgcctatcagcgtggcggcaatatcgagccaatcccattcgttgccgtatgcacggtccttgaactccatgccgacagccagtcctgccgcaaacaggatggttaacagtgcacctgccgggatggcgtagagcaggtgcttgatacggttactttcatttatccagctcatataattatgttttaataatcactgggcggcttacgctccttgcatcctctgacttcgcatttcttgaaattcaatgcctgattctcgagttcgagctttacattcttagactgtaggtcacgtatgcgctcgcggtcttcattcttctcaacataaagttggtcgatcttggtatccagttcatgaactttggcttctttcttctcgtacaattctttccactcggctgcatactgggttatattctcagcttccgccttcttggcggctgctgcttcttttctcttctttgaatcgtagaactggaaggctccaatgaggggaagcaggatggttgcgactatcccacctatcattgccactatctgactgatttgttccatattaaaccaagcaagtaagataaacggtcaacaatgaaattacctcaatccagaacataggctttctctttataaaatcggagatgaagttacccgtccaatgcttcttcatggagacaaccatgtaaataatgaatcccgaccataacagaagccagtaccaactgttacagcctacccatatctgggagaagattaaagacatggcggcacctattgcatgaggaaccttttgctccgatttgaagttgggagacacaccgagcacaaccataccgacaaccgaaaggaatacaagaaactggctgttctccgtacttgattccaaagctgccggaagaagcagaacaccggagccaatcatacacagagcgaaccaaaacttatgcgtcaatgcatagtaggtggcactgattgaataagggatttctttccctttcttaatcatcgcataaacatagcctgcgatgagaataaatgataatagtactaatagaatcatagctttatctgtttttgagtttataatacaaaattgagctgttccgggtatccggttttgtaattgtaggcttccacttgtccggcatcagacaaacctttcacagccgctatatgggattgcgtcacattgtagcagtcaagggcgtacaattcaagctggttgagcatagccagcgcatcatctaccgggataacgtacttctcggcattgtaccaaagcgtggtatttatccgaccggattctttctcgataccgattgagttgaccaacccgacacgggtgtctttgtctaaccatatctgttttccggcaagcgtgaaagagttgacggcatccgacttgtcataggcgttgatttccgcgatcttcatctctttcagttcgtcaatcgtatattcatgctcgaccagtataggatacccttcatcattggtaacaataagctttcccgcagattgaccgtctaacaattcttgccaatactttttcgtaatctctattgcaccttcttggggtgtgtcgtggaatccgtttttccaatacattttttgttccataattattctttattaattatttccaacttcctattgctatccatctgaatgactgcgaagaaggggatacacttcccgcgtttgcgtatcttctataaaccgtaaaatatgaagcatatatagctgcataattcacagaccatatagaattatccgtattatccgtagaactggaaaaagctagggaaaaacaggatttgaaagatattgggaaattgacagactgattatttgaagcaccggtgctaaaatatccccattgtatcaacaacccgttgttgaacttcgcatatccgttctgattaagtgaaacggtcatggcgttggataaatccgctttagccagtcttgggatagtgtttagtaattcaacaacctgatcccctgaaaagttactattataatcactcataaatatttattttttattacgttaaatgtattaccgtcagacaatataaatcttccctccgtaaccgcgaatgcctctctcttaccttcttgtgacactttagtttccaccgatgccgtatcactttcttttattgctaaaaaaacaaccgtttgcgacctgtcaagcccctcattggcgatatcacttgttacattagcgatattattctcgcccggagaaataacaatattaccttctccctctttccattttattactatgtccgtcatattgctgtccatgaagtgtttgaatttacagttatagaagtaggagaaccgtcttgcgggatcactatatccttcggggaaacagacagaatgacatttttctcttcctggatgatatttaaccctgcaacataccctgtgttcgcatccgttatcttatattccccggtacgccgttctcccatatttgccgggattgtaacagctatcttatacattccgacatctccgtttcttggagatatgctttccgcaaacgacacatccgaagatacgctccatgcgtgaccagctttcagtatcgcatattttattccaccatcttccgggaattccagagtttccggagtcacaacaatatcaacccctacacccatttgaactatacctatttccgaacttgcacccgtatccgttctgaatactatactacccctccgttcattctcatcattaggacccgatactatattcagcatcacagaagaaccgtctccactgctcggagcaaccgtgatccattcaggtttgtcttctatataccaagacgaagacccgaccaactctactttctcttctccaccagatttcaaaaaacgtacttccttcggatcaaccgatacatattcatacctctcctgcgctacatcaaccgtcttacccaaatatgcatcgtaagttataaactcaatccgcccatccctatctccttcgtagttgatatcagccttgacaacaacatctgtctcctcatattcccccgaaatacttcctccattatcaggcgtaaccgttatccattcaggtttgtatatcaaaacccaggctctatatcccgatatttttataactttctcatctccatgtccgttaatatccaaagaagtcggttctattatcaagaatttagacggatgcacacgttgagtaaaagtaaatacagcagtcgttgtttgataaggatactttccaataaccgtaacctttccgacacgttcctccccatcattaacagcgtaattaaccaccacttccgttacacctgtgctaccttcctctttatccaccgttagccacgacgaatctggtaatatctcataattaatattacttgtaattaatattctcttttctcccgcaattccttcatcgctgccacgtaaaggttctattgttattgtcggttcccatagtacagccaagccgccactaccttctacttctatagacatagttacaaaatcaccctttctgcccgttatcgtcatacgagttaacatgccctcgccttgtatagttaatctcccgtctgtaacatagtcattcgcatccattacatccgcgtgaggtcttacactaccaagcgttatcataacaggattattatcgataagcgttttaaataattccgatgtatctcctccttcacttatcaaatatccgctactaagacgccagttcttttttctttttttcttttttacccattgaccggtatcgggactcccgacttctatagtatcagcttgaatgtctatctcacaggtggtcgaataagcataagccttatacttaccatctttctgtatgaacaatatcagatcgtttccttttatcttagccatattaacctggtatattttcaatcattatctcctccgattcgtcggcccattctatcttttctgaaagtatgcggtatactttttcatctcttacgagcctcatcatcggagttaaatcacttcgttcaaccgttatattaagcttctctataactctaccgtagacctgttttagtatacccaaaagatgttgctcagctaacatgctagcaccttcctgcacaaaatacaacggtccgatatctcttcctgcaccatataatgtgttgtacgcagcctggttattgttattacttgctattttaagctcaagttccttctctcctgatgcacgcctttttaaaagagacacatatacattttcatttttatttgacttaccaacaggattcaacctatcatccttataataatcaactttcaaattatcaatatagagctgcttgtacatcgccgtattgactatagcatgcattgttaactccacgattcccgacaaatcttcatttataggcattacatatccatctgccccattgtaaggcatatccaaagtttttgtactcaatatctttcccggtatagaatatccattttcgctaccggcttgaatttcaaaccaaacctcattgttcgaccaaccacttccattccaccatttatcccccactctaaatttgatttctatcgctcctgcaccatctgtcggattattaggatttaacataagtgcagtttcataccccgttgtttgtcccgatatcacaaatgccccattactatactttgccgcattcgctgatctcattacaaggataggcatccctcttgcctgttccaatccgggacgtgaaattatctgctcagaccgagcaattatccatattccatttttgtaattatagtttcttttgttttgcaaatcacctgctgagtatatatctcttttaacatacatagctccaacaccaatcatcatattattaaaaatatatggactgtcttcccatacccaatcgccatcatctgtaaatctccccctatatactttcatttgtacatcggtgttttcagattcataggctattacttttttataaccggtaattgtatcattggttttatatgttattgtcccatcatatatcacattcataaacccctcatcaattgaaggaactaccgtcccaaccgcatctattttagcaacaaccttcaacttgtttacaccctgtaatatttccttcttgttgtcgctaccatccaatgaaagaagagagaagtcaatctctttcacaacttgcctgttagcaatatacgtaccaccatagactatctttcttatattttccatagtggttttataacattcgtccgcctgtccgataaaatataaatctttcttgcgttcatgcaacgtccatccccaaaacttacaaaactcttccaaaaacgaaaggcacgtgtcggcatcgtatctcttccaatcttccgaatccttttcatccgaaccgttatccttgaaaaaagtctgacgggacaggcttatttcaaacggagctttcagaccaccctcattttcatcataccacacttcccttggataatatacattatcataagcaaccccagtggcttctatacattccaagaataattcagcaagcatcacaacacccattcctttctcttggtccaaatacaccccgtccaacaagcctatcggagaaataagaggatattctattaccaagggggtaacatcccagtcttctgaaaatgtgtcggcctgcatatatccacgccattccaattcattgtcaatatgcaattctacataatgctggctattatccgatggcatcaagccttccaggtcgccattatctacaacacgcagataaccagtctgcgaccggatgggtttcaaataatcgtcatcagaatcctcttcagtggtgatgggattcgctgccggttccaactctgtgactccgccatcccatccctcctcgtagatatcaatccttccatctttatttttgagtgtcttgaactttatctgccatcgtatttttcttgccatatcctttgtttattagatcctgcatcattttagctttttcacgtagtctttcaatttcttcctctgtcgcttccggtttctcttctttctcccatggaaattctagatccaagtctttaccggtctgaaccttgtgtaacacttggacttccatcctcgtacgctcccagtcctgacgataacgcctgtttagtcctatgatataatcacgtgcttcatgtatactcatgcggttaaaaaaatagtcgggagaacaaccgccctcaccgactatcaattgatacacttcacgagcgttcagacttttaacgtcttccgagacttcctcttttttttttcaggttcagcactctctaccgtttcggaaagcacctccatacgtttcacataataatcactcatggcgtttaccagggtgatgtcattcaacgataaaatgaagtcctcaaaagaaagagtgaaaccttcgttagcccgacataaaatacagtagtacaatatatgaagacataaagtactttccggattaaaaggaagttttttcccagccatcacttcataggtgtacataggtccccaaatgctgtcaaatgagaattcatactccttgcctttgattgtaaccttcatccttcagctgctatttttctaagcgctccatatccggtaagagatacggatacacttgcgttactaccttttgttgcatcccggtcaagcgcagttatatgggcttttccttgatacatccccttcgccggagcagtccatccttcttcgggtacaccatcattgtttgcatttgtcgggaatcctaccgtaatcgtcaacggtttacccgcaacaaacagatcaaacagctggtcatatacgtagtcattattacgatccttatccgcgctgtccaccgattcattcgtggcactccagttcatgttgcctatttcggcagcatcccaaaagccgtcgtccttggtagcgctgtccaccgtattagcagcaaggctaattttacaactcgtcgacaatgctacgaccttgtcttctatccatagcatcaaatcttttccattcaagctttttgcttttcccatatcaatacttatttagttaaacattatatcaatagtctatcgtctttatattgaaattcaacgtcacactgatagcgtcaatttcctgcaaataatcctcggagcttccatacaacatgcaatctctcacttcaaaatccttatacttttccgacacaccttccaaagcataccgggccatattagcaattctaatagcagaggagtatgtttttgaaacaaccactaccgacgcatttacattatcctcacagcttccatcctttgtgtccgtcggagatattcccgcacttccatatacaatgaacgggtattcaggcgctccctcgggaataacaagaggataaattctgcttccgacctccttcaccaaagcctcatctttgagcaaggcactctttatatgaaatccaactaataaactcatagccttttatattacctatgttatacgtttttaggttactttccatatccggcttctactatagcctgttccagtttctgcgacaaggtgtccgctgatcttcttaccgcagcatcagaaacagagaaaaagttcaatgcgcgcaacgaaccgcgattagcggtttttccactcttgcttttcgtccgggtgaaagctatacgacttgttgtcccttgattatgcattcgcaagataaaagacctatcccgtccgtagtaggaatctacctgcgtagtcctggcgcttctcttccggttgcgcactatcccacttctcccacctttcggcaaagagtagttgcttttctttccagttgaacgttgattaaaaagcgatatgttaccacccaatgtttttttataaacgccaaccttcacacccaaataagattttcgcgggtcattaggcaacgcccgttttgctgcgttctgtacttcctttttcgcctgattaagactttggcggatataccttttcaagtctttctttcggattatctccgtgtagcttaaacgtttcagtaatcctaacgctcccctggcatccgtaactactacgggagtcttgactatatagcctgcttctacctttgccatactccttatcctttcagaattacaccttttccggttctcttgccgtaattattgataacagtgactatctgctcacccgtcactactgtttttccaccgccaccgttacctatattgccggaatggatggaatcatacagtttcttctggtcggcttcgttgataaacatttccccactactcacacgggcggttatgccgtccatatagttatgaccacctacaataccaccttcagcaaaacttggaacactcattattgcagccaatacagaagcaacggcagcaaccgccatgataggaccaacaataggaatactagcaacagaagaagcggcaccggaagctgcatttttagtattcgcattagcttgtgcagtttgcgccgcagttaatgctgctatcgcaggaatagcttcagcaaccgcaccggctattccgccgatataagtcaacatagaaccaaaaacgctgtcggaaagcccacccatcttcattaaggcagcacttacctgatcaagattagaagccaatttatctgtaccatctttttgttcgcctattccggttatcccctctgtatatttctgccaaatagcaatctgttcatttaaataagctttttcatcttcattcgcaacagataacatcttagtgtattcctgtatcttgctttgggctatctcatacatctgaacctttcctcttagtgcttctgtcggatcttctccttccaccttttcatcttcgatatctaccattgcagcttgaatcggttgggtcaatacaggaagagttttaccggtgcttatagcctttaagacttcatcgcttaatgcatcactgccggagatgactgtttttatttcttcgttgagttgttcgttgttgtaaaatgggtttatattcttctctcttgcttccctgatagccttggcggatgcatttgcagcactctcttgcgctttagcggatgcagttattgaattatcaaactctacaattgattcattatactcttgtctctgttgggaaatcaattgagatacagaataatattgctttcccagctctgtcaattttatcaaatcatcatcacttaatttattcaacaacttattataaattatcgcgtctttatatctttcagcagcaccttcttgcgctattttagcagcgtcattaattgatttagtccgaccataatcatttgttctcacaacgtctactcttcggtcgctttcaatccgatcactcagtttttcatattcctcatattgttgtgcccaatagtttttttccctttcccgtgatgcagatggcattaaatcaattctcattaccttttcaaaatcttcaagctttatatctgaagctcttagttctgttccaacagcgatagattctgtaagcgcattcaatgcgtcatttgcaaccgtcttgcccgcctcttctttcttttttaactctttatcccaatcctcaaacgattttttcctttccgattcgtcaagctgcttatttttagcgttcaatcttgccttcgctatagcctcatcaaacttcccctggtagaaatcgaatgaaattcttgtattccccaattgatccaaagcactatatgcatcttttgattttgctattatactatccaatccattaagaaaagaggtgaaatcccccgaccccaaagaataaaagaattcatctatgctgttttttgcactttccattgtggcagcagttgcatcacccagaacttgggatgagtttaagactctattgaatgcctcaccagctcccgcagcaagtccgattgctcctgccattttagctataactcccttggcattcgtcatcaccgtgcttaatgaagtgtttttatcaatgaatttatccagacctttctgtgctttctgcaatccgccatcatactgagaagcgtccattataagacgtgtgattaaatttgccataccctttttgatttagtaaaaacgggcggaaacagagtccgcccgcaaagatgataaacaaaacaaaatagaaacggaagtattactcagatgcacactttccaagaacaaaagcctctttacgcaatgtagtcatagaccagtcagcattcaatgtcagacgcacggagtcacttgtggcaccggtgtacggatcaataatgaatcgctgctgtccgaatccttgcaatggttcgtatccccaatacccaaatccgatgaatgtatcttcttcggtgttgatatagttggtagtgaaaaccggaataccggcaatagcaccgttctctataatcattcttccactccctacagtacgttccgtagattctaattcacccttggtatattcatccatcacgtagcagggattcaaaccttcaatgcctttcaaaagagccaaagaacgcatcaaaaccaattccttgtaagtgggaatagcaccggcaaatgcaatgtagttagcggcttttctttttgccttcgtagtcagcgtaccaatatccacaggacttcccttcgctatttccataaacggaccgacaagcttatgattgatgctcttatccgtagtaaacatcatacggttaagcgtacgagccatagcctgcggaagctgctgtcttaccacttcataagcaacaccctctgtctgagtgatggtctgatttgtgatcttgactgttacacccacgcgcaccggttccggtttgatttttccaaaatctacctttttatcggtcaactccacagcctccccagctacttccgcttcaatagagccaacagtcggccatacataatcaccggccaagcctgtcatcaacggaagaccaacctttttcagaatcaacccctcttccaacggaagaagaatatcattgatcgttaacggtatcagcggttcagctccggttgtcattattccggtatattcacgctgcaacgggacgttcgtcatcttttttatgttctcccgcaaaaaagcatcaaaagcggcttcccggctcgttaccgtgacatatcccgtcttttcagcggacgcaatacgcacatcaagcacgttcatttcacgttcaagaaccttcaactcttctttctcctgttctgtgaattctctcttgttttcaccctcagcagcatcagcaatctcattcatacggattacaatctgctctcttcttgcgatgtactgctgtacactaaccttcttgtccttattcatatgtttctcaattaaaaaaatgtttcttacttttttctcttacttctctgatagcccgctctcttctacgaaattcctcacgtttgcgagcctcatcattggagttgtcacctattttcaagccggtttgctcaatttcccgtgctgttacgctggtttgcgtatatgcagggtcactggctatcgtcatctcataaaccatgcctatcttttttacatggcgaatcagaatgtcgttttcatccttagtataattcacagcggaagcctcatcactccaataagtaaaagagctaccactcatgtcgccacgtttcaccagttccaaggcattgttaccgtcagaagtattaggagcctcaaattcgtatttcacaccaatactatcaacagacaatttaagagttccaacccccttgttacttcttgccaatagtttttcccggttgtgccacatcgtcatcttaatatccatctgtgccaactcctgctcagttattgcccccggctctattatttcccgataatcgtcccaataatcaaccagcatccgactctctacaccgaatacgattgcatatccctcaattatacgattgccgccttccccgtcggaaacttcacgcaaatgcggctgaaagtgaccgcccattgcgcttcttatctctctttttctttcttccatgtttgttattacgctttctctataaaacagaccttctatagaacgcactgctataaatacacttctatagaacacactaactttacagcttctatattactttcttttaccgttttcaggttactcgctctcaacgctacttccttcatctatcacattgcatacaattgagatgcttccgtcaaccttacttctgttaaaactttcaattgcgtagatcttaccatcccattccaaacgacatcggtcattcaccaaagggttattccgcatcataacgcttatactgccggacatccatacttcaccggctgtcaaagccttcgcacctctttgaaaagtcacacccgcccataccgttttctttttaataaatataacctcctgctcaccaaactctccccggttaactgtaggaaccaatatgcctatccgttcattcaaacttcccgccctcagcatatcaaacctccctatccgttagttttctgtacggcttgcaatacacttccaaagaataaggcactgtgttctgcgaaacagaagcgaccggctcccggttacggtagttgtgagccgccaatatcagaatggccaattttaatctgtccggaaacagctctccatcttccgctccaccgtttttctcggcatagcctatacgtttcaattcttccaatgtgcggttcgtaccctctatcacggcatcctccgcagcacttccatataatctaataatttcgtcctcatcttcgaagtccacacgcatctgcgccttaagctcattcaatgtcacaacccttaattcactcattttcttcctccttcttattatccgatagctcgttgaagcctttcgccggttcagccacttccccactcaacttagcacttccaagaggcgcaagattaacactcagatagacatcatcccctttatccaccgggattttgtcgctttccctacgtagatcgttgacacttgcctgcccattatccaaccgcgctttgtcccacttggccttactatccaaatccaaagcatacaagctacccaaatcatatttaaatttataatcctgataggtatcaacagttaataacttggatgaaaattcccgctctatttctgttactatcggttgcaatgcttctgtataaaaagcaatattgctaacctctacgcttttataattggcattactatcatccatcaacttggacggcgggacattaaaaaatctggctatttcgcgaagcgtaaacttcttgttttccaaaaactgcatgtccgccgaactcatactgatagggtttaattttccatcccctttcaatcgcagaatatcatcaccacgatttaacgcctcctgaatatcgtcacccattccttccatctgcctatcctggtattcaccaaaccccttgacggaagtatcattttgaagaatcgccttaaaacgcccgccggtagcaaatcgtttcaaagtctcattatcagcagtcgaagcgatactcaatgtcatagcggcataagttatcgtagaaaccccagtatatccaccatccctacttacattcttcagatggatcatgtcgtctgcacctaccgttttgtatatacagttaacaggatcgttaatggtgtatgtattactatacatgtcatacatcacagaaccgggagaacacaaatgcatcttctccacaccgttatacctgcttcttgccggatagatataggcatttcccctcaaaagaatcattgccaccgcatttttcatcatagtaaatgaattcatgcgctcattaggccggacacttagaagatagttcaaaagctttccatccttatcctcgtacatcttaaagtagttctttacccggtcttttctcttatactgcaatgtaagcgaagcgacagaagaagatatcagattcacggcacggtaaactgccgctatcttcattgaagcctcagcacttgtcacccataccacattctgtttgtaatcaccgcccgtcgagcttttcttttcgcttttgttcccggcaatcacctctctcttgaatagatttataaatttgttgctcatcatattaaaccgttacataatacggtctaatacctgtttgagactacctattgctcataattgttataaagccagaatgtcatcaaagaagcgatcgcaccgtctatcttcaaattttcctttctcttcaacggttttttattacacatcctgtcttcatccaagtagcaattcccgaaacaatacggaagaataggattcatggaaagagcaacctttggcggcatactctttgctgccatctcgaatgtttccacaggagaagtaaatgcaccatacgtctgaggaacagcacggagtatcttttccggcttcgtacccgaagccataatcgcagcccccaatgcgtttacgacctcttgagatttatacgggtcatatcctatctgaagaattgtcagcttcttattcctcttcaaaacatcttccactatcatagactcgctaataacagcccccgggcatatcctcatgaatcccgtactgacccatatcttatacaactccttattcggatgactcttcagcgtctcttccgggatataacaatccatccacaggtaaaacttccgctgtgcacgactatagatgttatatacaactgccgagaagtcatcgctgacagataagtccatagccaccattgcctccggtctcccctgtatattctctatatcaaaaccagtcattaacgaccttgcaagattctgaggtatccaatcctttattccaccggacacaaagatgtttagaagcttggtcttaaactctatcatagcctcaacatcacgctgagccttatcccagcgctgcttataatacccttcctgtacggttatcccgatatgagggttacattttctccacacctccggttttcccatctcctcttcggtcatctcccacgcatcaggctgaaacagcgatgcaaactgacaatcatcggtatattctccggtcaacactcttttagcattctccaattcgcgcgaaaacggaccatcttctacacggcttgcagttgtgatgataatcgtaagaggttcccgccgcgttcccatcgaagatgtcagtacctgcaaaagctccgcaccgtccgagtgatcacgcacgtatttcgcctgcgcgtattcgtcaaatataaccagagatgcattcaagccatcctttgtatcacctccaccggtaagacattctacaaatgattcgcgttcaaacttattaggccgccagtgcaaggtttcgcgtgttgctttgaagtatttctttcgagggtctaactgtttgattatctttttgatttcctcaaaacatatctttgcttgtttgtaactgttcgcggctgtatacgcctgtgcatttgcatcaccaaacagaaactcgtttaccgccaatgaagcggtacttgttgtcttggagaactttctaggcacaaagaggatagcttcacggacaagccttctcaattcataccttttacccccttccacttttttagtgagttcctctgcatccggcatccccttagcatctcccactacttcccaccggtaaaatcccaaaatggacgcgaactgaaaatactgtattcgcgtcaacttataacagcgccttccgtccatcccggaaaatttaaggctctcataaagcttgacgaattttttcaccttagacggacggaagacatacgtatccatcaaccggaaaaacttcaagacagccagtatctcatatagattatggctgtccggcttttccctaacctcttccacgtaagacaagagacggggatctatcgtatccagttggtatctctctatgtcaacagataaaagttcccgcgtcctttcattcttatattccctagtagacacatcctgcacatcattcctccttcaagtcattcatcagattagtaagaatatcattgtcttctccactctctatctttttttcagggcgtatttccctgttcatcattaacgacttcaatgaattctgcgcagccttagccatcatgcaataagtatcataagccggattctttatctccctcggatgtccctcgcggcttttttccgtaatcgtgacatccttgccgtatgttttcttcgccacatcccgaaatacaaccaatatggaagccgcaacctctacctgataagtaagctccggtgaatacagttcgtttttctcaagcaaagtcctaatccatcttttaagctccttcacttttttattatattctttattctcttccataagttaaatattttaagcatacctacttttgctaattgaaaccctattcgtggaatcatacttttttacccccacgggcattttcccaaaaacaaaaaaatgtctctccttaggggcagtggatttgagtaagactggggcggaagaaaaaacacccccccctgtctttaaatattacttttcaactaaagataacgtttttgaaatctttccgtagcacgcttgttattcttctgtatattctcttttttctttgatgctaaccgtatatgggcgttcttatggcactcatgacacaaagagcgaagattattcacatcaaacatcagatattccatgccgtcaacgcttgaagccgcctcaaccggtacaatatgatgaacttccgttgccggttctactactcccctttcattacaatcttcacatattggaaaagcatttatctttttcttcctcaataccttccatttcggtgattgtatcatcctgttataatccgcattcttgctcatagctcatttactgttttatgttttagacgcaggggggtattaccataatcaacttcctgcttcattatcttgaactcatcctctacgcttctcttgatatcgtccgagtccttcttttccatcatgatatattccagtatcttcatgtagttacactcacctatatcattgccgatactctctatatgtccgacaatgtttggaaatagctttcttattactgagcgtattacactttcagtattagatgtaatactctccttatctccattcaacacaatacgcttgcacacatatccctttctacctatctcactgaatatattaatactttcaactagtttcattcccctattaccaccaggcttagtagtgattatccgattcttcttgttttgatatccttcgaatatcttagcaaactcgcttatctcatcactgccttctatctctttatctgcatattttaaaaatgcagatagtagatattgcatcagttcgtatctactttcaaaaccactttccttaactatcctgtctatcctttctgctgtttctggggaaaccttagattgaatacttacaaatttcaactgtcttttatctttcataatccttctataattttactttctaaaaaacatatctcctgaaatagaccgtgccgtatcatcaccagttaaccggatgtaccggaagaagttctgttcgctacgatgcccagtcagtttcattatctcgaacgttttcatccgtccggtcagatacatgttggtagccgcactccttctagctgtatggctgctgattagttcccatttctcacgggtgacagttcttagttcaccgccctgggtgtaagagtaggcaaccttatcattcagtccaatttccttcattatcactttcagatacttgttgaagtattggatgcatagaccattaggaacacaaccgttgtacttctcgaatatctctttcacataatcatgagccggaaccttaacatcaacgttagttttctttgtccgaaccatgatataaccgtttatcaggttcttacttgtcaaccttgaataatcggagtagcgaagagcggtaagacatcctataacaaacatatccctaattcgttccttggctttccgtttatcctgcttctcaaacttgtagtagtatatcctagtgatttcattcattgagagaaagaccgcatttgtcggctcgcatttcaaatcaatctcatcgtaggtattatctactgcataattgtattgcgatgctctacggacaagtgtttgcactttcagaatatatccgacgatggtgttatgtcgtagaccttggtcttccaaatagacaatgaaatcatctaagaattcagccgttacagaattggtgaatatatcgcaatcatattcttctgagaagttatcaatgtgttttatgatagcatcatagacggccgcatagtgttcagacttgcgtctggatctcttttcaagtacttcccggatgaagtctgtgaagtatattccttcaatgggcttcgattgccggaagcggttaatgtagtccttacgtacttggacagtagggaccggttgtgataattgtaatgctttggtcgtatcattttaaagggttaataattatttttcattaaactccggaatatatatccagtgagtgactcctaaaagcccaacaagagactctacttctgtattgattacaactaagaatcttctatcggaagtagctacaataacctcatataaagattgtccatcatttgtttccggtaatctttcttctacacttatccatggggattttggatgttcatcagcccataatgcaccttctataaaaccgataccaaatgcattatttacttttgtctgacgtaaaacaataggactaaatacattttccttacctccatctaaagcagcagagataatacggatttctctttctgtaaattcaatcatttctattgttgttttacgctaattgtttatcgaaaatcttaatacattcaaataaatattttgccactgttggatttaccgcattgccgatacttccaactctgtgtgaccaatcgggaaacccatcatcatttctaacagtgctatgcgctgggatttcaagaatcctttttgcgcaagtatatccgacactcgtatctgatgtccactgtttaaatatcgagttaatgcttccacatttgcaaacgtcgccttgtaatccgattttgttggagtaggcaataagataaagtctttcccttttgtgtgggtatccaaaagcgtagtttgatatacattgccattccgcattatacccgattttggaaaggtcgcataggacttgttcgagaccggaaatagtgagagctggcgaattttcaatgatgacgtatttaggtctaacttcccatataattcggtacatctcactccacaacccggagcgctttcccttaataccttcacgttttccggcaacactgatgtcttgacacggaaatcctccactaatgatgtccacatatcggagtccggttgtttttgtaatatctgtgaatctttctgcatgaggaaatttgttttttaatatttcaccttgaaatttttctatctcacaattccacaaagtgtcaattcctgccatttcggcacctaattcaaaaccgccaataccactaaacagggagccgtgagtcaatttactttgcttcatttctgttccgttttactctaattgatttaaaatttctctttgaataatctcctttgcactgaaaccgaataaacctttcttttgctcgtgaaattccgcaataggtatttcgttaatgtagtaatagaaagcttcgtagccatccgcaaaattgcgggaaaggaaaccatttgggtgagtgttcatatatctttcaatagctactatcattcttttggcatagccgggaaatatcttaaactctaattgcatctgcttaaaattgcaaagaggacaaccaacacacccatgacggttcaaattgtatggagcatcgtaatattttgaatagggcaaaccgcgcttacgaatgtaattccagacatcttcttccgtccacgtaagaataggaagaatatgctttgcacctttcatccacttacgtgtatcgcattgttccggctcgtaatctttccgtttccggctttcagcgactctcattccttcaatactacgtttgccaattccataacgttcttttaatacttcacagcagaacctacgcaagcgggacggaaagcctttctcctcaatcagtttgaagaaagatttttccgggtgcataatttgcacttgtgaatagttcttctttataaagctaattgttcccggcgggtctactgtggtgttggcgtagatggcgttatacttaatgcctgcccgttctgcaaggtcaagaataacaacgctatctttaccaccggaaaagccgagatttaagggtaaatcgcattccatgctacaaagaaagtcgattgcttgctgctcctttttattcattgctatcttgttattaattagttatattgttcaaaattcggaatctgcaggtaaaatgaaactctggaaagaggtaaccagcaacgatgctcttcattacatgtattccaacagtcttgcccaaatttcgaatttaaggcatctacaatattatttgcaatattacgtaccagttgtgcattgatcatcctcttgtacccgatggtgatagtaggcgtataaagcgaaaccttatattcacctccttcggttatactccagcttccttgcgctactgtaatatgtgtgttggtttcatctttatactcctgcactatccctctataaagattgaaggagctgaacgatcctaattctgctttataaaccttaatgccagttgctttttctaatagtttgcgaagcatccaggcatcacgtactactggagacatactcatatctgatttttattgaatgttttcatctatgtagtttacaatctttcccaacttactggaagagaaaagttcacgatttaatttccgcttaccttctttccattcgtggaataattggtaatatggtggacttaacgtacggtcaatctttatacagtattgattagtcccatactcagttataagactctcaatgtattcgtttgaattatcttgatcggtgacaaataccatcttatcagtagcaagtatcatattttatctcctttctattctcgtttttaattaatcttctttattttctaagtctctgtatgccacgcaatagtcaagtaagtttaaatctggttcattcatcaaacattcgttcaatcgggcgcagttcatacaacaccattcgtcagataatctccccatagttttttagctaattcgtaattcttttgtgcttcattaacagccttcttggcataagtgagagtataagcgtgttcacgtggatatttgccagacttaacaccctcatgatattctttcgctttctctaacttgtgttcgtagaaatcgatactttccggcattgaaagattgatagtttcagcacgtttttcccaatacttggctactctttcatgttcggcagctttgtcactaaactcaacacttttacccatattgttccaagcatcatcaatcgcttttcgatgccgtttttcgctatggtgtccgaccttgattggctctccaagagaaagaaaatctttgtctttgttcgagcggttgaaatattcgttacttttttgtccggcagactgggcccaatcatgcctgcgttccgctctttgcttcgcccattcctgtacattgaaaccgtcagctctaacgatggagtaataataaaagccttcacgttcatagatgagattgaatacaatacattcattctctttgccatatttggttgtaacttcaataacttctcctttttcgtgtttttcactgcattttgcgagaaaaacattgggtacatatttgctatacgtattcatatcttttcttatgttacttattcatcctcattctttcccgatcatcctgaagtttttgaatccttcctgcaaatcctactttctttatttcttgctcaggttttgatattcttctagatattacctttgatagaataattgcaaaaactacaattaagaatatagcaacgggaatcgagagtggagataagacccaccaccaggaccaatcaatataatgcgtcagttttaggactataaatactatcgtaagaagtccacagaagccaacaccaccatttttagaactattatttgtattcattttatcaatgcagttccctatacaccgcaaggttttattttatcttaagtcatgaaattactaccattgccggagctttttgttccacttcatcaataaccatcagatttatatcacctgtatagatatagacttctgcttccggatacaattttccaattgttttatcaattctgtcacagtcataattacctcttattttaacgctaacatcacttatattcgatattataagctttcacctcattaaaccaatctccttttacttctcttgcttctaccataaaagatatttcaacgctgtctcctactttaagaggagtttcgataggaccatcccaagaataaacggaaaacttcatctttgtgtgatatttatccgacatttctaacacacactcctgcttttcccaatctttcccttttcttgttattccatgcgcggtaggcattaccgcaataattacgcccgaagctttatacggcatatttgttcttttttaaagcaaactgcccttttgagttgttacccaactaccctgcgggcagtataggacaagttgccgaaaattgttaaatttacaaattaataacagtaactatttaattatcaactctttatacgcgcaccatatggtgctttttctgttttatataaaacattgataatcaacacattacactttcttacaaataggtgtaaatatcccaatctgataattagataaaagacgggatttgaattcctgctccatatcacctatttcttcgatatagttttcgcgttcctttgaccagttgtttgcaaatactctgatagtctcccactgtttcttagtcagtttaccatcaagatacattcccctataacgttccttgtaacgcgtcactcctatccgatgaatttctctagccttatcaagctgcgaaagtttgactcccttcttcgccgataactcccggacaaagcacaattccgaccaatccttataaaatatacggcctatctttgacagaaagaggttgctggtcaactctaacagagatacagactgatgcctgtacaccgtttctattcgcaatacattatcgtcaacatgacgccccttctctccggcttcaaatgtcttgtcatatatcttcaaaactttacggaaatatttgcttttttccgttgtcttctgtttagcttccggaaagttcgcatcattccataatatgcgcccggaagcttcacgaacatgcctgatataatagtcagcaggatgagacattttcatcgttatgcctatctcatagtaagtaactactgcattctccattctaatacaaagccttaacagcaattctttgatcgttcgaacagccatagcaaaggtcataggtcggctattgtcgagctttccattctttcccttactatacaacttacagatggagcatttacagcgcaacttattaccgcgtaattcaatgaagcatccatcgaagttggcataggcagtcgatttgtaatagatttcatcaccttccgtacattgttccaggtagttccgtaagacaatcgtatcaatatcaacagtgtcaaccgtagcctttattattaccttgtcgaacatcttttttctgaaaatacatacacattcttaatcctacagaccgtttacacctatgaataggacaaaacaccatgaagttttctacggggcccgcacgcttacagtcgcgacagtcacattttacctttttatacgtttccattattactttattcctttctcttttttcaaacgtttgacttccttacggtaatggtcaatcattgccttatattcgaattcagacagtttgtttatctgattctttgatgcttcgagcattaaaaccacaggttcgccatatttggcgataagtccacgacggtaaccttgaatgttcccctcatcaaagcggttgcaggaacggcattgggcgttgcagttcttttcactgaaacgggtagacatgtgcttcctgttaatgtagtgcccacaatccgcctgatcataaggcaacaatcttccacatgagatacatacaaaggttccgtcatccctagaatcacgcagccggataaattcactaaaaacatcgtccagcttatttttcaagctgttacttcttgatctcagtcttttttgcaacatttgattgaagtatcttattgtactgttcctcatttcggaagcggacagctttccggtaccatacaccatttttcgctttatatgtgaaatctgaatagtcaatatcagagacttttgatataatagccgcgctgcattggttatcccacataatagccaaatgtcccacctgcggttcttcctctacggattccgtttcgtcgcagaaaaaactgttcggagtatcaggctcgaacattatgaccaacatacgaccttccgcctttattgacacacgggaacattcggaagggattttataatctttcagtttcatataatttgttatttacttttgcttaacagctcccggcaagctattccagacatcacacaacacaggataaatattattagcatcccgattacagacaacatctttataggactagcattcactatcgctcctgccaacataatgaaagagcaggccacaaggagtatggataatatgaattgtagaaacctcattattgttctttttccggtacgtacatatacacatccattatctttgtctcagcaatagagacaatcttatagtcagccattgttcctttcataccttcatcgagtctcttgactgcgacacgcaagtccgcagcctggataagaatattggtataggttttcttctcggctctgctcttttcatccaacgtgacaaaggccaatctagctttataccatctatccgagttagcatcgttgttggaaaataattcactgtagttagcctgctttacggcttttaccttgaaatcacccgaaatgaacggtttcatctcttcaataatgcgtgcttccgcttctgtaaagctaagcgcatcgaccaaataaggctcggtcacttgtttatccgttccgttctccatcgttttttcgtaacggacgcgaacttcaaaaaatgtgtgcattgccataattttgatttttaaaagttatataattggtttgaaaactctatttaaagtggactattctcacgaaccgtacacccagcggtcgcttatatacgagaaaaacgacccatcaaattttaaacttattcacaattaaaagaccgggcacttcacaggagcggtgatttgggttttataaagatatatgcgattagatactaaatctgattgcccgcatattttttcaatttttcgaaagggaagagccagcttttgccacgctttacagcccatggaaattcaccgcgcttcatcctctcatttagagttgtacggcttatccgaagatatccacaggtttcgttataagtgaaattcttctttttagcagttttttcttcgactgccatacgcagttcagccacttcgccacacaacgctctcaataggcttaaaattgattctgtttcattcataacttctccgttctatcagattcatctgattaaaaaaagccctatcctttcactatctgatgtggctgttgatagttactcgaatagagcccgaattaatattttattcatttgaggtaacagccacgaaacccatcagacattatcgttttttttgttggatatttaaaagggagtcactatatttgccgttgagacaattttggtgctagcaaaatcacggtttacgtcgtgacagccttttttatatccgtttgtatcctgcgttattggaatacggatgcaaatatatcgtcatacgacgacatatcaaaataaaaagtattaaaatatcgccaaatgacactattaaaaatgattctaaataaccaaagttatggaaacatctattattgaccgcattaggtacattatcgaacaagaaggagaatcaccacgcagcttctctagtttgattaaattcaattattcgactctaaataattatttgacgggacgaagaaatacaattgatagcgagttaatcaaacgaatcattttgtcatttgacaacatatccgcagaatggctactgcttggcaaaggaaaaatgctaaattcagagagaaaaaaagatatagaagaaaatgttattaacaataattttgataaaagtcaatatgtaagcatgaagaagtatgaaagaatagtaaacctattcggacaaactgctgccgagcttaaagagatggctttagagaacaaaaagctatatgaagaaataagaaatttgaaagggcagttagaaatagccaaatccgcctaaacaaaaaagcgcttctctttgttcatttcagactaatttaataccgatgaacatagatgacactttaacgcaagcttttgccgacttaaagatagttgggcgaataaaaaaagagaatctacttaacaatctaggggtagaaagtaatatgaaattatatagatataacaagttgcacgatctaaaatcatcaaatgaagaaggattaaaacttatcgtttgcacaggttataaaacaataagagggcattttaatttaagaatatacaataaacatctatattcgcatgggaaattggagtgacaaacaagaaataaagaaagagatcaaggaaaaagacaagactagaagagagaatatagcaaagtattttctagatttgtccaaactgactttcacggcgcttgttcttggaacaatagcaccatcatttataaattttgcagaggtcgttaattggtattcactatctattggtataatacttacgacacttttagctaacattggaaacaaaatattaaaataggaggtattatatgaatatgctatcaatactgtttaccgtttgttctgtaatatgcgtgggaatacttatttggtttcgcacgaaatctggaaaaaaatggctgagagatttatagatacgaacaactgacttattatcattttatataattagtcgaataaaaaagataatctacttaataatctagaagtagagagcaatatgaatttatatagacctattaagcgggatgatctatgcaatttaagtacatcaaacgataagattttgagactgatcgtttgcaatggaaagacaatccctaaaggggtgttttgatttgaaagaatataattgtaaaaatgaataataaaataattagaaatactatttaaatgagaaccttcttcatcatcattttattaggcatcttattaggatgctctaaatccaaacagcctaatataaacttaatacctctttctgactctactcagtatatatccttaaccaaggatggcattctccttcctacagttcattatctgcctgataccacatatattgcagattctgatataatctctcacaaggatattgttttagatttctctgacggtaccaaagatacccttctactaaaaggggatacaatccactacaaaggtgatacaatcagagataatcgtaaattcctatcttatgatacagagatatctttaaaagatgatggcatatacatatatagtacatccatgttagaaacttgtcaaataaatctaaattacacagatgtcgctatattcaacaaaacgcttaatagatatgcgtccagaagcaataaatcattagattttctaaaaaaagaaaatgatagatacgtatattattctccttacaatacatgggaatctggtggctatgactctttagatcatatgcttattatatactatccttttcttgaaaatagtacaggctttctaccaggagacaacgaaattacttttagaaaaaaagatttcgacaaatactttgaaaaatttaaagctcatttagtcctaagataaacacacgttactaaaaagataccaaaacataaagcaacaaaccttatccatctgacattcaaagtgtttcatataccaacaaagccccaggcggatcatgaaaagcaaaatgagggtgtgtcaaaactaaaatgactactctaaaaagttacagattgtaactaacaattataaaagagccatatcaaactctgtttttgagtaatgatatggctcttttataattgatttagggagtcaagtttcagattaaaagttgtcctttcatcaaatcacgttttgacacaccctcattttcttatgcatcaattggagtgacagaacaaggcaactcaaccataaaagtagtacctattcccaattgggaatcagcccatatccgtccgttcatcttatcaacaatagatttacaaataggcaaacctaacccagctccctgagtgaaagagtcgactttcttaaatctttcaaatatcttttccaacatattctgaggaataccacgaccggtatctcgaacaccgatccgcacataggacgaatctatctcataaaaaacctccacatatccactagtcgtattctttagagcattggaaagaaaattatttaagatctgcttgattcgcaacctatccaattctactagaaaaccctgatcaagataatgggtccgaagttcaactcccgcagctagctgacgagtatattccgcaacactttcatctaaaagttctgccagattaaaccaactcggatgcagctccagataaccggattctaacttggacaaatcaagaacatcgtttatcagctccaacagaagctcattattatgactgatgagagagttgtagagttctttttcagccatatcctccgtagctgccaatagggctgaaaagccgacaatcgcattcaacggcgtacgaatctcatggctcatattagccagaaaagctgatttaagacggtcggacgcttcggctttatcacgcgccttgacaagcatttcctctgtctttttcaactccgttatatcgtaatttatactgatcagttcaataattttatcttgcgggatatatttccgaactaacaaattgacatgcgtccatgtatattcaccgttgcttctaaggacacgcacttccttacttaatttagccgtcaatccgtttcgtacatcttcaaagaattgaaccatgcaattacggtcgtccggatggagatgtctgtagataccaatgatatcggacaacggcgttccatccgcttcaccgatgttcctataccaactcttttgggcataaccttctccggtcagaagattaagatgggcatatcctaccttggcataatctcccaccagctcaaaaaactcttcaaattcctgaattttattataagcaatggtcgtttctgtcttatcagcattgatcaacaggtaattaatcggattgccctcatcatcatacagtgtcgttaccttagttaccaggtcaatcgtaccttcccttttggaatttttataatatgaaccgatcttagagaagtcataacgaaatgtaaagtctgcatcttcattccttctcaaccgctctttcatttcttccgggaacattggattcttgaagatatcaagtcctaaaaggtcctcctttttctcgagatggaacatctcctgctctttatcattcaaatctatcaatatcccatcctcattgtataattcgataccgaccggcaggtgcttataaatattatgcaagatgcgttcgctgtgctgcaaggcctgataagctgatgtcatattaggagcctcctgcaattcggctatcccatagacatttgtatgcccttctttatccgtttcctgaaagcagaccttactccgcacccaaacagccccttttaccgtatcaagtaaatacactacttccgacatctgctgctcactaaaagaatgaactgttgtagggcgttgctcctccttcaatatgcgtttgttaaaatcttcaaaactaataatacccgaatcatccaaacccaacaattccgagatatactccgaacactcataatttaaagttgtcagatcagccttccaccaacccatgtcagcagcgttcatcaattttgaaaaaaatataaaatctttctgtttattcataatgctatgctaactcacctttctaaagatagttaaagatgcaaaattaaatattgcaggcaatctataactttctaaaagatattttttaacacattataagaagtttatttatcgatagactaaaaacatccgattgaataaatcttcttctgaagtaaattcaaccggatgtatatcaaaggccacttcttctatttcattctttcaaagcttgataaacggcttttgccattaccttcgctccttcttcattcggatgaactttatccgggaaaagttcgggcattccatccattgccgcatgaagatcaataaccggcaaatgatttttcttggcaactttctttatcatcggaataatttctttggaaattatatcatcattgatattgtcaccagtccgataggatttggaaggatagcagagataaatcttcggttgggcaggcagagcattgaatgcatccaccattgtttgcaaatcttttgtgaaatcctccttatacttccaattgaatgatttgctatcgtttgttccaagcttgattactacgatattgggattgaaagccaacgcatcctgataggctttctctttcatatacggatgatctcctttatttaataaggtacgggcactgactccgaagttcttaacccaataaccgtcacccaacatacgtcccaacacggaaggatagctgtcgcgattacgattcttaatccgggctccataagtaatgctgttgccaatgcaagcaacacggaccgcatctttacggggagccttgaagctacgtaaccaagctgtcagttcatccagcatttcatttttataaaggaaaccttcgcggattccccatccatgcccgccggaaggataaatatgaagaactgcaggaactttattcttattcaatgccagatagtagttaacgccattggcaggaggaacggcattatcatcatcactatatacgatgaaggcacgcggtgtctcttttgtcacttgtttttcattggaatattctttctccagctcggcagaagcttcttttcctaacaggttattgcgagaacccatgtgggtatacgattgattcatcgtaatcaccggataaaacaggatttggaagttaggacgaagttcgggtttggcatgggtggcaatcgtcgacgccaaatgaccaccggcagaagatcccataataccaatatcatttggattcagattccatacatcagcactgtcacgcacaatcttcattgctgcttcggcatccgaaataggaagcgtgcgatcgcctttcggcattcgatatttcagcacaataagagcaatgccttgcttgttaaagtaaggagcccaatcgtaaccttcgtggtcaactgccagatgggaatatcctccgccgggacaggctaccactgctcgccccgtagctaattccggtgccggaaggaatacacgaagtgaaggttgttcaatatcaaaagggttgggagccttctgggctaccgtctgctgacctgccaacaggaaaagcaacaggaaaaaaagagtagaaaatttctgtttcatagtatctatgtactttgattaatgaataattagatgtgcgaagatagtaattttccatatctttgcacttcattttgattataaaaagatatgcaaggaataaagaatctgacgcaagggcctatcaaccgccaattgttcaatctggcaatgcctatcatggcaacgtcatttatacagatggcgtatagcctcacggatatggcatgggtaggacgactgggaagtgaagctgtagccgccatcggctctgtcggaattctgacatggatgtcggggtccatatctttattaaataaggtaggctcggaagtcagcgtcggtcaatctatcggtgcacagaaccaggaggccgcccggaactttgcatcccataacatcacaatcgcacttatcgtttctctttgctggggtggattgcttcttgtttttgccgatcctatcatacgcatctacgaactcgaagagcatattaccgccaatgctatccaatatttacggattgtctctaccggactgcctttcgtctttctgtcggcagctttcaccggaatctataatgcagccggacgtagcaagattccttttttcatcagtggcaccggattgatattgaatatcattctcgatcctttgctgatatttggtcttgggctgggtattaacggcgcagcctacgctacctggattgcagaagcaagcgtttttcttattttcgtctatcagttgcgttatagagatgcattgctcggcgggttctcttttttcacacgactgaagagacaatacacacggagaatcttaaaacttggattacccgtagcaacattaaatactcttttcgcctttgtcaatatgttcctttgccgcaccgcttccgaacaaggagggcacatcggattgatgacttttacgaccggaggacaaatcgaagctatcacctggaatacctcacagggattctctaccgcactaagtgcttttatcgcccaaaactatgcagcaggacggattgaacgggtactcaaggcctggcatactacactatggatgactggtatcttcggaacattctgcacattattatttgttttcttcggaaatgaggtgttttctattttcgtccccgaacaggctgcttatgaagccggaggtgttttccttcgcatcgacggatattcacagctcttcatgatgctcgaaatcaccatgcaaggagtattctacggtatcggccggacgatacctcctgccattatcagcattgtctgcaactatatgcgcattccgcttgctattttgttcgtgcaaatgggtatgggagtggaaggaatctggtgggctgtctgcgtcactaccgttgccaaaggattggtacttttaagctggtttgtgattattaaaaagaaatgtctgagtatcccttctgtaacaaaagaataactcaggattctccttcgttaacagacggtcggaattccactcgttattttaacttaaaaagtacacctttgctaaataatatatatctttgcggtgttattcatcatacgatatgattcgtatgaaattatttttttactaattaaaaacatcaacattatgaacaagatgaagtttatggttctctttatgagtgttgccatgatattcagtggctgtgcgagtatgaataacaccggtaaaggtgcggctataggtggaggttcgggcgctgctttgggtgctattctgggaggcgttatcggtaaaggtaaaggtgcggctatcggcgctgccatcggtacggcagtaggcgcaggtacaggtgccctcatcggaaagaaaatggataaagctgcagccgaagcaaaacaaatagaaggtgcgcaagtagaacagattacggataacaacggactgaaagccgtaaaagtaacattcgactcgggtatccttttcacaacaggtaacgcaagtttgagtcctgccgctaaatccgcattaagcaaattcgcaaataatgtacttaaccagaaccgtgatatggacgtatctatctatggatataccgacaatcaaggatggagaaacagtacggctgaacaaagtcgccagaaaaacctgaacttgtcacaggaacgtgcacagagtgtagcaagctatctgttgaattgcggtgtgtccagcaaccagatcaaaggtgtgcaaggtatgggtgaaagcgatcccgttgcaagcaacgatacagcagccggccgcgaacagaaccgccgtgtagaagtatatatgtacgctagcgaacagatgatcagagatgcacaggcagctgctaattaaaaaattactgcgttatacacgcaacctgctgatttttttcttcgcatcgaccttactgacggtcattatctatcggtttatgccggtttatatcactccgctgatggttattcgaagtgttcagcagattttctcaggagataaacccacgtggaaacacacgtgggtttcttttgataagatatcccctaacctcccgatggcggtgatagcttccgaagataaccgttttgcggaacacaacgggttcgatttcgtagagatcaggaaagcaatgaaagagaacaaaacacgtaagcgaaaacggggagcaagcaccatcagccagcagacagccaaaaatgtgttcctatggcctaagtcttcatgggtacgaaaagggtttgaagtatattttacctttttgatcgaattattctggtcgaaggaacgaatcatggaggtttatctcaactccattgaaatgggaaatggtatctatggtgcacaagctaccgcccaaataaagtttggaacaacagccgccaaactgacacggggacaatgtgcgcttatcgccgctaccctccctaacccgatacgcttcaattctgcgaagccttcgccatatatcctaaaacgtcaaaaacagatattacgattaatgaatctggttcccaagttcccaccggaagaaaagactataagaaagcaacaaggtaaaaacaagaaaacgaagaaggagcaatgagaaatctctcatgctcctttcactgataaacttgtccgactgtgtgctatccccatttatacaaaatctttcaactcttgctgtaaacgctgacgtgtgaaaaagatacggctcttcaccgttcccaatggcaaacctaacttctctgctatttcacggtacttgaatcccgacacatgcatggaaaaaggtaccttatattcttttggcaatgcattgactacacgatgcatctctttcaaatcatacgcgccctccgtactgtcaaatccggaatcttgcggcaaattcaaatgataataattatcagtagtgtctacaaaggtctggtcacgtactatttttcggtagttattaataaagatgttgcgcataatagtgtacatccatcctttgaagtttgtgtccggaacatatttgtcctcattatctaatgcttttaaagacgtttcctgcaataaatcatttgcttcttcacggttagccgttaatttataagcaaaacgaagcaactcctcctgaactccaattaaatcttttctgaaacttaaacttttcatactttaaaggttttaatggttaatattcgtttttctcgatgtttgcaagtttaaaggtattttccctcttcggaagggtaatttccgttatttatgaggggaaattctatcaaatgatagtttctaggtgttttttgatagtttttgggtggtgcaaatcggaggaagatcgaattttctatttaattttcattaaagaaaacagaggagttcccgactttttagtaaatttggttgttatacttatatcaacctaaatacaacggatatgaaaaagaagaaacaaatctttatgttattgctagccttgctagtggggctccccctttccgctcaaagcaaacaagagaagaaagagcagaaaaaagaggctgtcaagaagctcattgcctcagagaattacaagatagatgtcaggaccgccatgccgatgcgcggacgctccattcccttgacgtctccctactcattggaaatcagaaatgactcggttatctcctacttgccttatttcggacgggcctacagtatcccgtatggtggaggtgacggactcgatttcaaagctccccttaaagaatatgatatgaaaatggataaaaaaggaaatgccgttatcgaattcgttgcccggaatccggaagacagatatgaattcagagcccaagtatatacgaatggtgaggcaagcatcaacgtaaatatgcagaaccgtcaatctatcagtttccaaggcgaactggagatggaggattagcctagtcttccgcctcttctcccccttttaatataggtaggcaaatatgatatttcacagctaagatgcgggttagaaagactactaatccgcctatcagctgacaaccgtatgattcgatccctactaggtcacaaatccaataggcaatgcctcctaccacacaggccatcgcataaatttcttttcggaagatgaggggaatctcattgataaacacatcacgaatcacgccaccggctgctcccgttatactacccataatgatggctacccaaaaaggatatcccaaagcgatactttttcccacacctaccacagtgaacaaagcgagcccgatagtatcaaaaataaagaaggtattattgagccggatcagccaacgtccgaaacaaataacccacagcaaagcaagtcccgtacatatcagataaataggatttgtcatccaaccgggagtaacatcaagcagaacatcacggatagtaccaccaccgatcgcagtagcaagacctacaacataggctccaaaccagtcgaaacgcttagccgacgcaagccggataccactgatggcaaaggcaaatgtgcctataaaatcaagaatttgaacgaatgtgggcatatatttgttattttgtatgcaaagtaacgaataaattccgtaagaaaatgtacttttgcttcacgaattaaaccgaataagatagaaacagtatgaaaataacaattgttgccggggcacgccccaatttcatgaagatagcccccattacacgcgctattgaagccgcacgggcgctgggtaaaagtatctcgtaccgattggtatatacaggcaagaaagaggatacaagtttggacgcttctctcttttcggacctcgacatgaaagctcccgatgtctatctgggagtggaaagtagtaatcctacgagcttgacagccggaatcatgatagcttttgaacaggaactaaccgaaaatcctgctcatgtagtccttgtagtggatgatctgacagcaacgatgagttgtgccatcgtcgctaaaaaacaaggaatcaaagtggcgcatctggtggcgggaacccgttccttcgacatgaaaatgccgaaagaagtaaaccgtatgatcacagacgggctatccgactatctgttcactgccggtatggttgccaaccgtaatctgaaccagacgggaacagaaaacgaaaacgtatattatgtaggtaatatcctcatagatactatccgatataatagaaaccggttactcaagccgatatggttttccgtattgggactgcaagaaggtaattacctcctacttaccctgaatcggcgtgtactgctcaatgataaggagaatctccgacaacttttgcaaacattaatcgaaaagtctgccggtatgcctatcgtagctccaatgcacacgtatgtacgcaatgccattaaagaattaggaatcgaagcaccgaacctgcatatcatgcctcctcagaattatctatttttcggttatctgataaacaaggcaaaaggaatcataacggattcaggcaacgtagccgaagaagcgacattcttaggcattccatgtattacgctcaatacatacgccgaacatccggaaacatggcgtatgggaacaaacgaacttgtcggtgaagatcctgttcttctcgccaaagcaatggacacattaatgaaaggcgaatggaaaagaggcgagcttcccgaacgctgggatgggcgcacagcagagcgtatcgtacagatccttacgagtaaataaccaacaatgatgggtaaaaaaagttatatattcaaccatcctcagagttatttgttaactttgtagctctactaagaacgtttatgaaacaacgatatagcaaaatacttatactgatcttactcatattggcagcctcaaacgtttttgcgcagcagataaagggagtagttacagattcggtgacccatgagccattgatgtatatatctgtttactaccaagaaaaaaaggatatgggtacgatcaccaatattgacggagaatacagtctcgaagcccgtagaaacggggggacacttgttttttccgcagtgggctatatcagtaagacagtaaaagtgaactatggcaatcagacggtcaatgtacagttggctccggataacgtgattctgaatgaagtcgttgtaaagcctaagaaagaaaaatattcgcgcaagaacaatccggcagtggagttcatgaagaaagtaatcgaacataagaaggcgcaagccctcgaagtgaacgaatattatcagtacgataagtacgaaaagatgaaaatgtctatcaatgaccttactccggaaaaactagagaaaggtatctacaaaaaatattctttccttagagatcaggtagaagtgtcggaaactaccaataaattgattctcccgatctctgtacaagaaacggcttcacaaaccatcttccgcaaagatcccgaaagtaagaaaacgattatcaaaggaaaaaactccaatggtatcgaagaattcttctctacaggagatatgctcggcactgtattgaaggacgtctttgcggatatcaacatctatgatgacgagatccgtctgcttcagcagcgtttcgtcagtcctataggtagcaatgccatttctttttataagtattatctgatggatacgttgatggtggacaggcgcgaatgcgtacatctgacatttgttccacagaattcgcaggatttcggatttacaggacatctctatgtattgaaagattctacctatgcagtccagaaatgtacaatgaacctgcctaaaaagaccggagtcaattttgtgaaccgtatggatatcgtccaacagtatgaacaactaccaaatggcaattgggtattggcagatgacgatatgaccgtagatctctcgtggagttcaaacaaaacggtggggggattgcaggtagagcgaactacaaaatatagcaattataagttcgaccctatagagcaacggcttttccgtttgaaaggcagtgtgataaaagaagccgatatgctctcgaaaagcgatgaatactgggctagtgttcgccaagtaccactgacaaaaacagaaagcacaatggatgtattcgtcaacagactcgaacagattccgggatttaagtatatcatcttcggtgcgaaagctgtgatcgaaaacttcgtagaaacaggaagcaagaaacatccgagtaaagtagacataggtcctatcaatacgatgatttcgagcaactatattgatggaacccgttttcggttaagtggcatgacaacagctcatctcaacaaacactggttcttgaacggttatggagcctacggtctgaaagatgaacgatggaaatacagcggaacactgacatattcattcaacaaacgcgattatgtggtttgggagttcccgaaacattacatttcggcaacttacagttatgatgtaatgtctccgatggataaattcctatttacagataaagataacattttcctttcattaaaaacaacgacagtagaccaaatgtcgtatatgcgcgatgctaccatcaactatgaacttgaaacacttacaggattcggtataaaagcaatgctccgccaccgtaatgacgagcctgccggaaaattggagtatttgcgtaacgatgccgcacaaacccgtgtgcatgacgtcactactgccgaagcaagcctgacactacgctatgctccgggcgaatcatttgtcaactccaaacagcgtcgtatccccgtgtcattggacgctcctatcttcacactcactcatgccatgggattcaaaggagtgttaggtggcgaatacagtttcaaccgtacggaagcgagtgtatggaaacgtttctggcttccatcttcgtggggaaagatagattgcagtataaaggcaggggccgagtggaacaccgttcctttcccgttactgattctgccggaagccaacttatcatacatcacccaacgcgagacgttcaaccttattaataatatggagttcttgaacgaccgtttcgcttcagtttcattgtcttacgatatgaatggcaaactattcaatcgtattccccttatcaagaatctgaaatggagggaaatgttccgtgtccgtgccttatggggtactctgacagacaagaacaatccgttcaaaagcagtaaccccgatttgttccgcttcccgatgcgtgatggaaaatttactagttttgtcatggatccgaagattccgtatgttgaagcaagtgtgggtatctataatatattcaagttgctgcacattgaatatgtacatcgtttcacctaccgtgataatccgggtatcaataaaaacggtgtccgcttcatggtattaatggcattctaagaattatgcaacctttagcagagcgattacgccccaaaacattagacgaatatatcggtcagaaacatttagtaggaccgggtgctatcctgcgaaagatgattgacgcaggacgcatctcctcctttatcctctggggacctcccggggtaggcaaaactacattggcacaaatcattgccaataagctggaaaccccgttttttactttaagcgcagtgacttcaggggtaaaggatgtgcgtgaagtgatagaccgtgccaaaagcaaccgattcttctcccagtccagccctatcctattcatcgatgaaatccatcgattcagtaaatcacaacaggattctttgttgggagctgtagagaacggaaccgtcacactaatcggagcaacaacggaaaatccgtcgttcgaggttatccgtccgcttctgtcccgctgccagctctatgtactcaaatcgctggagaaggaagatttgctggaactcctgcaacgtgccatcactacggatactgtactgaaagaacgtaaaatcgaactaaaagaaacaactgccatgctgcgcttttccggtggagacgcacgcaaactccttaatatattagagctggtcgttgaatccgaagctgaagacaccgttgtgatcactgatgaaatggtgactgaacgattacaacaaaacccgttggcatacgataaagacggggaaatgcattatgatattatttcagccttcatcaagtctattcgtggcagtgatccggacggagcaatctattggcttgcccgtatggtggaaggcggtgaagatccggctttcattgcccgccgactggttatttcggcctccgaagatatcggcttggcaaatcccaatgccttgcttcttgctaatgcctgtttcgatacattgatgaaaatcggatggcccgaaggaagaattcctttagctgaaacgaccatatatctggcaaccagccctaaaagcaattcagcgtataatgccattaatgatgcactggagttggttcgctcgacaggtaatctacctgtcccattacacttgcgcaatgcacctacgaagctgatgaagcaattaggctatggacaagagtacaagtatgctcacaattatgaaggaaattttgtgaaacaacagttccttccggacgaattgaaagacaaacgtatctggaaaccgcagaataatccggcagaacagaaacatgccgaacggatgatacaactgtggggagacaagttcaaaaaagacgtataacatattattaatataaaatcgaaatgaaaattattgttttagatggttttgcagccaatcccggcgatttgtcttgggaagggataaaagccttaggagaatgcgtgatttacgaccgtactgctcccgaagaagtattagaacgtgcagccggagcagaaatactcctgactaataaagtaatcattaatgcagaacacatggctgcactgcccgaattgaaatatatcggtgtattagctaccggatacaatgtagttgatacagttgcagctaaagaacggggtattgttgtcactaacattccttcatacagcacagcttccgttgcccaaatggtatttgcccacatattgaatatcagccagcaagtgcaacatcattcggaagaagtgcataaaggccgctggacgaacagcaaagatttctgtttctgggatacgccgctgatagaattgagagataagaaaataggtctggtcggattgggaaataccggatatacaacagcacgtgttgccataggttttggtatgcaagtgtatgcgttgacttcaaagtctcatttccaattaccacccgaaatcaagaagatggatttagaccaacttttcagcgaatgtgatattatcagtttacattgcccgcttactccggagacacatgagatggttaatgcccgtcgtcttgccatgatgaagccaacagctatcttaatcaataccgggcgtggaccgctaatcaatgaacaagatttggcagatgctctgaacagtggtaagatttttgcagcaggagtagacgtactctctaccgaacctccccatgctgataacccgttgctgacagccaagaactgctacatcactccacatattgcatgggcaaccctagaagcccgcgaaagattgatgaacattgcaatcagcaatctgcaagcatacatcgccggaacaccggaaaatgtagtcaaataggtaagaatcaaaaactgtttttctatccagtccgacattaaaacaaaaagttggctgcgcaataatattactattgcgcagccaactctcaattctcaactttcaactctcaacttaataagagtgtcctccctcgtccatctctttttccgttatcttatgacggtcgatactacgccaagcatagaatatataagctatcacaaacgggacaagtatagaaacataagccatcgtctttaatgtaaactcactagaacaactgttagccaaagtcaatgagctttgcaggtccgtataagacggataataagcagtattattatatcctgccaccaacagcaaagacaaaacagtcaataccgtcccaatccctgtaaaccagatacccttatcaaaagtctttctaagcaacgtcttgccaataccgaagagtaccaacaccactcctatcaggaataagatcaaaactacgggcatttcgataaagttcatgaaatatttaaagggttgcatataaatctcctgtgtatccggattcacggcaaagccatcagaaaccaatgtacgaatcacaaatgtcaagaagaacacaagaaacagaatcgtattattccgcaccgcacgacgacatttatccgtcagttctttgtccgcaatattattaatgaagtaaagcgcacccagcacacgggcaaggaagaatactgctaatccaagaataacattccatatatttgtcagtgcatccaatccatgccagccattcccccaatgactgattaccggcataacagtatccgtcatattagctttattgatatagaaatcggaacctgtgaagaaagtcgccacagctccgccaagcaacaacggccctactactccattaatcaccagaaaagtctgatatgtctttttgcccaacagatttcccgctttgctctgaaactcataactgacagcctgcaatacaaagctgaaaagaataatcatccaaagccaataagctccaccgaaacttgtactataaaacaatggaaaagaagcaaagaaagcccctccgaacgtgaccagtgtagtaaatgtaaactcccacttacgaccggtagaattcaccatcattttccggtgttcttccgtcttaccgagacagaacaacaaagaattacctccttgcacaaacaataaaaatacgaggatagctcccagcaaggaaacgacaagccaccaatattgttgtagaaatatatacatagcctttacaattaatgattagtattcatattatcttccgtatccggtcctttcttgatagccttcaccataattccggtaccggcaatcaacattacagtaaacaggaacaggaaaataaagaaagtagtctgtacggaacccacatcaagtttggagatagcagccgttgtaggcagcatatcacgaattgcccaaggctgacgaccacactcggcaaccacccatcccgcttgtccggcaatgtatcccaaaggaatagtaagcaaagcgacccaatgcatccagcgcatcttactcaaatctttcttataaacaaagaacaatactacaataaagaacaaaataaaatatcctccgagaattaccatgacacggaacgcataaaaattcaaaggaacattcggaaccaactgattcacatctttaatatacccatatccaaaataggggatattctcctgcaacactttatatgctacttgcgcgtcctcttcatgacctgcactctttgccgcacgataggctgccaatgccccaatagccgttttcccgcgttctatcttctcggctgccgagagagccgtcgtaccgtctttcatttgataaccgccttcaataatgtttgtgattcccggaacgtaaccgcccgcatcacgttccgccagaaaagaaagcagactcggtatctcaaaacggaagagaaaaggttctttcccatcatcataagtttccttttcagggttaagcactcctattcctactagtcctacattcgttccaccctcatacaggccttccacagcagccagcttcatcggctgtgtctgtgcaatctgataaccggaaccgtctcctgtccaagcggcgagtaacgatgccactagtccgaagatagcaccaatttttatgctcgcaagtgcaaactcacgattacgtttcttcaacaaataccagcaactaatgccgaccacgaacacaccgcctagcacccaaccggacaatacggtatgaaagaacttgttgacagccacaggtgatgtagccacagcccagaaatctaccatctcattacgcaccgtatcgggattgaactccattcctaccggatgttgcatccatgcattggccaccagaatccaccaagcagaaatagttgctcccaatcccgtcagccaggtagaagccagatggaagcgtttgctcacttttccccagccgaaaaacatcacagctataaatgtggcttccatgaagaatgccaaaatcccttcaattgccaacggtgctccgaaaatgtcaccaacaaaccacgaataattactccagtttgtaccgaattcaaattccagaatcaaaccggtcgctacaccaatagcgaagttgataccgaaaagcttcatccagaactgagcagtctttttccagaattcatttcctgttttataatacagcgtctccatgattcccatcaccactgccagtccaagtgtaagcggaacaaaaatccaatgatacatagctgtcatcgcaaattgggctctcgaccaatcgatcagcgaggtgtcaatactttcaatcataatcttatgttgtttaagggttaaaaatcaatcggtttctccggaagggcacgttctatcagttcattacccacatacgctcctttttctgcctccgtagggtgatcactaaggaaattcgggaaaaagaataatttgaggataaagaacatgacgaataatttcaaaaggataataacccacaatgtacgaccaagtgtcatactgcggaaaccttccaaataaaagttccaaacggcaagcagtgcattcttcatatatcgttgttagaatttgtaatgagtacaaatatacaatatttataataaaaacaaacaaatcccccgaattgttgcgagatttattgtgtttttcccagctaatctccctatcgacagaaaaaaatcatttaacggtaaaattcaatgatccgtctatcacttttgccactaatataatatgtacgtaccttcgttaccaataaatcaatagaagtatgaatatgataaatgtaagaagattggcagtgatgacatttcttggtgcaggtatgctttccgacatatctgcacaagatttttcgttgcaagccgatacgttaaatgaagccagactccccgctcaatgggatttgcaatcttgcatcgactatgctttggaacagaatattacgattcgcaagaaccgtgtgactgcggaaagcacacagattgacgtaaagactgccaaagcggctctatttcccagcctttcgttctctaccagccagcaagtagtgaatcgcccctatcaggagacgagcagccgggtgagtggcagcgaaatcatcagcagcaacagtaaaacaagttacaacggcaattatggcctgaatgcctcgtggactatatacaacggcagtaagcgactcaaaactctcaaacaggaacggctgaacaaccaggtagccgaattggatgtagccacttcggaaaatacgattaaagagtcgattgcacaaatttatatccagattctttatgccgccgaatccgtcagggtaaatgaaaacacactgcaagtctccattgcccagcgtgatcgcggacaggaacttctcaatgccggaagtattgccaaaagtgacttcgcacagttagaggctcaggtaagcacagaccgttatcaacttgtcacagcgcaagccaccttacaagattacaaattgcaactgaaacaattgctcgaactggacggagagaatgaaatgaacgtctacctccctaaactgtccgatgaaaacgtactggctccgttacctgccaaaaaggatgtctatgtaagcgcccttgccatccgtcccgaaatcgaggcaagtaagttgaatgtagaggcttccgaactaggcattgatattgccaaatcgagttacttccccactatcagcctcagcgcaggcatcggcacaaaccatacaagtggaagcgatttcactttcggcgaacaagtgaaaaacggatggaataattccatcggattgtctgtcagtgtacctatctttaataaccgccagacaaaaagtgctgtacaaaaagctaagctgcaacgcgaaacggatatgctttccttacttgacgaacaaaaagccctctataagaccatcgaaagtctttggttggacgcaaacagcgcacaacaacgttatgcggcagccaacgaaaaactgagaagtacgcagatcagctatgacctgatcagcgaacagttcaatctgggtatgaaaaatacggtggagctcctcaccgaaaagaataacttgctacaagctcaacaagaacaacttcaggctaaatatatggccatactaaacacacagttgctgaaattctatcaaggagacaaattgacattataaaacgtatattaattaaaagcatcataaacgaatgaaaacgaaaaagattatcctaatcgccgtggcagtcattgcggtagtaggtataggaatctggttcttcaccggttcacccgccaagcataaagtcacgtatgctaccgtcgctgtcagcaaaggcgatatttcaaattcggtaactgctaccggaacgatagagccggtgacggaagtcgaagtcggtacacaggtatcgggtatcatcgacaagatttatgtagattataactcaacagtcaccaaaggacaattgattgccgaaatggaccgcgtcacactgcaaagtgaattggcttcacaacaagcgacatacgacggtgcgaaagccgaatatgaatatcagaagaaaaactatgaacgtagcaaaggcttgcacgaaaaatcactcatcagcgacacggatttcgaacaagccctctacaactatcagaaggcgaagagcagctatgacagcagtaaggcctctctcgcaaaggcagagcgtaacttatcatacgctaccatcacttcgcctatcgacggagttgttatcagccgtgatgtggaagccggacagactgtcgcttccggattcgagactcctaccctgttcactatcgctgcggacttgacgcagatgcaggtagtggctgatgtggatgaagccgatataggtggcgtagaagaaggacagcgcgccagttttacggtggacgcatatcctaatgatacctttgaaggtgttgtgacccagattcgtttgggcgatgcaagcagtaccagcagtacaagtaccagcagtagcacggtggttacttatgaagtggtaatctccgctcccaatcccgatttgaaactgaaaccacgtctgacggccaatgtcaccatctatatccttgataaaaaagacgtactttccgtaccgaacaaagcattgcgtttcgtacccgaaaaacctttaatcggtgctaacgacatcgtaaatgactgtaaaggtaaacataaactttggacacgcgaaggaaatacattcactgcccatccggtagagataggaatcagtaacggtatgtcgacggaaattatcagtggtatctccgaaggcgctaaaattgtgacggaagctactatcggtgccatgccgggcgaaaatatggaagccggacccaaccaacagagcggaggagaaagaagcccgttcatgcctggccctccgggaagtaagaagaaaaacaacaagtgacaaacaccatgaagaaagtaattgaaatacaaaatatcaagcgtaactttcaggtaggtgatgaaaccgtccatgcgttacgaggtgtttcgttcaccattcacgaaggggagtttgtcactatcatgggtacttccggttcgggaaaatctacgttactgaatattctgggttgcctggatactccgacgagcggtgaatatctgctcagcgacatccccgtccgcactatgagcaagcctcaacgtgcagtcttgcggaacaggaaaatcggattcgtgttccaaaactataacttgttgcccaaaacaacggctgtagaaaacgtagaactgccacttatgtacaactcttctgtcagtgccgccgaacgccgtcgccgtgccatcgaatctctgcaggccgtaggattaggtgaccgtctggaacacaaatcaaaccagatgtccggtgggcaaatgcaacgggtggccattgcacgcgcattggtcaacaatccggctgtgattcttgccgatgaagcaaccggaaacctcgacacccgtacctcatttgagatacttgtcctctttcaaaagcttcatgcggaaggacgcaccatcatcttcgtaacgcataatccggagattgcgcaatatagcagccggaatatccgcctgcgcgacggtcatgtcatagaggataccgctaatccggaaatactatccgctgctgaagcattggctgcattaccaaaaaatgacgaagaaggatagaccgcgtttaacgaaataactaattactaacaacatgaatggaaccaatttattcaagatagctctccgcgcattggcaaacaacaaattgcgtgcatttctcaccatgctcggtattatcatcggtgtcgcttccgtcatcacgatgcttgccatcggacaaggttcgaagaaaagtatccagcaacaaatttccgaaatgggatcgaacatgattatgattcatcccggagccgatatgcgtggaggtgtgcgccaagatccgtctgccatgcaaacgttaaagctcaccgactacgaggctttgcgtgacgagaccaaattcctgtcagccatcagccccaatgtctcttcatcggggcagcttattgtcggcaacaacaactatcctgcctccgtgaacggggttggaacggaatatctcgatatccgccaattaacggtggagaacggtgagatgttcacggaagccgacatacaaagctcggcaaaagtatgcgtgataggaaagacaatagtagacaatctttttcccgacggcagcgatccggtgggaaaaattatccgttttagcaagatccccttccgagtggtaggtgtgctcaagtcaaaaggatacaattctataggacaggatcaggatgcagtagtacttgctccctacacaacggtgatgaaacgtctgcttgccgttacctatctgcaaggtatcttcgcctccgccctcaccgaagatatgacagaatacgctacagatgaaatcagcacgattcttcgtcgcaatcataagttaaagacctctgacgatgatgatttcaccattcgtacacaacaggaattgagtacaatgctcaactctaccaccgatttaatgaccaccctgcttgcttgtattgccggcatctcattggttgtaggcggtatcggaattatgaatatcatgtatgtatccgtcacggaacgaacccgtgaaatcggtctgcgaatgtcggtcggcgcacgaggaatcgacattctgagccaattccttatcgaagccatcatgatcagtatcacaggaggaatcatcggagtggtcatcggctgcggagccagttggatagtcaaaagcgtggcgcattggcctatctatatccagccgtggagtgtattcctctcttttgccgtctgtaccgtcaccggagtcttctttggatggtatcctgccaaaaaagcagcagatttagacccgattgaagctatcagatacgaataaagagctatctttgtctttatgaaacaaacctttacatccgcacgtcgtcccctggagatactgatacacattatcagctgggggattatgttcggtttcccgttctttttcgtagaacgcggaaacgggaacattaactggatggcttatatacgccattttgccgtaccgctttcttttatgattgtgttctacgtcaattacttctttctggtcccccgatatctttttcagaatcaatcaaaaagatatattgtctacaacattatcttgttgtgtatcatcgggatactgcttcatctctggcaaagtctgacattcgatccgtcatttgagaacaagcccagacgtccgggtatgcctccgggatggttgtttttcctgcgagatatgctaagccttgttttcactatcggattgagtgccgctatccgtatgagcgcacgatggacgcaaaacgaggctgcccgcaaggaagcggaacggaatcgcacggaagccgaactgaaaaatctgcgcaatcagttgaaccctcactttttgttgaatactctgaataatatttatgctttaatcgcattcgattcggacaaagctcaacaagctgtgcaagaactgagcaaattgcttcgatacgtattatatgacaatcagcagacgtatgtcccgctctgtaaagaggttgatttcatccgtaactatatcgaactgatgcgtatccgcctgtcggctaatgtacagatgagtactcaattcgatattcgcccaaactgccagacactgatcgccccgctaatctttatttcattgatagaaaatgccttcaagcacggtatctcccctaccgaagctagtttcatccacattcatatttccgagaacgaccaagaagtgatctgcgaaatccgcaatagtaatttccccaaggaagtgtgggataaaagtggttcgggcgtggggttagaacaagtcagccgacggctggagatactttatccgggggcttacacttggtcgaaaggcacttcacgggacgggaagtgttacgaatcaaaattgagcattaagatcaaagagtagagagaaaacattaagtatagaattttatattaatagaatagtagtatggtattacgttgtgcaatcgtagatgatgagcctttggctctcggccttttggaaagttatgcaaacaaaaccccgtttctacaactcgtaggaaaatactccagcgctgttcaggcaatgaaagaattgcctggcgaggaagttgacctcttgtttctggatatccaaatgcccgaacttaacggactggaattctcaaaaatggtggattcccgtacccgtatcgtattcactaccgcctttggacagtatgccatcgatggctatcgtgtcaacgcacttgactatctattaaagccgatttcatacatcgacttcctacaggcagccaacaaagcgcttcaatggttcgaactggttcagaagccagaggagatagacagtatttttgtaaaaagtgactacaaattggtacaagtggaattaaagaaaatcatgtatatcgaaggattaaaagattacattaaaatctatacggaagacgcctccaagccaatactgtcccttatgagtatgaaagcgatggaagaacttttgccttccagccgttttatacgtgtgcatcgctctttcatcgttcaaaaggataagatacgtgtaatagatcgtggacgcattgtttttgacaaaacatacatccccatcagtgacagttacaaacaggttttccaagcattccttgatgaaagaagttgatgattccctattttatcggtaaaaacgagatttttgtcgattatagtttgccaaaacctgttttatccctacctttgcaacgaacagaaagggattgtgaaattccaagaatagaatagtttagttaagtctagtttagtttttgtgttaaatagctccctcgtcagcggacgaactagggagctattttatattataagaatattattgcacaaaatattcataatttccataactttgcaacaataaaatctcacataaatggaatttaacgtagaggaattaaaaagtgcacttattgagaagtgtaaaagtgaaggtatcttgtatgcaatggtagcagtagacaggcgaaccaaagagatcattcttcctgatactttgcaaggagccttgaagcacccggagtactttgtatgtacttgtaaaaaagtagaagataaatacatcgtggaggagattacaaaagtgtaactctcctccgaactctttattatttacggtcgccaatgtatagcgcagctccttcatccataaacagttccacattctgcgcatgatgagctacataggctgcgggccctacatctcccgacttacagatttcttctaccacatcagctttaccctttccagttatcaggaaaataacgtgacgggcattcaatatcggataaccggtcattgcgatgcgcttctgcccgttacggggattaatactgactacataaacagaagcggaagtcaacagttcttcttgtccggggaaaatggaggaagtatgaccatcgtctcctgcacccaacagtataatatcaaactctggccatccctgcttggacggtacttgttgcttgaccaactccgaataacgggccgcttctttcaccggtttgacttcaccacgaatacgaaagacattctcataaggaatgggagccattcctaaaagtagattacgcatcattccgtaattgctgtccgaatcatcggggggaacacagcgttcgtctacccaataaatacacatacgattccagggggtagtttccatatattcgttcgcccacaaatcgaacattagagcaggagtactgccgccgctaactgcgatattgaatattctgtccggttcattattcatgatttccaccagacggagtatcagtccacgtgaagtttcaatggacgagggaaaaacagttactttcataattcacaatattggtctgtattcgtcaaattcttacaaggattggtccagtcagccccgtgctcatgcatcatcgcttcactttccaaaggtccccacgtaccgaccggataaccgtaaagcggtgcgtcgggattctctttccaatagcgaagtaccggatcgaagaatgtccatgaagcctccacggcgtcactccgggtgaataaagtcggatcgccctgaatgcaatcgtctatcagacgtgcgtaagcgtcaccactcggcactccacccaactgggcataactgaaatccattgtcacctgacggacttcaaagcccgcaccaggcactttcatgcctatcttgagcacaattccttcattcggttgcaaacgaagaatcaatttattcgcacgtgggcaattgccacctgaacaacggaacatctgatgaggtgtctcgcggaaatgaaccacgatttccgtcactttagtcggcatttgcttgccggtacggatgtaaaacggaacgccgctccaacgccagttactgatacccagcttcatggcaatgtatgtttccgtacgcgagtcgggagctacccctttctcttcacgatatccttttttagtaccggaagaggtatattgcccgcgcacaatatgctcattcaaatcttcttcattcagcggtgtcagagactcatatactttcaccacctcattacggaagttatccgcattgaagatagcaggaggttccatggcagtaagagctacaagctgaatcaaatgattctgtaccatatcccgcaaagctcccgccgtttcgtagaatccgccacgttgctcgattcccagattctctacagcggtaatttctacgtagtcgatataattcctgttccagagaggctcgaaaataccattggcaaaacggaaagccaacacattttgcgctgtctctttaccgagaaaatggtcaatacggtaaatctgatgttcttcgaaaacagaagcataaattttattcaattcacgtgccgattcgaggtcgtaaccgaaaggtttttcaacgatgatacgcgaatggggagtattcagtcctgcagctttcagatgcaagggaacaacaccgtaaagtgaaggcggagtggcaaggtagaacagcagattatccggatccacctcattggtcaactccaccagacgttggcggagcatggcatatccttcttcctttgccggatccatgggcaagtaacacagatgcgagatgaaagcctccatcagtgccgcatcctgttcttcggatttcacgaaagtccgaagttcacctgatatatacgagcgataatcctcgtcagaataaatcgtacgtccgatacccagtatatgaaaatcacctgttaaccgcttttcacggaagagcgagtaaagggcaggcatcaacttacgtttggtaaggtcgcctgaggcgccaaaaattatcattgcgaatttatccattgtcgctttttatttcttaattcataaaatagtcttattactccgaaagacatcctacttacacattatatgtgcccgatttcgtgtcaccgccatgtcctgtccagttttcgtggaagaactgtccgcgcagttcgtctttacgctcaaaggtgtgcgcaccgaaataatcgcgctgtgcctgcaccatattagcgggcagatcggcagaagtaagcgaatagaagtaattcaaggcagaagagaaagcggggacaggaagttcttctttcatggcttcggctacaaggctcttccatccggagagtgacgccttcatttcttccctgaaataaggagccatcaacaagtgtttgggcttgtcggtggcttcgaaggcagcggcaatatcgttcaggaaaatactgcggatgatgcatccgccacgccacatacgggcgatggaagccagatcgagctgccagccgaatgtatcggaagcacgttgcagcacggcaaatccttgagcgtatgagacgagtttggaagcataaagggcagagaagatatccttcacgagctccaccttattatatataggttgtgtatgttggcgcgggaagtggtgggaagcttgatggcgtaattccttttgtgcggaaagactgcgctcaaacaccgcagtggcaatcagtcccaacggcatcccgagttccatagcgttgataaccgaccatttgccggttcctttctgtccggccgcatccaaaatcttatcaataagataacctccggtcttgtctttatgacgcaagatgttggctgttatctcgatgaggtaactgcggagtttgccctcattccaacgggaaaaggcatctgccatctcttcattattcaagtcgagcaggtttttcatcacccaatatgcttcggcaatcaactgcatatcaccatattcgataccgttatggatcatctttacaaagtgaccggatcccgccggccctacccactgacaacaaggagtgccgtcagacgctttcgccgcaatgctttgaagaataggtttcacttccggccatgctttttccgagccgccgggcataatagacgctccgttcaaagctccctcttcaccaccagacacaccgctgccgacgaaaagaaaacctttcgactcggccagtttgacacgacggttggtatcttcgtaattggagttacctccatcgataagaatatctccgggtgaaagcagaggaaaaagctgttccatcagttcgtctaccggactcccggcacgaaccatcatcattattttacggggagtagcgattgaatctacaaagtcctttatatctgtgaatccttcaatgtttttgcccttcgcacgtccgttcatgaaacgatccaccactccttcttcaactcccggaacggtacggttataaaccgatacattccatcctttactctccatgttcaaagcaagattctcgcccattacagccaagcctataagtccaatatctgttttattctgatttgccataacttgtatattttgtaatattgattaccatagtaacaattgaaacagacatttgttcgctatatttagattaaaatattatttttgcaattaactatatagaaacaaggatgaagaaaatcaaaatcggtttattagcccgcattattatcgctattattctaggcatcgccatcggcacttttttcccggctcctcttgtccggatatttgtaacattcaacggcattttcagtgaatttcttaatttctccattccgttgattatcgtcggattggtcactgtagctattgccgacatcggtaaaggcgcaggaaagatgttgctcgtcaccgctcttatcgcttatttcgccaccctgttctcggggttcctctcttacttcaccggagtcacggtattcccgtcattaattgaaccgggcgtgccgcttgaggaagtgagcgaggcaaaaggaattcttccttatttctccgtttccattcctccattgatgaacgtaatgacagctttggttctcgctttcacattaggattgggattggcttcgctgaacagcgatgctctgaaaaacgtagcacgggattttcaggcaatcatcgtccgtatgatcagtgcggtaattctccccttgcttccgctttatatcttcggtatcttcttgaatatgactcattcgggacaggtgtactccattctgatggtatttattaagattatcggagtcattttcattttgcatatcttcctgctggtctttcagtattctatcgcagcgctgtttgtacacaaaaatccgttcaaactattggggaagatgatgcctgcctatttcacggcattgggcacacaatcatcggctgccactattcccgtgacactggaacagacgaaaaagaatggtgtttcggcggatataaccggttttgtgattccgttgtgcgccacaatccatctgtcgggaagtacactgaaaatcgtagcctgtgctctggcactgatgatgatgcagggaatgccgttcgacttcccactctttgccggttttatcttcatgctgggaatcacgatggtagccgcaccgggagttccgggcggagccatcatggcatctttgggaatcttgcaatccatgttgggtttcgatgaatcggcacaggcattgatgattgctctttacatcgctatggatagtttcgggacggcctgcaatgtgaccggtgacggagctatcgcactgattatcgacaaaatgatgggaaaaactgtgctgaataaccatgctgaaaaataaatagaatgtggcttgcatgggtcacaaaaaataccgacatttgcacccatatttttgatttattaaataatagcgtatgaaaaaagccctaatatcaggcattaccgggcaggatggttcttatcttgccgagtttctattgcaaaaaggttatgaagtgcacggtattctccgtcgttcttcatcgttcaataccggacgtattgaacatttgtattttgacgagtgggtacgcgacatgaaacagaaacgtacgatcaatctgcattatggggatatgacagattctagttcgttaatccgaatcattcaacaggtgcaaccggatgaaatctacaatctcgctgctcaaagccacgtgaaagtttcattcgatgttccggaatacacagccgaggcggatgctgtcggtacgttgcgtatgctcgaagctgtacgcattctgggattggaaaagaaaacccgcatctatcaggcttccacttccgaattgttcggtaaggtgcaggaagttccacagaaagagacaactccgttctatccccgttctccgtatggggtagccaaacaatatggtttctggattaccaagaattatcgtgaaagctacggtatgtttgccgtaaacggtattctgttcaaccacgagagcgaacgtcgcggcgagactttcgttacccgtaaaatttccctggctgccgcacgtatcgcacaaggtgaacaagacaaactgtatctgggtaatctggatgcacgccgcgactggggatatgccaaagattacgtggaatgcatgtggctgattctgcagcatgacgttccggaagacttcgtgattgctaccggtgagatgcacaccgtgcgcgaatttgcgacattggcattcaaagaagccggtatcgaacttcgttgggaaggtgaaggcgtgaacgagaaaggcattgacgtggctaccggaaaggctttggtagaagtagatcctaaatatttccgtccatcggaagttgaacaactacttggtgaccccacaaaagctaagactttgctgaactggaatccgcgcaagacttcatttgaagaactggtaagtatcatggtacgccacgatatggagaaagtaaaacgaatgattgctaccaaacattaaatgaatttcatttcaccacagaggacacggagggcacagaggaaaacataaaatcctccgtgtcctctgtgtcctctgtagtgaacaaataaaagatagaatggaaaagaatgcaaagatatatgtagcaggacatcacggtcttgtgggatctgctatctggaaaaatttgcaggataaaggatataccaatctggtaggccgcacccacaaggaactcgatctattggatggcgtagctgtccgtaaattcttcgatgaagaacagccggaatatgttttccttgccgctgctttcgtaggtggtatcatggcaaacagtatctaccgtgctgactttatctacaagaatctgcagattcaacagaatgtaatcggtgagagcttccgccataatgtgaagaaactgctgttcttaggcagcacgtgcatttatccgcgtgatgcggaacagccgatgaaagaagatgtattgcttacttctccgctggaatataccaacgagccgtatgcaatcgccaaaatcgccggattgaagatgtgcgaaagtttcaacctgcaatatggcacgaattatatcgctgtcatgccgacaaatctctacggtccgaatgataatttcgatttggaacgtagccatgtactgcctgccatgatccggaaaatccatctggcacattgcctgaaagagggtaactgggaagctgtacgcaaggatatgaacctgcgtccggtagaaggcgtcaacggagacagtccgaaagaagaaattctagctattctgcaaaaatacggaatcagcgaaacggaagtcactctttggggtacaggtactccgcttcgcgagtttctttggagcgaggaaatggctgatgcaagtgtattcgtcatggaacatgtggacttcaaagacacgtataaggaaggcgacaaggacatccgcaactgccatatcaatatcggcacgggaaaggaaatcactatccgccaactggctgaacgcattgtagaaactgtcggctatcaaggtaaactgaccttcgacagcagcaaaccggacggcactatgcgcaagctgaccgatccttcgaaactgcactctttggggtggcatcacaaaattgaaatcgaggaaggcgtacaaagaatgtacgaatggtacttgaaatagggaattccaagaatccgtcaatatgctataagcagaatttgttttgcttatagcatatttttttattatagcataatgaaattagctatcaccataatctttcctcctaccagcctgtcgcaatctcactacatcacccttcccccattttcaaaaattcttccctcttaattcttcattcttaatttaattgctatatttgcacaatttaatatcaaatgtgcaaaaaacaatggaacaaagttttatagcttacattgagaatagtatcaagaataattgggatctggatgccctgaccgattataagggcgccaccttacagtataaagacgtagctcgcaaaatagagaaactccatatcattttcgaggaaagcggaatccgcaagggagacaagattgccgtttgcggaagaaacagttcgcattggggtgtgacgttcctcgccacattgacatacggagcggttatcgtccctattcttcatgaatttaaggcggacaacgtccacaatatcgtcaaccattccgaagcgaaattactgcttgtaggcgatatggtatgggaaaacctgaacgagtcggcaatgcctctattggaaggtattctgatgatgaatgacttcactttgctggtttcacgcagcgaacgcctgacatacgcccgcgagcatctgaacgagatgttcggcaagaaattccctaaaaacttccgtaaagaacacgtcgcttatcataaggacgagccggaggagctggctgtcatcaattatacttcgggaacaacgagctactcaaaaggggttatgctcccctaccgcagtttgtggtcaaatacgaagttcgcctacgaagtactcgacttgaaggctggagacaagattgtatctatgcttccgatggcgcatatgtatggtctggcattcgaattcctttatgaattttccgtcggttgccacatctacttcctgacccgtatgcctagtccgaagataatcttccaggctttcgaagaggtaaaaccgaatctgattgtcgctgttccgcttatcatcgaaaagattatcaagaagagtgtacttccgaaactggaaactccggcaatgaagattttgctgaaagtgcctatcatcaacgataagattaaagctacggtacgcgaagagatgattaaggcgttcggaggagaatttaaggcggtaatcgtaggaggtgccgctttcaatcaggaggttgaacagttcctgaaaatgatcgatttcccttataccgtaggatatggaatgacggaatgcggtccgatcatctgttacgaagactggaggaggttcaaaccgggttcttgcggaaaagccgtaccccgtatggatgtacaggtcctttcctccgacccggaaaatatcgttggcgaaatcgtttgtaagggtcctaacgtaatgctgggatactacaagaatgaggaagctaccagagaagtgatcgacaaagacggttggctgcataccggtgatctggctttgatggatgccgaaggaaatgttaccatcaaaggacgtagcaagaaccttctgttgggcgccagtggacagaatatctatccggaagagatagaagataaattaaacaatctgccgtatgtatccgaaagcattatcgttcagcagaatgagaaacttgtcggtttggtttatccggatttcgacgacgctttcgcacacggcctgaagaatgaagacatcgagcgggtgatggaagaaaaccgggtggcattgaatgccatgttaccggcgtacagccagatttcaaagatgaagatatacccggaagagtttgaaaagacaccgaagaagagtatcaaacgatacttgtatcaggaggctaaaggatgaaaatgaagaaaacaatactcacggcagctatactgatggctgccgtttgtctgcctgcacagaacaaaagtgccggtattaatctttctatctggaaagatatttgtacgcaaccgtatgacagtacacagacgacttatgtgaatatcggtcttttgtctactatgaatcgcctgaatggtgtaggcatcaatgcgctgggaagtgttgttcatggagatatgaacggcgcacagattacaggactggctaacctggccggtgggacaatgcgaggcgtgcagatagcaggtataagcaatatcagcggtaacaatacgatcggactctctgcagccggactggtaaatattaccggagacgggacacggggggtggttatatccggactgactggtatcggtggagataataccgcaggagttatgatgagcggttttatgaatgttaccgggaatatggcttcaggcttacagttttccggtgcggcgaatatcaccggacagagtttcaacggcatgattacttccggtcttctgaatgtggtaggtgaaaatatgaatggcctgcagatagcaggtatcgccaacataaccgggacacagctacgtggagttcaaatggcattgtgcaactatgccacacaagttcgcggccttcagatcggtctggtcaattactatagggaagacttgaagggtttccaactgggactggttaatgccaatcccgacaccaaagtacagatgatggtatacgggggaaatgtgactcctgccaatatcggggtacgtttcaagaatcagttgttttatacgattcttggagtcggatctatgtatcagggattaaatgataagttttcggcgagcgcttcctatcgtgcaggattatcttttcctatctataaaggattatccattagcggcgacttaggttatcagcatatcgaaactttcgacaataaggatgaagtgattcccggacgtctatatgcgctacaagcacgcgctaatctggaatatcagctaaccaagaaattcggtatcttcgcaacgggcggttatggcctaaccagattctataataaatccggcaattacgataaaggagcgattatagaggcaggcattgtccttttctaatataaatcctgcatatatagcatttattctcttgctttactaaaaacatttcgttccataattgtttccctttcgttccacaaatatggaacgaaagggaaacaactgtggaactaaaagataataactgtggaacgaaccactcgttgcactgaaaattattgaatgtcacatggcaaagaagtaaccttcattcagaccttttcctttatcagaccggtacgataagcaacaagcaacttcttcaagtcctgtatttgagttaccaattcttttcccttatcggtgtctttcaccatcatccgttgcgaattaaattccaatacgaaattggtagatttgatatccagtccctcttcgatagctttctgacgagactggaacggttcgtgctgtacaagctgcataccgtgagaatggtagacaagtgtatatccggcaattcccgtttccggctgataggctttggaaaatcctccgtcgataacgaatagtttgccattggccttcatcggctgttctccttgaatagtcttcacaggcacatgaccgtttattatatgcgaatgagggcctaaagctccaaactcggccaatatctgatcacaaatatcctcccgattgcgcaatgtataataatatcctttcttctctttatgcatttctttgtcttccaggaaatagcgttcaaaagtagccatcttatccttatcaaataaaggtgcatccggaccacaccacatataccaaatataatccatcgcaaattccttatcctcctctccctcttcgtcgaagtaggcggtacggatcagttgatcggccttatccagaagtttgtgtccccaatactcttttccgcgtatcttgacatgcttaaagctaccgtcctcattcaaaggcacggaagcgtgataaagaagattggagttggataccagatacatcccgccgtaagtaaacaggcaacgcatatgcttcttcaatttctcgctattcataaatgaataatgaatcttatccacaagctcacgttcttcatccgtcaagcggtaaggattggcgggatctaccgttggaaagttcgtgtcacgaagggcatactccttaccttcgtagacaaagacaccacgctcaaaatctatcttctccaacaatttacgatttgccattccaaactccggacggcggtcgatgatctcggcttccagcttaaactggataatagtgatcgccttgtgcatctgagtaatcaagcgcaacgttttctcattataatgagtatcggcaaaattcattttcggcatgaaaatggtgcaaggatcatcagcgtaagtatccatagcaaaggtagcaagcggcagcagattgattccgtaaccgtcttcaagtgtagccagattaccatatcgcatagacatacgtatcacattggctatgcaactgtcattgccggaagcggcgcccatccacagaatatcgtgattgccccattgaatatcgaaattatgataattgcacaaggtatccataatgatatgcgctcccggtccgcgatcgtagatgtcgcctacgatatgaagtgaatcgattgtcaaacgctgaatcagattacacatggcaatgataaaatcatcggcacgctttgtcgtgataatcgtactgataatcacattgatataggcatgcttgttcggctcgatagatgactcgtgcaacaattcctgtatgatatacgagaattcggcaggcaatgatttacgtaccttggaacgggtatacttggaagatacgttctgacagacttttactaactggttcagagtgatcagataccaatcgtccaaatccttctcacgggccttcaccagttgaagtttttcttcgggatagtaaatcaacgtgcagatctcttttttctcggcctcgcgaagcgtattgccgaatatctcatttaccttacgttttactgcaccggaagcattcttcagcacatgttggaaagcttcatattcaccatgtacatctgtcaggaaatgctccgtccctttaggtaggttcaagatagcctccaaattgattatttccgtacttgcatcggcaatagtaggaaaacttcgggaaagcagttgcagataacgcagatcgttcacaatgctttcaggagttatgttactttgagcagtcatttctatttaattacaaattactaaaatcaaattaccatttatcggctcacaatccattgttctaatctccaaacttacgtttttcgattattcgcaataaatataatacttttttatttatccggttattattttttattcaaagtttcatttttcagcccaagaagaacatcagaagtacttgtgcgataatcacccgcaggaacatacagagcggatataccgtcgcataagccacagaagggttatcaccgggtattgtatcattagcgtaattcaacgccatcggattggccatacttccacacaacataccggataccgtaccaaaatcgatcttcatcattttgaaggcgacaaaacctaccaatactgtcgggatgatagtcagcccagctcccaaagcaatccacagcagaccttccggacggaatacggtgtcgaaaaagtgagctccggcatccaatcccagacaggcgagatacagggaaagccctaaggcacgcaacatcagattcgcgctgcgggtagtgtaggttatcatgtgtatccgtggtccgaatgtccccaaaagaataccaacaataatcggtccgccggccagtcccagtttcacgggagtactgacacccggtattgaaaagggaatagctcccaatgccaatcccaatactattccgatgaatataacaaccagattgggttctttcaagcttttaatggcattacccaatactttttccacattcaggatggcagctttctcccctactactgtcagtcggtcgcccaattggagtatcagttccggagtagcgagcagttgcacacccgaacgatagacacggctgatattgatgccgtaatgatttctcaatcggagcgatcccagcttctttccattcagttcgggacgggtgacgacgatacgctgtgaaaccagttcgctgtcaatcgcattccagtcaatatcctctttgttccaatccgtattttcctgttcaccgaaaagtacagtcaacgccaaagcatctttctccgcagtgataaccaacagacggtctccctctttcagcaccttgtcggaagtcggaatgctgacgtgtccgtcccgccataagcgggagatgacaaacttcgggtagctcatatgtgctatgtctttaatgctcttattgaaaatagcaggattgtgtacttgaaacgctgcaatataagttttgttcgcatcatctttctcttttatttccaaatcttctttgcgaaccaatgctttacggattaacaagacggcaagtatcacaccgacgactcccatcggataggctaccgcacatcccaaagcaggtgtgctactctccagccccatctgtttcagagtttgctgagcagctcccaacgccggagtgttcgttgtcgctccacaaaggataccgaccatatcgggaagtgagacacctgtggcatagctggctacgaccgttaacaatgtccccaacaggacgactcccaatgccagcatattcagcgttactcctcctttacgaaaagaactgaagaaaccgggaccgacctgtaaacctaaagaataaacgaaaatcaccaaaccgaaactttccgcataattcaacatctgaggatctaccgaaagtccgagatgtccggcaaggatacctgtaaaaaaaacaaaagtgactcctaaggatactccccagaaatgcactcttcccaagcctaaacctaccgcagaaatcaacgataacaccacaaccgcctgtaaggcagaatgttcgagaaacagactatataaccactccatgtattttcaaactaacagggcgcaaagataaaaactatttagtcccattcaaaacttttatgctttcattttacgccctactcatgcctcgtgctgatattctttatatcatctttcttatcttccttgatattccacaaaattattccgcccatccagatagccactcaacctgttgcccccaatatatacgtcgtccaggtaggaaacatcattgggcccatacgacatacggatggaagtttgcgcgaaattttcccaactccaacggaacttatattcaaattcttccacatatccgtccggatattccacccgtatgtagtctattcctgtacgatctaaaaagaaatccagttcctgacagcagtagttgttgtctatatcccgataaaaactgacccaagtgcggctacacaaatcggccgaacggttgtaataacccggtccgttattatcatcatcgtagaaactgtctatctccacttcgcaagaagtaagaccgaccatcaatacagccatcaaagccagacctaaatatttaaatgtgttcgttttcatattcctttatttttaatgattcgtttattaatatctatcatttatccttcgatatgacaaaagtatagaatgaattttccccttgaaactgaaaaatcctacttttcaggaggaaattacctacttataggggcaaatccccacgcttgagatttaatggtataataccgtgcacagctcattccaagtacccaaagtcttaataaaaatagaatataagaagtaaacatttaatcaatgttataaaacatccgttttttcttgtattatttgcagatatcacagaagtccgtatatttgcaatgtgtttttcatagtattagatttaaggttaacaaaaagattggctgtctgggatagatagcctttttttatacacctacattatctcccctcttttattcaataaatccaatgcatcttttacttatagcggcattttatgaacgtttctgaatagaaatgaaacaagccctaaaaaacttcgaaaaaaattatttcgtttaacatttgaaacatagagggttatctccattattgaaaaacaagtaaaaaaaatcttgctaaaagatttgcatagtcaaaaacttccccctatctttgcaccgcatttgagagagaatgcgggttcaaggaagtttgggtgagtggctgaaaccaccagtttgctaaactgacgtactcgtaagggtaccgggggttcgaatcccccagcttccgcaaaatctcaaaataaaaagagctaagtattttaagacttagctctttttaaatcaatcaaaatccggtgggttcgtctaacggttaggacacatgcctctcacgcatgtaatacgagttcgattctcgtacccactacacaacgaggaaatgaatcaattcatttcctcgtttaatttatacacctcaaagaaagattctttatcaatcctcaacctaattctctcttcccgtttctgccctgccaaattcaagaataaattgaaatataactgactgaaagaaagaccggaacggctgtaagtaatatcaaatgtccaagtcctacgaaaagagtcaaaagcagcaaatggctgctcaccacctttacacataaacacttcaggaaaggacgcaggcggataaggttgaaataagccagccaattgcacataaatgtaatcaatcatccattcatctcctgccaaagcaagctccccttttaaacggagtttaaccgcatacgcagcagttacatcaggagaagtataaacaggtatctgactttccgacggatagtcaccattcttatatcccagactcattgtcaatcccgatttaccgattccgttaaatccgccagcttcctgtctcgccaactgattcttcagatcaatcataaacgtcagtttgccaagagtaggatctcccggatactgcgccagcgtatccagcacataatcctcctcattataactcccggctaccaattctccctttccatcttccagagcgacatcccccctttcaatatccacattgcctaccggataataaatcgcatcatcatccttcgcacagccacaaacgcatagcagcaatactgctaatcctattatcttattcataatcttttctatatcttgatttaataacaaatatacatcttttttgtgctgcaattgatttatatcaaccgtttttagtatttttgcacacaccaaaacaaaaaagacatggatacattgttaagagaaactgtgaatgccgttgtaaattcccgctttccggaaatgagtatagagggaagacggcagatagaaagtatactgatccgtgaagagtttcccaaaggagccattgcactgaatgagggagaggtcgctcacgagattgtattcgtcggtaaaggtatgctcagacaatactactacaaaaacgggaaagacgttaccgagcatttctcttacgaaggatgtatcgtgatgtgcattgaaagtttcttgaagcaagtacctacccggcttatagtggagacactggaaccttccattatctaccttttcccccgcgacatgatacagaagctggcgagagaaaattgggaaatcaatatgttctatcagaaaatattggaatactctttaattgtatcgcaagtcaaagctgactcctggcgctttgaatccgcccgcgaacgctataatctcctgctcgagacacatccggaaatcatcaaacgcgctcctttggcacacatagcctcttacctgctgatgacaccggagaccttgagccgcgtacgctccggagttctgtaaacacattatcggttcttccgatattctttgggagacatccccgtataatgcttaaaatatttcccgaagaaggactggttggcaaagctcaagcggtcagctatctcctgtatattcatgcttgaggagtttagaagtgcttttgcttccaagatcacaaactcatcgatccactcgcccacggtctttccactcacctctttcacaactccggaaagatgtttcggtgtcagacacagctggtcagcataaaacttcacactacgttctgattgataagattctaccagcgtttcatagaaacgttcaaagatatactctttccggcttttcgacttcaccgaagcagtgactgcaggcgcatgattgttaaaaatgttgcacaattcaaaaaagaaaccctgcatcagtccgagcacgacctccctgcgatacagatcccctttactcctcaacctctttctgataaacgtatgatattcctgcaccgtgcgctgctcgttcggagtcaggctaaaacaaggataatccttcagatagaaaaacaatgcaagcagattgcctactttaggcaatgtctccagcaaactcttggataccgcaaagaagattcccttgaagtcgggactaaactgccggtgttctataatctggctcggcagggctatcaccatccctcccgaagataattgaaaatcctgcagattaatattaaaagtcccctcaccttccaggcaaagtcctattgtcaatacctctaacttgctgggaccgctatataaggaaataacgctctccgaatcgaagagcgctatatcattatcaatgacatcaatgctatcagcatctatatgtttagaatgaactacagaagaaatacctactttaggaacattttgaatatccatactctctctctttttgcgacaaatataccagcaataaatcagatatacaagtcaaaacagagtatcaccagacaaaatgaacatttttggctacttattgaccaccccgaacagatattcagcgtcacgccgggcagcaggaacagtccactcctccggaacgaatttccactgattcaacgctttcggactcattccccctttctcctcaatgtaattcatcaggtaaaaacgaagatccttatcagtagagaaaatgatacggtctttcaatttctcttgaggaatgcccgagccctttgtcaacaattcaccgccgccattaccacgataagaattcaacgccactttataaatcttatttatatcgaaaggagagccatctgccatactgacaatcgtaatcttctcccctttcggtttagtaacatccaccgtatagattatgccggaagccgaatcaaagttaaaactgaaattctggaaagaagccctgtcctccgcaccatcccgacgtttttccttgaaccacagcaaatggtcgtccggtgatttcatccggttagtccacatgaaataagacatctccagaaaatccttgatttctttaccggacaaagtcatcacgtacagcatattttcatacttatataagttgaacatatcactgacgaacacatcccctttcttaatttccgcatcgaatgaaagcggtgctgcaaaagaaatgtcggctcccgtgatatcgagctgcaaagtatgtatcagatcgatgaaagcagaaggaccgaagaaagaaggatgcgtagagatatcctcagtaaacgtaccgattttcttggacacaaacttccgcacagcctcatactgcggagcgaaacgtttcataaaatcctcgctgacaccataatcctttgtctccgtcaatacaccttgaatatccttgctcagtaccttgccatccttcaacttcaaagtgatgtcgacattggacagcaccactccattgcttgccggatcaataaccaacaccgaatctccggcaacattcatcaccttcttacattcgcgggcatgatcatgtcccatcaataccacatcgaatcccggaatattctttgccacattcagagacgcattctcattatatttaccggacatcttaaacgcatcctgtccggcatggaacaacccgatgaccacatccggattctcctttgcacggattatcttcatccatttgcgagccgtctcctccatatcgtcaaaacgaagccctctccacagattttccgaaagccaggcaggaatggccggtgtaatcatccccaaaacgacgatcttcaccccgtcccgttccaacactttataaggaggaagatgaggtttccccgtagacgtatcaatgatattggctcccagtacaggaaagtcacaggtttcaatccaacggtcgaatacagcacgtccagtttccacatcatgatttcccatattgcccgcatcatatttcatataattcatcatctccgcacaaagatgcggagacacggtatctatataattatagtaataagcggtaggctgtccttgcagaatatccccattatccagcaatatcagattatctttatactcccggcgttccttctcaacaaatgagtatatccgggccagactccctttccattcctgacgggttataaaattgtaaggataataatttccgtgtacatcacttgtctgtacaatcttcaacttcactaccttttcctgtgctgcaacggacagtgtcagacagaaaagccaagcataaatcaatgttattcgtttcattctttttctatttttagaggatgcgagaatataaatcgtgccccgcctgtatagtcgggatcaatccatatagctcccttccatttagatacgatcaatttacagatagacaaccccaatccggttccctgagcatactcattcagtttttcaaagcgttcgaacacaagtttctgtttttctttcgggataccgcatccggtgtcagtcactgagaaaaccgccattcccgttttttcatcgacagaaaagtccaatgtaatcttcccctttttcgtaaacttatcagcattcgacaagagattgataatcacctgctgcatacgctgtatatccgtctccatccggtacgtctcaaaagaagtggtaaacagaaactgattgtccgaagattgccgtgaaaaactaacggaagcaaccacctgccgacacaacagtacgatatcacactcctcccaagttagcgtcacccggttagcctccagtcgcgaaaggtcaagaatatcattaatcaggcgaagcagtaaatctgaattagtcttgataatctgaaaataggactgacgttcctcctccgtacttccttccacagccaacacatccgagaatccgacaattgagttcagcggtgtacgtatctcatgactcatgtttgccaggaaagcactttttagtcggttggactcttccgccctgtctttcgccacacgcaaatctttgtccgacctcaacagttcgtctttcaaccgcttcgtacggaaataataaaagagagaaataaacagccccaacaccaatacaacaaacaaagtgcaagcagaccatatctgatacgtatactgctgatagaatgaaaccggctgattgatgagctccacgctaaacggcaaagccttcggatccagtccccattctttcgctttcctactgtccatcacagccttagatccaataatctgcagatgtttttccgtgttgccggactgattatccatccggacagattccatagccatctcttctcccactttccgataatcgggcaatacacctcctatagcccaatgtcccaggctcaccgatgaaggtgtaaaggtaggaatggcaggagccgcttccatcatcgcatacgtggcgttccgcataaaatacccctcattcatgtccacccgccaagtgcccacgatgataacagtatgctccggcaaatgccgtaattcctctacaatcgtataaatagtatgttttcttccgtccaacagaataagatccagatcggggaaatttttcatttcctttcgcaccaacgcttgcatcgtgacgccgccatacgtattatccgagataaaagcaatatgttttgtttcgggatagaacgcacgaatcatacgcacattatctcctatattataatgattgataaatcccgactgcaattcaggaatattcatatgatcttcaaagatatctacagatccgggcaaccagctatctaaatctccaacggtatcctccggcaatatcacgacattgctgctgaccagactacacattaccggaactttcacccgcatcgaatccctttgagacagataagccgcccacgcctcctgtcctaacaatataatttgtgccggttgctgcttccccccctgatatttagcaaggatttgcgtcatcataccactccataaaggagcttccgagaaactcttgcagttcatattctcaataataatatcacgtttccctcccagtctggtatatccctccatataatcggaaatagtaactgaagtctgatgggcagccggattataggaacaaataattagaataggattcatatccttagaggttgcaaggacctccattgacagggatagccaaaggaagaaagcaaaaagacatcctgaatatctgggcatagttatgcagttttgatgtgcttacttatttatttaggttgcaaatatagcaaaacttgtcggttttaacggattaatgtgtatttttgtcgctcatttattctcaaaaaatacaatttatggaattatttcacaagatgatttccggactgtcaggcatatcggaaaaacaaataagcagtaccctccaccttctgggtgaaggcgctacgattcctttcatcagccgctaccgcaaagaagctacaggcgggctggatgaagttcagatagaacagatcaaagagcaacatgataagttgtgcgacatagccaaacggaaagagactattctcggcaccatcaccgaacaaggaaaactcaccgccgagctgaagaaacgtatcaacgacacctggaatccgacagaactggaggatatctacctcccctacaagcccaaacgtaagacacgtgccgaagccgcccgtcagaaagggttggagccgcttgccaccctactgctattacagagggaaaacaacctgagtgcccgtgccgcctcattcgtcaagggagaggtaaaagacgtggaagacgcgttgaaaggggctcgcgatatcatagccgagcaagtgaacgaagacgaacgtgcccgtaatgctgtccgcaatcaattcagccgccaagcggaaatcaacgctaaagtagttaaaggcaaagaagaagaggccgccaaataccgagactatttcgacttttccgaacctttgaaacgctgcacttcccatcgcctgcttgccatccgccgtgccgaagccgaagggctgctgaaagtgtccatcactccggacgacgaggcgtgcatcgaacgtctggaacgccaattcgtacgtggtaacaatgaatgtagcgagcaagtgagcgaggctgctatcgacgcctacaaacgtctgcttaaaccttccatcgaaacggaatttgccgcacaatcaaaagagaaagccgacgacgaagccatccgcgtcttcacggagaacctccgccagctactccttgccgccccattgggacagaagcgggtactcgccatcgatcccggtttccgtaccggttgcaaggttgtttgtctcgacgctcaaggtaatctgctgcataatgaaaacatttatccgcatcctccggtcggcaagaccggtgaagccgcttcgaaactccgtaagatggtcgaagcctaccagatcgaagctatctccatcggcaacggaacagccagccgcgaaacggaggactttatcaaccaacagacattcgaccgtcagattcctgtatttgtagtcagcgaacagggggcttccatctattcggcttccaagatcgcccgcgacgaatttccggactacgacgtgacggtcagaggagccgtttccatcggccgccgtctgatggatccgttggcggaattagtcaagatagatcccaagtccatcggagtcggtcagtatcagcatgatgtagaccagacgaaattaaagaaagcgctcgaccagaccgtagaaaattgcgtaaacctcgtaggagtgaacctgaatacagccagtagccatctgttgacttacatttccggattaggtcctcaactggcgcaaaatatcgtcaattatcgtgccgagaatggagccttcaactcccgcaaagaactgatgaaagttccgcgtatgggcgccaaagctttcgagcagtgtgctgggttcctccgtattcccggagcaaagaatccgctcgacaatacggccgtacatccggaaagttaccatattgtggaacagatggcaaaagatctgaaatgcactgtcaatgagttgatagccgacaaggaactccgccggaaaatcaatatctccaattacgtcactcccatcgtcggcctgcctaccttacaggatattatgcaggaactcgaaaagcccggacgcgacccgcgaaaaaccatcaaagtatttgagttcgacaagaatgtacgtaccatagccgatttgcgcgaaggtatgattcttccgggcattgtaggaaacatcaccaatttcggagctttcgtcgatataggtatcaaggagaacggtcttgtacacctctcccaattggcggaacgttacatttccgatcctacggaaatcgtttccatccaccagcatgtcatggtcagagtgatgaacgtagataccgaccgcaaacggattcagcttagcatgatcggtgtaccgcaagactgatcgccgttcttttctcaccccaccagataataagaacagtaaacagaatcatcagtaccgtgcaaatgagcgagccttcaaaaccgaaggctccgccattcagcacattcttttcgggcatattcagtttcagcatagtagatacaaaattgttgccgctcacctgatagcccagaaccggaccttgtatccaattccagaaaagatggagggaaatcgggaaacaaaggttccgcgtatataaataaggagcacccagcaacatgcctgccagcaaaaggttgatcatcggcaaggcatttatttcaggattaaaaatatgcaggaatgcgaataacgatgccgagataaacagggaaaggaatttattcaaacgagtatgtaataaacgtcccaatatatagccacgcatcagaatctcttcaaacaccgcgacaagcaggaaaaacacccacgctcccgccaaatcccaagtcttgaactgaaaaccgactacttccacttcgcccatagccaacgacagaccgaagcctaccacatacaacaggacagccatcagaaacccgtaccacaaccctttcgtatgtcctctgacggacagccccaagtcagagaacggacagcgttcaaaacgtaacatgatagcagcggcagtgagaacagccagcagcatactgctttccagtaaaatataccccaccaatcccggatgacgggcttccactccaagcaccatcgacaaaaatcctctcgccagcgtgccgtacaatcccataaatatgaaaaatattcctataaacaatgggatacacgcccatacaggaagtctcttaggttcttttttctccacaatatcttctgccgtcattttacaatttgttaatccacctgcaaaattagatataaaacataaaaaaacaccatataatttcgttttttcctatatttgtcagaacaaattcgcatgattatgaaaattaaactactattgataagctttttattggcaaccaacgctttaggagcagtagcacaagtgagtaaaacctattatgtaagcaaacccggcacacttatttccatgatgacggaggaggaagccaacaccgtcacccatctcaccctgaccggcaagctgaatgcagaagacttccgacatctgcgtgacgaattcgccagtctaaaagtattggacatctcgaatgccgagattaagatgtacagcggcaaggcgggcacttatcccaacgggaaattctacatttatatgccgaatttcattcccgcatacgcattctcaaatgttgtagacggagtaaccaaaggcaaaaagacgttggagaagataatactttcggaaaaaaccaaaaacatagaggatgcagccttcaaaggttgcgaaaacttgagaatctgtcagattcgcaaaaagacagcccccaatctgttgccggaagcgttggcggacagcgttaccgcaatcttcgtacctctaggcagcagcgattcttaccgtaataaggacagatggcagaacttcgctttcatcgagggtgaaccggtagaagcaaccctgcaagtgggactgatgggcaaattggaagaagagattctgaaagccggattacaacctagagacatcaatttcctgactgtagaaggcaaactagacaacgccgatttcaaactaattcgcgactatatgccgaatctggtagcggtcgacatttcaaaaacaaacgcaacggccatccccgacttcactttctcacagaaaaaatacctgctgaaaataaaactaccccgcaatctgaaatccatcggtcaacgtgtattcagtaattgcggccgtctgtgcggcacattggaacttcccgccggtgtgacggctattgagttcggcgcatttatgggatgcgacaatcttcgctatgtagtggctactggagataagattacgaccgtcggagacagtttgtttggcgaaggagtgccgagcaagttgatttataagaactaaatgattctaacaacgataatggcggtatctctcatggggatacccgtcgctgacgagcccaaagactcagtgatgtggaaagaggcagatgcgttcatggcacagatgagtccgacgctgcaacccacacagcgtgacgctatatttacagctatcaacggaaatacgaagaagttggaaaatgtaagaaatacgcgtaatagcaaacctacttatcccgcaaatgtaaaagtgacagagcccgccggtaatctgaggctttacacccctaccacttccaccaacaatacattgcttatctatctgcatggcggaggatggacaatcggcagtttgaacagttgtgcccggttttgcagcgaagtctgttctagaagcggcataagtgtcctcgctgttgactatcgtttatcccccgaatacccttatccgacaccgcttgacgattgtgaggaagctatcagatttgcaataaagaatgcagcccgttggggatgttctcccaaccggattatggtaggcggtgatagttccggcggcaatctcgccatttcttccacattgagaatgaacgaaggggatatagcggggcttttgcttttctatcccgttgtgaaggcatggaatgaccataccccttcatggcagaagtacgacaagggattcgggctggacggagacttaatggaagcgttcaaccaaagttatgaaccatcacccgacaggatacacaatccggaaatatcccccatgtcggctacagacaaaaccttgaaaaaactacctcgcacactccttatcgcagccggacgagatatcctggcttgtcaagggaaagagtttatcgaccgtatcacctctcttggcgtaaatgctacccgactcgaatttccctcggcagtgcatttgtttatcactgtgcccggtcaagaaacagctttcaatgaagcagtgaagtatacagtggagtttcttggcaaataaaaactaatcaaaactcaacaatggagataaaaatagctgttttcttacaaaataacaaataaacgaataaataagtagctttaaaaatgccctttcatcgttttccgtatatttgcttcgatatgaattaaagaagggaatcgcgatatgatgaaacaaataccatacggattgacggatttcggacgcatccaaaaagaaaactattattatgtggataagacaatgtttatcgaaaagatagaaatgcagccgtcttatctcttcctcatccgccccgacgcttcgggaaatatcaatgaggtggaggaatctttccgg

SEQ ID NO: 11884 - DNA, 8051 bp, Unknown
  gut microbiota DNA sequence
aattgtactcaaagctatagtccgatacgctccacttcctttccaatattggaatgttaataaattacaggattcagatttttatcaaaaaaagggcctttattcaaggtccttctttatcacttcatctatttcctttatacgtttcttacggcctttgtcgggaccgtctttcgtatcattcttgaaaacattgtctgcacggtcagaaacttcactgctccattcttcaaaatcattcgtggccggacgaccattcggttcgatattttcttctgcaatcgaatcgtgtctgttaatcatatcatccataagttctcattttatatatttatggtcataagacaatcaagaacaagaaaagttctttgttttaatgattttttgaatctgattatacatgagtaactatcttgccaaaacatctgtcacccaatacgatcatacgatttgcctaaatcgactatacgtttcacttaaactaaccatacgattcacctaaaccaaccatataattcatcccaagcatacggagtagagtcgtgtttcaacggcttgagacaaagtgttcgacagtgcgaaacaaagtgtttagcagcgtgaaacataatgttttccaccgttaaacaaaatgtttcaaatagctatgaaacaaaataataaatagtaagaaagacattctaccgattactgttttcagagaaagcggtgataggtgacaggtgcggtgatagattacacacaacctatcaccttattgaaagcacgatgaataaaggaattcagagcaacaggtgataggtgatagaggattttatgtttttatactagggaaggaaggttatttcgcccgataattctgcggtcgaaaaggaatataaagagtataattactatctgtcggtttaccttctacaagagcaggagcccacttcggcattccttttacaatgcggagagcttcttccgcaaactccggatgcgtagaccgtactatatgtggacgaagtataactccttctttatcaatagtaaactcgcacaaagcaaatccgggaatatttttctccaataaatcgaccggatacaccatctgtccggcaatatattcttcaggagtcatatccggaaaatgagctaactcttctatccgttttccagaaagtgctctcgagcggggacctacctgataaattccaacatatatcggttgtttatatgcatcggaagcttccttgctgcgttgttgcagggccttcaacagagaagcggcttcttctgccaaagtctgctccgatatatttccacctttggacaacatataagccgactggcaaaccaacacaagacgctccatcaaagttcctttttccggagaccacttccttcccatccgctctttccctttctcattggtggaagaaaaataatagacaaccccatccaaaccggcactggaaccatccaaatcctgtatctgctcagtggctatatgaaagatagctcccaaagaccgataaagcgacggactgacggcaactgatttcgtctccactttcaccgttcctttctccgcctgccaataagttcgtgacagcgtgttcgatatcagaaaataacgtccgttcttcttttctaccgacatggcatattcgggcgaaaaggaaggaatagctgtaaaacgcgcataaggctgtttctgaaaacctgtatttaacaaagagaatacactacgataatattcacccaactcgcctttataagtagagaaagatcgcaccggctccaaatagtctgtctgggccgcaaggcgaaaagaaaaagccaaaattagaagagtgaaaacaatctttttcataagttgccggattttcggtatataacggtgcaaagataggaattatttcaatgcgtaccgataaaacaatggggaatatactccatcacactgtggaatttttacacaattccacagtctgcaattccacacttctaaaaaaacacactttatttcttaaatactataacaataaaaatcaattatttacgttttatccggacagtatatagaatggtctggcacgctgcttgctaattattaacagaattcaatccctataagaaaatctaaacttaaataaacatgaaagtgacaagaaaaagcaaacggttgttaagcattctttttgtgttccttttaccatcacatctgttttcacaagcagcaagcatgccgatggaagccccgacagagggagagccggtgacggaagtgcaagaagacgaaaccgatgaaggcgggaacagaaccataaaaggaattatttatgacgaacaaggagaaaccatcatcggtgcctctgtattaataaaaggagaagaaacgacagggacaacgagtgatatggacggcaaatttacactgagtgttccccaaggatccaccctcgttatttcttatatcggatatcatccgcaggaaataaaaataagaaaaagaacagcccttcatgtcatactgaaagaagacaatcagctactagaagaggtagtggtggtaggatacggaacagtcaagaaaagcgatttgacgggctccgtttccggtgtgtcgaccaggcaattcaagaaccaaccggtaaaacgggtggaaaacatccttcaaggccggacacccggtgtggaagttactgcgacaagcggtgtgcccggagcaggcatgaaagtacgtgtacgcggtactacctctatcaataaaagtagtgacccgttgtacgtgatagacggaatcatctcttccagcgggctggacggtatcaatccgtcggatatccaatcgatggaagttctgaaagacgcttcatccaccgctatttacggttcgcgaggttcaaacggagttattttgatcaccaccaaaggcggtagcgaaggaaaagccagtattacgttcgatgcttccgtaggtctttccacagtgagaaaacaatatgatttactgaacgcatatgaatatgcaacggcactgaatgatatacgcggttcatctacgatttcagcagaagacctcgaagcctacaaaaacgggacaaaaggaatcaattgggctgacctcatcactcacaccggtatcacgcaggattacagattaagcatctccggtggaaacgccaaagtgaaatatcttatttccggaaatatgctggatcaggaagccgtcactatcaggacggattacaaacgttatggtatccgggcaaacatcgatgctgatgtaaaaccctggctgactatctccgccaagatgaacgccagcagtctgcataagcataacgacggcgccaactggtttcatatcaccaacttctcccctacgatggaaatgaaagatccggaaaccggcatatacaacagagacccgtataacatcgccaacggctcgaatccatacggtgagctgatggttaactacagtgacagttacagttataacctcaatgctaacctgaccttattattcaagataatgaaagggcttacgttctccgtacaaggtggatacgactacgaccacagcccttcctattctttcaaatcgaaattggaagctcccggtgcaatcaacagcatgaacaacaccagcaatatgcataactattggcagaataccaataacctgacctggcaaagacaattcggtgaccacaacgttacggcaatggccgtatgggaaatcagccgctcgtgggatacgggcttgcaaggtaccggttcgaatctgaacaatgagagcgtaggatattggaatatcgccaatgccgccataagaaatgcaagtaactcgtacacagaagcgtctcttgcttcaggaatcatacgtgccaactatgactacaagaaacggtatttcatcactgccgcattaagagcggacggctcttccaaatttcaaggaaacaataaatggggatattttccatccgcagcagtagcttgggatatagcaaaggagaagttcatgagcaaccaacatatattggaacaattgaaattaagaggtagtttcggtgtcaccggtaatcaggacattgccgcatacagtacgctgggaatgttatcgggcgcaacttacggctggggtacttccaatgcttacacagggtattggggtaaccagttccctactcccgatatcacttgggaaaaaacctaccaatatgatttgggagtagatttaagcttgggcgggttcaacattacattcgattggttcaagaaaataaccaaagacctgctcttccaaaaacaagtacccaaatacaacggtggaggtacgtattgggtgaatcagggtgaactgaagaacacgggagttgaattctcggtcaacaccttcccggtgaaaggaacggtgacttgggagaccggtttcaatgccgcttatgtgaaaaatgaagtaactgaccttgccggcagtgacttcgtactgacagccaactacagcgatttgggcggtgcgatgcaaattatgaagcccggttatccgatgggatctttctatgtatatcaatggaaaggattcgacgacaaaggcgccaacctttatcagaaagcagacggtagtctgactaccagccctacttccgacgacttggtagtaaaaggacaggcaagcccgaaatggacaatggggtggaacaacacaatcagttggaaaaactggactgtaaacatcttcttcaatgccgccaccggatacaaccgcctgaatataagccgctacacggccgcctcaatgaccgggaattcacgtttcgtcacgctgcgggatgcgtatttcaaaggttgggatcacgtaagcaacaaagcggaagcagcttatccgagcctcaccaataccgaaagtaagaattacgccaactcggacttctggctggaagacgcttctttcgtcaaattgaaaaacgtcagcatttcgtatcgcattccgagacgggttgccaaatttgcaagtatacaattatccgtaagcgcgcaagacctttttacaatcacccgttacaaaggaatggatccggaggtttataccagctatgacggtctggattatggtgcgtaccccatcccacgaacaataacttttggcgccaaaatcagattttaaccattgacctataaataaagaacaagatgaaaacaacatataagtatatcaaaaagacattgccattcgtttgggcgggtctatgcttggtttcgtgtaacgacttcctgaccgaagaccctaaaggacagttgccctcagaagaattcttcagcaacaaagaagatcttgatgcttcactgaccgcactatactccgtgatagcaagttcacaggcaagcaataatctttgcggtactaacttcctagccggtgatgatatttccacccacccttccagcaacaaacagccgcttagggaacatgaccagtttgatgtgaaagataataattcatggttgtccagtatgtgggaacagcgtttcaaagtaatcaaagccgccaacttcattatcaacaatgctggacgcacccctgacgtatcagaggaagaaattaaggctgctatcggacaggcacattattggagagcctattcgtatttctatctggtgacaacgtggggaaaagtacctatcatgctggaagaggaaatcaattacaacgctcctttgcaaacagaagaagaagtttataaattgattctatccgacctgaagattgcagaaacagattgtcctgcaaattacaccaaagagccttatgccagaaacggaataaatatcgccgtaagtgaaggagcagtgaaagcgacaatggcatacgtgtatatgtgcatggcaggatggccgctcaacaaaggaacggaatattataaactggcggcaggcaaagcaaaagaagtaatcgacggtgtggagaaccacatttataattatgcactgctggatgaatacagccaggtatattcttgggaatataataataagaataaagagttactgctgggtatctactataaccgggaccagacaaatcaagccgctcccttgaccgacttccttcaggatatggcacaaggcggatggggagataccaatggagaaatcaaattctggaaagcttttccggaaggaccgcgcaaagatgccacttactttcctaaaatcatattgagcgatggcgagctacatgactggtggtatgacaccgatccaccttcccgcgaagtggttgcacctgttttcatgaaaacggtggaaggtgctgtacgtggaacggagttcgattacaccaatcccgctctggtgaatgcggcaggcgaaaagacgctccaactgatacggctgtcgcaggtatattgctggtatgccgaagcaacagggcgttcgggagaagtcaatacaaaagccatagaagtattaaataaggtacgtaacagggctgacggtcaagaaactaatttttataaggaaaccatgacccccgaagcactggcagaagccgcctacgatgagcacggctgggaaatagccggatactattggggaggcattgcgagcagagccagggatatgttcaggatgtaccggtacaaagatcattttgaataccgcaaggagaacccgctaataaaagtagcggagggtatcgagagaaatgaagcggtgcccgtgacgggtacatgggatgatagtaaaatgtacgctccctatccttacgaggatgcgattttaaatccgaacctaaagtaaggaactccataaaaacgtctatatagattttactaactgaaataaatattatatctttgcaaggtttttaccaagaaactgaataacaatatatcaaaaatatgatagctaagattgaacaacttctgaaagaggtggaagccttgcacgcctccaatgccgaagaactcgaagctctccgcatcaaataccttagcaagaagggagccattaacgacttaatggcagattttcgcaacgtaccggctgagcagaaaaaggaagtcggcatgaggctgaatgaactgaaaacgaaagcgcaggataaaatcaatgcgctgaaagagcagtttgaaaaccaagacaacggttgcgacggattggatttgacccgttcggcttatcctgtgaaacttggtacacgccatccgctcacaatcgtgaagaacgaaatcatcgatatttttgcccgaatgggtttcaacatcgcagacggaccggaaatcgaagacgactggcatgtattctcttccatgaactttgcggaagaccatccggcacgcgatatgcaagacactttctttattgataacaataccgaagtgtctcacaatgtcgttttgcgtacacatacatccagcgtacagagccgtgtaatggagtctacacaacctcctatccgcgtactttgtccaggacgcgtatatcgtaacgaagctatcagctaccgtgcacacgccttcttccaccaagtggaagctttatacgtagaccgcaacgtgtctttcacggatttgaaacaggcattgcttctttttgcccgcgaaatgttcggtgaagataccaaaatccgcctgcgtccttcttacttccctttcacagagcccagtgccgaaatggatataagctgtaacatctgcggtggaaaaggttgtcctttctgcaaacacacaggttgggtggaaattttaggttgcggtatggtagatccgaacgtgctggagctgaacggtattgacagcaagatatatagcggttatgctttaggaatgggtattgaacgaatcaccaacttaaaatatcgcgtcaacgacctcagactgttctctgaaaatgacacacgcttcctgaaggaattcgaaagcgcttactaaatttagatttcaccacagaggacgcagaggacacagagttcttatttcagccgtatcaattacggctcgttcttcatagaaagtcattagaaagaaaaactccgtgagactctgcgtcct

SEQ ID NO: 11885 - DNA, 8180 bp, Unknown
  gut microbiota DNA sequence
gtttcatcttggcagccaattttctgctctacttcggtttctggctgctgattcccgttttgccgttttatttatccgagtttttccaggcagggacctctatcattggcatcgtactttcctgttatacagtagcggcactttgcattcgtccgttttccggttatctgcttgatacatttgcacgcaaaccgctgtatcttttcgcttattttatctttatgatgatgttcggcggttatctgattgccggttcactgaccttatttatcatattccgtattatacacggtgtctcgttcgggatggttacagtgggcggaaatacagtcgttatcgatattatgccctcttcacgcagaggcgaaggtttaggttattacggacttacaaacaacacagcgatgtctatcggaccgatgttcggattattcctgcatgacgcgggagtctcttttgctacgatattctgttatgcgctcggttcatgtgtattgggatttatttccgccagtttagtaaaaacaccctataaacctccggtgaaacgggaacctatttcactcgaccggtttatcttgttaaaaggattgcctgccggacttagcctgttgttgctttctattccttacggcatgactaccaattatgtagccatgtatgcccgtcagataggaataaacacgcaaacgggattcttcttcacttttatggctatcggtatggctatctcccggatattctccgggaagttggtggatcgggggaaaataacacaaataatagccaccggactgtatcttgtcattttcagtttctttctgttagcttcttgcgtatatctgattcaatggaatgaagcggcctgcacaatcctgtttttcggtgtcgcactactgatgggcgtaggcttcgggatcatgtttccggcattcaatacgctgtttgtcaacctggcccccaacagccaacgggggacggccacttccacctatcttacttcgtgggatgtaggaatcggtattggtatgctgacgggaggatatattgcggaaatcagcacatttgacaaagcctatctgttcggagcctgcctgacggtagtttccgccatctattttaaaatcaaagtaacgcctcattaccataaaaacaaactacgatgagaaagaaagaacgttatgagaaagtgatcgcctggtttcaggagaacgtgcctgtggccgaaacagaattgcattacaacaatccgtacgaactgctgatcgcagtaatcctctccgcccaatgcacggacaaacgggtaaatatgattactccgactttatataaagattttccaactccggaggctttggcagccaccactcccgaagtcgtttttgaatatatccggagtgtatcttatccgaacaacaaggcgaaacatctggtcggcatggcaaaaatgctggtgaatgacttccaaagccaagttcccgataatctggaagacttgacaaagctgcccggtgtgggcaggaagacggccaacgtgattcagtccgtagtattcaataaagcggcaatggcggttgacacacacgtattccgggtaagccaccgcatcggattagtgccggacagttgcactactccgtttagtgtggaaaaagaactgataaagaatattccggaagaactgatccctatcgcccatcattggctaatccttcacggtcgttatgtttgtcaggcacgtactcccaaatgtgctacctgtggtttgcaaatgatatgcaaatatttctgtaacacctataaagttacaaaagaggaatcaaaagccaagaataaataacgatttaatagcggagaaccgaaataaatagtaactttgcggtcgttcttaacgaagaatcttaaaaacacttttaaataaaaatagagtattatgcagacaattgacaaattcaattttgccggaaaaaaggcatttgttcgcgtggacttcaatgtacccttggacgaaaacttcaacatcacagacgacacccgtatgcgtgcggctcttcccactttgaagaagatccttgcagacggcggaagcatcattattggctctcatctgggtcgtccgaaaggcgttgccgataaattttctttgaaacatatcatcaaacacctgtctgaattgctgggtgttgaagttcagtttgctaacgactgtatgggtgaagaagctgccgtgaaagctgctgctctgcaaccgggcgaagtgctgttgctcgaaaaccttcgtttctatgctgaagaagaaggcaaaccaagaggtttggcagaagacgcaactgacgaagagaaagctgctgcaaagaaagctgtaaaagaaagccagaaagaatttaccaagaaattggcttcttacgctgactgctatgtaaacgacgcattcggtaccgctcaccgtgctcatgcttctacggcattgatcgctaaatatttcgatactgataacaagatgttcggttacctgatggaaaaagaagtgaaagccgtagataaagtattgaacgatatcaaacgtccgttcactgctatcatgggtggctctaaagtttcttctaaaatcgaaatcatcgaaaacctgttgaacaaggtagacaacttgattatcgcaggtggtatgacttatacatttactaaagcgcaaggtggtaaaatcggtatctctatctgcgaggacgacaaacttgacttggctttggatctgattaagaaggctaaagaaaaaggtgtgaacctggttttggctgttgacgctaaaatcgctgacgctttttctaacgatgcaaatactaaattctgtccggttaacgaaattcctgatggatgggaaggtcttgatatcggtcctaagactgaagaaatcttcgctaacgttatcaaaggatctaagactattctttggaacggtcctacaggtgtattcgaatttgacaacttcactcacggttcacgtacagtaggtgaagcaatcgttgaagcaaccaagaacggtgctttctcactcgtcggtggtggtgactctgtagcttgtgtcaacaagttcggtctggccaacggtgtatcttacgtttcaacaggtggtggcgcattacttgaagcaatcgaaggaaaaatccttccgggtatcgccgctattcaagaataaattcacataagatttcaacattcttgaagggcagttctttgtgaaaagagttgcccttatttataacctataatgaaggttaatacgttgatttccttttttggcattctttttgcactgttccatgtagatggaaagaaataaataattgatcaaattatgaacgaaaaaacaattaatgaacaatacgcatatatatattccttacttgaagatagaagacttaaggaagccttgatacaattggaatccctgttgtggcaatgctctgactgggatttacgtacccgattggaacagctgcaaacttcatataagtatatgctcgattatatgagacagggagccaatgatcccgaacgatggaatctgtatcagaaaatgcttacggatacgtgggctatcgccgaccaatcgcggttgctcatgctagacaacgcttcatccaactattatcacaaagtgcgccgcactcctacatcaccggacttagcgaactacggcattaaaacaatactgcatatattggagtctttcaatgacgacttggcagtcagcggattactctctgacacaaaaatggatgaagtcctgaaacggcatgaagacacactcaaattcatgttcgtcagggtatggacaaacagcgcatggactcctcaggacgaagaagaggcacaagccatgcttgcatccgaattacttccaggagaagatttatgcctgttcacaagcgctgtcacactaagtttgatggaaagtttcgatgtgcggaaaataatgtggctactcaacgcatacagtcattcgaacgtcagcgttagccaacgggcattggtaggtgtaatgattatcttccacatttacagaaaccgtttgatcttttatccggaaatcctcaagagagtagatctcatggatgaaatccctacattcagaaaggaggtcgcacgtgtttatcaccaaatgctcttatgtcaggaaacagagaaaatcgataaaaagatgcgggaagagattattcctgaaatgttgaagtctgtttcttctatgaagaatatgcgattcgacctagaggagaacgatgaagagaacgatgacaagaatccggattgggaagacactttcgaaaaatccggtttgggagacaagctgcgtgaaatgagcgagctccagcttgaaggagctgatgtatatatgagtacatttgccgctctgaagagttatccgttcttccgtgaagtgcagaactggttctatcctttcagcaagcaacactccagcgtactaaaagcgctgaaaaaaacaggtaataaaggaaacactgtattggacctgatacttgaagcgggaattttcagcaatagcgacaaatattcgttgtttttcaccatccaccaattaccccaagcgcagcaggagatgatgctcagccagctcaacgagcagcaaatgaacgaattgatggagaattcaaattcaaatcctgaaatgataaaacggcttaacgaaagtccgggtgctatcagcaaccagtatttacacgatctttaccgtttcttcaaactgagcgtgcgccgacaggaattcagagatatttttcaggataaacttgacttccataatgttcccgcactcgacaatatcttgtattgggcagacgtgttattccccatcgccgacttctatatatcaaaagaacgctgggaggaagcggtcgaaatctacaaagagttggaagaaatcggagaatttgaaggggacgatattgctgacggttaccaaaagttcggatatgtgttacagaaaacaaaacaatacgaagaagctattcaggcctatctgaaagctgatacactaaaaccggataacatctggaacaaccgccatctggctacctgctatcggctgactaagaactaccgggcggctctcacctattataaaaaggtagaggaagtggctccggaagatgcaaacgtaattttctatatcggtaattgcctggcagaaatggaacaatatgaagaagcgttgaattacttcttcaagttggacttcatcaagagcaattgcatgaaagcatggcgtggtatcggatggtgctcattcatcagccggaaatataaacaagccatgaaatattacgagaaaatcatcggacaaaagccgcaggcaatcgattacatgaatgccgggcacgttgcatgggtgatgggagatatccaaaaagcggtcactttctatgaaaaggcaattatagcctgtgaaagccgtgaacatttcctggaaatgttccataaagatgaagaagctcttctcaaacaaggtgtccgagaagaagacattcctttaatgttggatttattataactttttcaactccccgtacagcttttgtatggggagtcccattatattatagaagctaccggaaatagatttcactccgatatatccaatccattcctgtacaccgtatgctcccgccttatccataggttggtaacgatcgacataatactgtatttcatcgtcagacaagacatcgaacaggacatcggaagatgcggtaaaacttttctgccattcagtggtagtcaggcaaacaccggtgaaaacctgatgtgatttccccgaaagtgcacggagcatttcaacagccccttctctcccttccggtttgcccaaaacctgaccatccaaccagacaatggtatcagcagtcactaataattctcccgatttcatcattgcacgataggcgtccgccttttcacgggctatgaattcgggtatctccgctccagccaatgtatccggataggattcatccacatcgggtaaagtccttaccacataatctactcccaaacccgacattagctctttccgacgaggcgagttggaagctaatatgatctgatatttctttaaattatcaagcattactttatcaattacgaattagttattctgtttgttcttttttgtgtactaccaaccaaaagcatcctgtgccatccacagcccatgagctttcagcacttgctccaccacatcacgtccgcagccatgaccgccgtcagcataagagatgtactttgctacggattttacttctggaacagcatctttcgggcagcagggaagaccgcattcacgcatcacttctatatcgggcacatcatcccccatatataatatttcatcgtcagacaatccgtatttatcacggaacgcatgataatcatgtatctttacggcagagcccatatacaaatccttcactcccaagccttcaaagcggatacgtacggcttctgtccgccctccggtaatgatagcgatatgaagccctttctttacggcaagttggatagcataaccatccttaatattcacagtacgcatcggttcaccggagggatgcaggggaactgtggtcgaactcaagactccgtcaacatcgaaagctaaagccttgatacgggataaatcatagttgatggtgctcatggatacttttactcattagtttatatatttcctgcaatgccggagaatctaccaacatagcaagatgattacttatcacattttcatcataacgcactgccggtccggtttgtgcctcatgaggtgtcaattcgtgtactttacgcgcagtctcatcaatcaacggaagcataacatcaaaaggcagattatacttttcaagcaaatccgccgctaaggcatacatatgatttgtaaaattacagataaagacagcagccaaatgaagactcttacgctgttcggaagttatctcgtacacattatccgaaagagtcgcagctatcgctttcagaagttccacatcttccggtcttttcgcctcaacaaagaagggtatttcccggaaattaacttcacgttgcttactgaaagtctgcatggggtaaaacactccataacgttccgcatatttctcccaaacactcatcgggatactgcccgccgtatgtaccaacagcgcatcttgctttccttccgttatctgaggcaataattcaacaaaagccgcatctttcagagatacaatatataatcgggcttcttttgatatttcctgtaaatccgtcgtatatccggcttctacctgttcggctaaagcacgggcagattcttccgtccgactatacacttgcacgatacgaaaacctttgtaataaagcgcctttgccagattagtggccaaattcccggcaccgataaatataatcggggtatcttctatacttctattcattacttctttaccgttttgcaaaccagaataaaatgattccgataatgagcagagtcaatggcagcagatacccggataacgaacccagcaatgacataaccaagccgatattcatcactagccaaagaccaagtaacacaaaaccaattgatttatcgcgtttgaaaataagaaaacagatcgaagcatacaataacatattgtctttattcatcacccaaggcaacccgagggtggagaaatgaatcagtttatcaatcagataaagtgctccaataacgataaaggtaacagcagtagccaaataagtatctttgctgttactcgctttagcagctcccatatttattttcctccgaatttattaatatgaattttctcccattgaagatgttcttcgttgaaaggtttacgttccatccctttatgtccgatagcaataacggaaagaatttgaagttgcagaggaatacccaggattccatgaacaaattcatcggaaggcattccggtagcagtgaaacgttcgcgaacctgcacccagcagcttcccaagccgagatcttccgcctgtaactgtatcataatggaggcaatcgcagcatcttcaatccaaacatcactcgccaacggatcagccattacaacaatcgccaaagcggcgtcagcaataaaggaagaggcctgctcctt

SEQ ID NO: 11886 - DNA, 8797 bp, Unknown
  gut microbiota DNA sequence
taaacatcctactgttaggaatgttttcaatttcatggtattaataactttttagttttgtcgtgataccttgtacttcttatttgggagaaataaagatattgtttccgacaattttataattaataggtatggagttctgcaatgatttcaatacggattcgatgttggatttccttttcagtacaccggagtaagttttatccggttgtatatcgggagacagtataatctttacatcatagaaacgttccaatgttctggttattgcaaatatatccgctttttggaatggaatcaggttgttatgccatactgcatctaacttggcatctacttgtttcacggtcagccgtccgttacttttgttcagttccgcacgctgtccgggagtaaggatgatttgtccttcttctttgttgcctttcacttcgatttcaccttcaatcaaggtggcttcggctatccggcaacgtttgtcgcatttgaaattgaatgttgtccccaatacacgtacgcacatggcgtcactttgtactgtgaatggcttgtggcggtttttggttacttcgaagtaagcttctccttccaaatgcacattacgctcgttttcggaaaactcacgcgggtattttaaggtagccgagttgtttagccagactttagtaccatccggcaggacaacttccttcacaataccttcaccggcaactgcaaccatcatttgctggtcggatccattatgagaccaatatccgattccaccgctgatggcgaatattatagcaatgactgctgcatatttcatccaacgatgtatgcgcagtattttattccgtttcccttgctcttcgtccaatttcttataaagctgtttttctgcacgaagtatccgttgtccatcggtatatcggccgaatttacctaaatgataaatttcttccatacgaaataaccggagggcattttcttccgattccttcatccaagcgttcacttcgataagttcctcttcggaacattgtcctgtcagatatctgttgattatatcttcacttagattactcattttcttttccttcatattaataatacaattcaggacataaaaacacttatcagtcttctcataaaaataagaaaagaattatccaaagcggatcgaggcggctgcgcaagtacttcaaggccttgtacatatgagcctctaccgtgcggagtgaaataccgagaacatcggctatctccttgtttttcatttcgtgcagatagcttagcttgaaaacttccttgcacttgtccggcaattcattaatggcgttgtagatctctttacggagttctctgtcttcaattcgccggattacttcattgttgtccggctgatagaattctgcacgtctttggttgatttcttccatagcagcacagtagccgtcttccacattgcgatgtttcaacacgttgagggcacgggtgtagacggcacggtagagaaaagcctgtatctggtcgcctatctctatgctgtctttccgtctccatagctccacaaagacatcctgtaccacatcttccgcctcctcttcccctatcaggcgggtggcgtagaagatgaggctggggtagtacttgcggaataatgctttgtaggttacatcgaagttttcattcattctctcaatagatattagttcagatatacttaaggccgtttttcttcgaatatgactccgattgtttttggggtactgcccatctcgaattctacggtggctccactcatgatttgttcatgggtgatatacgttttgtcgtaggggtgtccgtttactttggttgactgtatatagatattcttcttgtttacattaggagccagtacggtaaatgttttaccgtttgtcagatgcaactgcatttccgggaagagcggggttcctatttcgtacttgccgctgaccggatttaccggatagaagcccattgcgctgaatacataccatgccgacatttgcccgcaatcttcgttgccgcaaagaccggcaggctcgttcttataaagttcgttcattacttttgccacgtaatattgagtccgttcattgaagcctattgagttgaaaaggtagataacatgatggctcggttcgtttccatgtgcgtattgaccgatcattcccgtactgaacagtggaagttcggcgtctgctgctggatgataggtgaacatactatccagtttctcggcaaatctgtttttgccgcctacaaggtctatcaatccgtcgatatcgtgctgtactgaccaaaaatactgccatccgttgctttcgcagatgtgtggagtatagtcgtcggctttgaaacctttgataaagcgccccttgtcatcgcgcggttgcatgaaagaggtttccgggttataaagatttctatagttccgggaacgtttgtagaatgtgtccgcaatgtcttgtttgcccatcttcttagccatttcggcaatacagtaatcatcgaaggcatattccaaggttttagataatgaccagttctcagcgttgtaatggtctgtcacgttgtagggaatatatcctaattctttgtaaagcccgataccgcgataactgtccagattagcggtcgcaacacaagcgttcaatgctttctccgcatcaaaatcaccgatacctttcagataggcgtctgcgatgacaggaacggcatgatagccgatcatcatgtctgtttcacttccgtagaagttccataccggcaaccggttattttgctcgtagaaggcaatgaaagattttatcatgtcgttgacgcgctccggctctgtgtaagtgaagagaggatgggctgcacgataggtatcccacagggagaaagtgctgtagttcacccagccgtctgcctggtgcactttcttatcaggaccgtagtaagcgccgtccacatcattgtagatggtcggggcaatcatcgaatgatagagagcggtgtagaagtttactttgtcgtcttcgttactgccttttacttcgattttaccaagttggcggttccaattcgctttcgtttcagccaggtatttatcgaagtcgttttcggggacttccgcttgcaggtttttggctgcaccgtccatgcttgtgccggaaatggcagtgttgacgagaatttgctcaccttctttggtattgaagtcgaagcgggcgatgacggctgtaccgatacgtttgttgtctttgataatagccgtagtgtccagttccattttctcgaaaggcttggagaaacgggtgcggaaatagatgtgctggtcgcgtgcccagccatcagagaagcggtagccttgaatggtaacggagtctaccttttcgatataagaatcattagtgaagtcccaattcatagcctttttcaaatttaggaagatggcggattgggcttcgggaaaggtgtaacgttggataccgcaacgttcggttgcagtcagttcgacgttgatattgtagtctttcaatcgtacttgataataacctgcgtaggcactctcatcttcatgagaaaatttggaatgaatgcctagaggcgcttccgcttctttataaggaagggtgacaggcatgaaagagatgtcgtacagatctcctgctccggtaccggaaaggtgggtgtggctgaatccggcaatggtactgtccggatagaaataaccggagatgcggtcccaaccgggaagtccgttgtcagggctgagctgcaccatgccgaaaggagcttgagcaccgggatacgtgtttccggtgaagtcggttccgatgaacggatttacgtacaatgtgtaatctgtttcgtgtttttcttgcgtaggggtacaggaaaccagcatgcaggttaacagcaagcatagataaataggcgttctcattgctctttaggtattagtgattacttattttatttatttgaaggataagaaaataattaatctgttggcaaagatagaaaatcttttctagatgtcttataacaatgaatttattttgtcggtttctctcggttcttatctttagcttttttatttagcggttgaatagttcttaaatattcctgttcgacaggtgacagtgtgcgtacttcgaatttgtggtattcttgggtcgctttatccatcgcttgattatggctgacattacctgctccttgcattcgaacctgtcggaatttccgacaggttgatatttcatctgattctctttcttcataaatatgtttgatgtgttccaccacattggttctcgggttcttgaagtttgataaagatcggatagttgctgttaggaaagccacacggtctcctcttccattcttacttctatacgagtttgcccgtcttcggtttggtatatgattatgttacttttattcggttccatatatgttttttgtcatgtgattatgataataagacactatcctcaaacaataaagagaaacttgttgtcccccaagtttctctttattataaactagactttcagttttctattttagattcctgccagctctatcactttttcaactgctgccggtagtccgtcggcattcttacctccggcggtagcaaagtgcggttgaccaccgccgccaccttgaatcagcttggcggcctctttcaccaagttgcctgccttcaggccggttgctacgaggttgtcgctcaacatgactgtcaacatcggtttgccattgtccgtgcttccggctacgaagaacaagttttccgtaatttcaccgcgaagttggaaagcaatgttcttcaccacttctgcaggcagtggagcgcaaagcttaataaccttgacaccgtttacttcctgtatatttttcaacagtctttctttcaaggctgcttctttttctttcatgaagtcttccacctgcttcttcaaacctgcgttttcgtcaatgtatttacggatagcgatacccagatccggagtattgttgaagagagctttcaagtcattgagggtgtcttgaatagtgtccagcatttcttctacccgtgctcctgtgtaagcctcgatacggcggacaccggcagcaacggaactttcggagatgattttcaccataccaatgtttcctgtagcagctacgtgtgtacctccacagaattcgatggaagatccaaactgtatcacacgcactctgtcgccgtacttctcgccgaagagagcgatagcacccagctctttcgcttcttcgataggaatattgcggtattccttcaaaggaatgttggcacgtatcttggcgttgacaatgtgctctactttgcggatttcttcatcggtcactttctggaaatgagagaagtcgaaacgtaaggaatccggtgtaaccaacgaacctttctgttctacgtgttcacccaaaacttcacggagagcggagtccagtaagtgagtggccgagtgattggctgcgcaggcagcgcgtttgtcggtgtctacacaggccatcatcggagcttccggatgttcgggtaactttttggtaatatgtatcggaaggttgttttctttcttggtgtcgatcacttcaattgtttcgaactcgcttaccaacacaccggtatcacccacttgaccaccgctttccgcatagaacggagtatagtctagtacaatctgatacaaggtctggtttttttgcctgatctggcgatagcgaagaattgaagcttcgtattccgtatagtcgtaaccgacgaattcggtcgtcccttctttcagcgtgatccagtcaccggtttcgattgcggcagcgttacgggcacgttgcttctgctgttgcatctcttcgttgaactcttcgatgttgacgatcataccgttttcacggagaatcagttctgtcaagtcgagcgggaacccgaaagtatcatataaggtaaaggcgtctttaccgctgatttctgtttttccggcagctttggtatcttccattgttttatccaacagacggatgcctgtctccaatgtgcggaggaatgattcttcttcttctttgattaccttttcaatcaatgtcttttgtgcaatcagttccggataagcctcacccatattctcaatcagcacaggaagcaacttgtacatgaatgcttgcttctgtccgaggaatgtatagccataacggacggcacggcggaggatacgacggatcacataacctgctttagcgttggaaggcaactgaccgtccgtgatagagaacgcaatggtacggatgtggtcggcaatcacacgcatggcgatatcttgctgcttgtcttttccgtattcagtgtccgacatggctgcaatcgctttcagcattggctggaatacgtccgtatcataattggacgttttgccttggagtgccatacaaagacgctcgaatcccataccggtgtcgatcacttttgcgggaagcggctcgagactgctgtccgccttacggttgtactgcatgaatacgagattccagatttcgattacttgcggatgatcgtggtttacgaggtcacggccggaaatcttggcacgttcttctgccggacgaaggtcgatgtggatttcggaacaagggccgcaaggtcctgtatcacccatttcccagaagttatcgtgcttgttgccgttgatgatatggtctttcggcaggaattgttcccaataagaagcggcttcgtcgtcacggctcaatccttcttcgggacttccttcgaatacggttgcgtagagatgttccggattcagtttcaagacatctaccagatattcccatgcccaactgatggcttctttcttgaagtaatcgccgaacgaccagttgccgagcatttcgaacatggtatgatggtaagtatcgtgtcctacctcctccaagtcattgtgctttccgcttacgcgcaaacatttctgagagtccgcgactcttttgtatttcgccgggtggttgcccaaaataatatctttaaactggttcatacccgcattggtaaacatcagggtagggtcgtctttaatcaccattggagccgacggaacgatgtggtgtcctttcgactcaaagaaattcttgaatgaatctctgatctcttttgcagtcaacatataatgaagaattatgagttatgaattatgaactatgtggctgtgggatatgagagaagggaggaatctccaataaatcataaatcacagctcataaattcgtaaaaacagtgcaaagatagctcgtttttattacttttgccgtattaacaagcgaaatattttcaaaaagatgcgcaaagtttactatatctataatccacagacgcagacatacgatcgaatttaccccaccgtacggcagcgtgcgcttagtattttgcgtcggcttttctatggtatggggttgggagcgggctgttttatcgtgttgcttcttatcttcggctctccatcggagaaggaattaagaattgaaaacagccgtcttttggcacaatataatgtactttcccgtcgtttggacgatgctatgggggtacttcaggatattcagcagcgtgatgataacctctatcgggtaatcctgcagtccgatcccgtttctcccgccatccgtcaggccggttacggaggtacgaaccgttatgaggaactgatggacttagcgaatgcgaaactggtggtgaatactactcagaagttggatgttctatctaaacggctctatatccaatcgaaatctttcgatgacgtggtggatatgtgcaagaatcatgatgaaatgttgaaatgtattcctgccattcagcctatttccaatagggaccttcgtcagacggcttccggttatggtacacgtattgatcctatttacggtacgacgaagttccatgcgggaatggacttttccgctcatccgggaacggatgtgtatgctaccggagacggaactgtggtaaaggtaggatgggaaaccggatatggcaataccattgagattgatcatggctttggatatctcactcgatatgctcacttgcaggggtttaatacgaaagtcggaaagaaagtggtgcgtggagaggtgattggaaaagtgggtagtacgggaaagagtaccgggccgcatctccattatgaagtgcacgtgaagggacaggtggtgaatccggtgaattattatttcatggatttaagtgctgaggattacgaaaagatgattcagttggctgccaaccacggtaaggtattcgattaattctaaaaaaagacaggggtattatgcttaatacggataaagaactgaaactatattattccataggagaagttgccgatatgttcggagtcaatacttctctgctccgtttttgggaaaaggagtttccgcagatttcccccaagactgccggtagaggaatacgccaatatcgtaaagaagatgtggaaacaatcgggctcatctatcatctggtgaaagagaaaggcatgacgcttccgggcgctcgccaacgtttgaaagataataaagaagctactgtccggaattatgaaatcatgaatcggttgaaggcgattaaagaagagcttctggctattaaaggagaattagatggtcgcaagtaaagacggcatggtataagaataataagaattaaacgcagggatattcagtaaatgttcctctttctaaaaaatcaagagaaaagctcacgtaaagcaaagctttt

SEQ ID NO: 11887 - DNA, 1554 bp, Unknown
  gut microbiota DNA sequence
gtacacataaaggagaacaggtgcacgcccgcatctcctcctcttttatcagcttcgaacaggccgccacaaacatgaaagagctgagcaaagacaatatagaacaactagccaagaaagggaaagatgcctggaatcaagttttgggcaagatagaagtagaaggaggaaatctcgatcaatatcgtacgttttattcatgtctgtatcgttccttactttttccacgtaaattctacgaactggatgctaccgggaaacctattcactacagcccctacaacggacaagtattacccggttatatgtataccgacacaggattttgggatacattccgttgcctgttcccattattgaacctgatgtatccttccatcaacaaggaaatgcaggaaggacttatcaatacgtacaaagaaagcggcttctttcccgaatgggcaagtcccggacacagaggatgtatggttggcaacaattccgcctccgtcctagtagatgcctatatgaaaggagtcagagtagacgacataaaaactttgtatgaaggcttgcttcacggaacagagaatgtgcatcctcaagtttcttcaacaggtcgcttaggacacgaatactacaacaaactgggttacgttccatatgacgtaaaaatcaacgagaacgctgcccgcactttggaatacgcttacaatgattggtgtatttataaactagccaaagagttgaaacgtccccaaaaagaaatcaaccgctttgccaagcgtgccatgaactataagaaccttttcgataaagagtctaaattaatgcacggacgtaatgcagacggtacattccaatctccgttctctccgctgaaatggggtgacgcctttacggagggcaatagctggcactatacttggtctgtattccacgatcctcaaggacttatcgacctgatgggcggaaaagatgaatttattaccatgatggactccgtattcgccgtacctcccgttttcgatgaaagctactacgggcaagtgattcacgaaatccgtgaaatgaccgttatgaatatggggaactatgcacatggcaaccagcctatccagcacatgatatatttgtacgactatgcaggtcagccctggaaagctcaatactggctacgtcaggttatggacaggatgtacactccgacaccggacggctattgtggtgatgaagacaacgggcagacttccgcctggtatgtattttcggcattaggcttctaccctgtttgtccgggaacggacgaatatatcataggtgctccgctgttcaagaaagccacacttcattttgagaacggcaacagtctggtcattgacgctccaaacaacaacaaaaagaatttctatatcaactccatgagtttcaacggaaccgattataccaagaattatctttgtcatggagatttattcaaaggtggcactatcaaagtagatatgagcaaccaaccgaacaagaacagaggaacgaaagaagaggatatgccttattctttttctaaagaat

SEQ ID NO: 11888 - DNA, 482 bp, Unknown
  gut microbiota DNA sequence
tacaggactttcgcaccaacgatgataggagaagagcgacatgaaaggaactcgtaacccgtaactccatttgttgactaggatgcgttcaccttggaaaatggagttttccataccggtggaaggtataaggtaggatgtaaaagcaaatccccggagcagaagcactacgactactgctccggcaaatgctagtgtccatttgaatttacgaatgttcatcaatatttatcaccttatcacgctattctatccgtacacttatcatcctacccacttgaagagtcggttccaacggatcttaccatcaaaccatccgcggtctttatcgagcgacagccatacgacgatcggtttgcctactacgtggtcttcgggcacgaatccccaataacgggaatcggcggaattatgacggttgtcacccatcatccaataatagtccatcttgaaggtatattgatcggtcttttcaccgttga

SEQ ID NO: 11889 - DNA, 10826 bp, Unknown
  gut microbiota DNA sequence
atcaatacccccataccgattttgtgcacacctgcctgtcccatacggtcgaagccattgacacgccattcaaatttggacttcatgcctctcggatggtacgtcttgtaatttgctttgttgtaagtctcctgaaagcagattactccgttcaggccatgattggtcagctccttgtattcttctgctttaagcggcattacctcaatctggagattgctgaaataaggtttggctaagtccaaagcgcgggcgatataaggaacacccgctgctgcgggattctcgccggtcactagcaagagattctcgaaaggagccagacgtttgatagccttgtactcgttgataatctcttcctctgtcagaatggttcttttcatcggattactgatatggaaaccgcaatacacacaagagttggtgcaagaattagtcagatagagcggaacaaacatagagatggtcttgccgaaccgttccaatgtatatttctggctgaggcgtgccatcacttccaggtaaggagcggcggccggagaaatcaatgccataaaatcattgacgtccagatgctctttcttacccaatgcacgtcgtacgtctgcatctgttttggaatagatggcttttgtcgtctcttcccaagatattttttctaattcgtctgaaaacataatttttagtgattagtttttgttcttctttaaatcacgtgacaatcgcatcgcgcagaaattaggtccgcacatcgtacagtattctccgtcgatatgatgtcctgcacggaagtagctttgtgcacgttccgggtcaagtgataaatcaaactggtctttccaacggaactcataccgggctttgctcaatgcattatcacgtacctgtgctcccggatgtcctttggcgaggtcggcggcatgggcggcaatcttataagtgatgactcccacacgtacgtcttctttgtccggcagggcaagatgttccttaggagtgacatagcaaagcattgccgttcccaaccatccgatttgtgccgcaccgatggcggaagtgatatgatcatatcccggagcaatatccgttaccagagggccgagtgtatagaacggcgcatcgtggcatttctcaatctggcgttccatattttctttgatcttgtgcatcggaacgtgtccggggccttcgatgaatgcttgcacattcttatcccatgcgcgtaacactaattctcccattgtatccaattctgcaaactgcgcttcgtcattggcatcgtagatagaacccggacgaagtccgtcgcccaaagatactgccacatcatactgtgccagaatatcgcagatgtcgtcaaagtgttcatataagaaactttcccggtcgtgcaccagacaccatttgctcatgatacttcctccgcgactgacaataccgcacaaccgcttgtcggcaagatggacattgtgccgacggatacctgcatggatggtaaagtaatccactccttgttcgcattgttcaatcaaagtatcccggtaaatttcccaagtcaggtcttccaccacaccgtttactttctcaagagcctgatagatagggactgtgccgacgggtacggggcagttgcggataatccattcacgtgtctcatgaatgttttctccggtagagagatccatcaacgtatcgcctccccatttgcaactccataatgctttttctacctcttcgtcaatgctcgaagtagtagccgagtttccgatattcgtattgatttttaccagaaagttacgtccgataatcatcggttcggcttccggatgattaatgttggcgggcagtacggcacgtccttccgcaatctcctggcggacaaattcgggagtgatataagtcttgattcctaactcttcgcaattcatattttcacggatggccacatactccatctctggggtgataattccctttttggcgtatgccatttgagtaatagcctctcctttttttgcccgataaggcagagcgatatgctcaaaacgcaggtggtcgaggcttttgtcgttccgtctcatttgtccgtattcggaagtgatttcgggtagttgctccacatcaccacgaccgacaatccattcttcacgcattcggggcaagccttttttgagatcaatactcatttccgtatcactgaacggtccgctggtgtcatacatatatacttccggattgggagttacaatcttttcttcgcctttaaaactgacactgggcacttgttccactttccgcatggcaacgcggatattcggataaagttttccgggcaaatatactttctgagagcggggaaattttattttttgttccataattgttcttttagcagtcggctacttattcatattatttatctaaaaaagcagtcagcggtgagctggcttcggctataaagttgtccgcttgcagtcctaatcccgcttcgtatgcctgtcttccggcttcggtggcagctttgaaagccttcgccatttctaccgggtttccggcaacggcaattgctgtatttaccagtaccgcggaagctcccagttccattgcttcagcggcatggcttggcgcaccgatacctgcatcaacgacaacagggatacctgcctgctcgataataatctgtaggaattctttggtctgcaatcctttatttgtgccgatcggagcgccgagaggcataacggtagctgctccggcttcttccaatcgtttacaaagcacggggtctgcctgacaataaggcaatacgacgaaacctagtttcaccaactcttccgtagctttcagtgtctcgatagagtcggggagcaggtagcggggatcggggtgaatctctagtttcagccaattcgttccgaacgcttcacgcgccatttgtgcggcaaacacagcctcttccgcatcgcgtacaccggaagtgttgggtaataactggatattcggatggataatatgtttcagcatatcgtcctctttgttgtccatgtcaatacgtttcatggcaaccgttaccatttctgtgcccgaagccaaaatagattgctccattatttcattggagttgaattttcctgttcccaagaaaaggcgtgagctgaattcacgtcctgcaattactaacttttccatgtcttttggaatttagaattatagatgttgatttatgaattacttagaatcttccgtgtttcctctaccggattttccgcccggagaatcgttccggacaaggcgatgccattgactcctgtgcggaggatatcggggatatcttcgttggtgattcctccgatagctactaccggaaggttgatatttgcttctttcatttgtgaaaggatggaagcgtaaccttccagaccgagtaggggacttaaattctttttagtggtggtgaagcggaagggaccgatccccaagtaatcggctccggcgcggtaatgttgtacgacatcctcgaaggtattggccgtgccaccgatgataaaagcttctccgagtatctgtcgtgcctggtcgatgggcatatccttctttcccagatgtacaccgtccacttccagtttcttgactaattcgacatgatcatcgagaactaagatagcttcgtgttccttacagagtggcttcagttgcagcgccacttgttccacctcctcaagaggagcttctttcatgcgtagttggatccatttgcaccctccttcgagtgccatacgtgccgattcgaaatatgaataccgttcggtctgatgtgtgataaattgcagactaatcattttcttatcctccgcaagctgccttgataattaccagattgtcattctcatgcaatacgaaacgttcccattcggtacggggaatcattttgttgtttaccgcgatagcaatgccttgaacgggaagttcgagttgcgtcgtcagctgtgtaagggtagagttgggaataagttccacctctttgttgttcacttgtactttcattgtcctatcagaataaataagttgaaagtaaatacaaagagcgtgcttttacggaaaggcgataagaagaaacacaatccctacgtcagtgctaactgcatcaggttcttagggtataatctcagcccctcatggggcacccctttgtctttacgggagcaaagtaagtgaaaaagaaacataaaaacactacatcggttgattttttttcatttttctgtcggatatttgtgttggtggcatctatatagcctaaacaaggtcgctgtgaaaatcacaacgaccttgttcaagtatagtttagtcagtaaatccgttacattctgttttccaccacatcccagtcgatgatactccacagggcattgacatggtcggcgcgacggttctggtaatccaagtagtaagagtgttcccacacgtcaaaaccgagaagcggtttcaatccggcacgtacagggttactgccgtttccttctttggtgatgtgcagttttccgtttttatcaacggacaaccaggcccatcctgaaccgaataatcctaccgctgccgcattgaattctttcttgaagttttcaaagctgccgaagtcacgcttgatggcttctcccagtttgcctgtcggttctttcttggcaggtttgggggcaaattgcaggaaatatagattgtggttcaatacttgtccggcgttattgaatatagctccgtccggtgcggtggcaacgatttcttccacctttttaccttcatattcggttccgggcacgaggctgttcagattatttacatacgtttgtagatgtttcccgtaatggaaatctatcgtttgctgactgattacaggttccaacgcattgtttgcgtaaggaagtttaggcatttcgtaagtcatggtcatcataattaaagacattaatatagtattcataatgttacaagttttaaatggcttgttatactataataacagaagcatttggtaaaaggttcgcagtatcttcacttttatttataaatatactgtacccgttccacctcttggggatttccgcgatttgtacggcagacccattgccctgtattatcatattcataataagaatttccgtcaatcggattgccatatttatcatacatacaagtcaggtaaccggatgttttctggttattgcctaaaatacgctgataagctatctgagttaaataaccgtatttgtcatattcataagtatctttttgggagataacctgatcggcggggttagccataagcaggttctgatgttgcgatgcggtcaatctgcctttttcatcgtacttgttcgctgtgtatgcttggagttctccgttcttattatattctttggcttcagtcaataagccttgtttattgtatgtgctgataatcgaccttccgtccatatatttaagtgaatcgctctcgatgctcccgtcggcaccgatacggcgtgtccttcggtaaatgtccgttttggtcttgggatttgtctgcacttcaaaaatgcagtggccttgagggtcatacagtctgtttgtttgcacctcctcactcacctgaccgtttttcatagtcagggataatatagagacaagctgccccttgtcattgtacgaataagtgattgacacattcccagtgctgtcgttggcggcagacttgatcagtcgtcccgcattgtaatattttacggaagtgggagtggagatgattgtctgtagaatgaatggagctcgtagcgcattggcttgatcacggaactctttgtacttatgtgtactgaggaatgcctgcaacaaacccaaagattcggaattggttattgccggtttcaaaagttcaaaatcagctttctcgctaagatattcgaggtcgtccagatgggtacgtgctgaggaactcagataagggttgcgtttataatcgtcaataacctgccggagggcggttgcattgtttccctctcgcagactgtcgatacaatggaatagaaaatcatcatataaagcttggacttctggcaaaaacgggcgcgtttctttgtccgtgaaaaactttagcattgccggatcgtcaaaaaaagctttgaaattttcctgtgacgggttatgctttacaatcccgtataaccgtttgttttcggcagcattgatttgtgggataaatttcccgttcggatattccgctatatatgtctgatatgtgctgagtgcaggcgctgtcagcataccttccaataaagccaattcgcggatattccgtatcttctgtgcaataacggagtctgccgtatagccgcttgaacgaatactgtccagcagtgtacggctgaaaggtatctgttctttcgaagcctccaatatgtggataatagcctgttccgctctgtcctgtacgttcggaagcggtattttctcttcctcacagatgttggagaagtaggcgttggccgctttcccgtaacatccgaaataatcggttgcggcttgttcactttgttcgttccacaacccgttgaggacatccagcagggccagttcttcggcataatatgccttcgtgtcgttgtctaccttttctcggttcttctgccatttttccgtatcattatcgttcagataccttagcagtttttccatacggctttgtttttgcgccatagcctgtggaatgcaggcgactaggcttaaactcaaaataattgataacaatatactttttttcattgctttgggggttaggttaaaatagttagtgacgaaaaattataaaaataccgtcattctcaaatgaatattatacttttgtattcagaacaaatttgaatgccgagagtttgttaaaaaactacattgtttttataatgctgttatggatatcaattatataaaggaattgaatgagagtcagtgtgcggcggtgacttacaatgacgggccttcgctagtgatagccggtgcgggttcgggtaagacacgtgtgctgacttataaaatagcctatctgttggagaacggttacaatccgtggaatattcttgcacttacctttaccaataaggcggcacgtgagatgaaagaacgtattgcccgacaagtgggggcggaacgggcacgttacttgtggatgggtacatttcattccatcttctcccgtattcttcgtgctgaggcgcaatatatcggctttacctcccagtttacaatctacgacacggctgatagtaaaagtctgcttcgttctattattaaagaaatgggactggacgaaaagacttataaaccgggaacggtacaagcccgcatctccaatgcaaagaatcatttggtcactcctacgggatacgctgccaataaagaagcatatgaaggcgatatggctgtaaaaatgcctgctattcgtgatatctatacccgttattgggaaaggtgtcgtcaggcgggagctatggattttgatgatctgctggtatatacttatatcttatttcgtgattatccggaaatattggcacgttatcaagaccaattccgatatatactcgttgatgagtatcaagatactaattatgcgcaacatagcattgttctgcaattggcgaaagaaaatcagcatgtttgtgttgttggcgatgatgcacaaagcatttactcttttcgtggagcggatattgataatatcctttactttacgaagacatatccgaatacgaaagttttcaagttggagcagaactatcgttccacacagaccattgtttgtgctgccaacagcttgatagaaaagaatgagcgccagatacgtaaagccgtattttccgaaaaggagaaaggggaagctatcggtgtatttcaggcatatagtgatgtggaagaaggggatatcgttgctaataaggtagctgaacttcgtcgggaatatcattacgggtatgctgattttgctatcctatatcgtacgaatgcacaaagtcgtatttttgaggaagctcttcggaaacggagtatgccttataaaatttatggcggactttcattctaccaacgtaaagagataaaagatgtgattgcttatttccgtttggtggtgaatccgaacgatgaagaagcattcaaacgaattattaattatcctgctcgtggtatcggagatactacggtcggtaaaatcatatcagcggcaactgatcatggagtcagtctgtggtcaacgctttgtgaaccgttgacctatggactgaacatcaacaaaggtactcatgcaaagctgcaaggttttcgtgcattgatcgagggttttataaccggtcaggcggataagaatgcgtacgagataggtgtggatattatccgtcaatcgggtattatgaacgatgtgtgtcaggatacttctccggagaacctgagccgtaaggaaaacatagaagaattggtgaatggaatgaatgatttctgtgctttgcggcaggaggaaggcaatccgaatatatctcttaccgattttctttcagagattgcgttgctcaccgatcaggattccgacaaagcggatgacggagaaaagataacattgatgacagttcattccgccaaagggttggaatttaagaatgtttttgtagtcggtctggaagaaaacctattcccaagtgggatggttggcgattctccccgtgcattggaggaagaacgccgtttgttctatgtcgccattacccgtgcagaggaacattgctacttgtcttttgccaaaacccgcttccgttatggaaagatggagcttgggagtcccagtcgtttcttgcgtgatattgatatccattatttgaagatgccacacgaagcgggaatcagtcgttcggtggatgaaggcgcaggacgtttccgcagggagattgaaggaggattcactcattctgcttctccatcgcgtactacaccttttggaagtgcttcttcggaacgaaaggagcgaccgaaagctcagataatagctcccagtgtgccgagaaatttgaaaaaggtaagcacggtaagtggcggttctcaagcgatgtcttccggtccggtgtcggttgcaggattacaagccggacagagaattgaacatgaacgttttggtttgggagaagtgatgaaggtagaaggcacgggagacaatgcaaaagcaactattcattttaaaaatgcgggagagaaacaactattattgcgtttcgctcgttttaaggtaatagaataaaaatattaaaatagaaaggctcatgaagaaacaactaacagtatttttgctttccgttttacttttgagcggatgtgcatcagggcgtatgggtaatccgggagctatcgtggccggtgcttctatcggaggtagtttgggaggttcgataggtggattgattggagataataatcgaggttggcgaggtggttatcgtggctctgctattggcaatattgtagggactattgccggtgcggcgataggcagtgcgttgaccgcaccgcgacaagagccgatagaggatgacgcatacgttcccgaagttcgtgaggttcgtgtgcagaaatataagaaacagccggttcggcagcctgtttctcaattgaaactacgtagaatccgttttatagatgataatcgcagtcatgtgattgatgcgggagagaacagtaagattatctttgagattatgaatgaagaccggaagcctgtttataacgtagttccggtggtggaaaccgtaggcaaggtgaagcatatcggcatttctccttcggtaatggtcgaagaaattttgccgggcgaaggcattcgttatacggcttccatacatgccggtaatagattgaaagacggcgaagtaacgttccgtgtagcagtggcagatgaaaatggggtgatctgcgactcgcaggagtttactctgcctacacagcgttgaaattagaaataatagcccgaataatccggtttaaacatagtgacagtatatgcctggaatagcgtcactatcttaatagtatttgattgcaaagatataaaacttctcattataaacgaatatataatgctgaaattgctcattgtgaatgagtgaaaaatgataacacttctttcaactaatgcattaggtttatatgaaagagatatttagaagataccctatcgggatacagaatttcgaggatttgcgcaataataattgtgtgtatattgataaaacagcgttaatttatcaattgactcatactgataaagtttattttcttagccgtccccgccgttttggaaaaagtcttctaatctctactcttgaagcttatttttccggaaagaaagagttgttcgaaggattggctatggaacagttagagaaagaatggactgtttatcctgtgttgcatattgattttttagtgagctgaataacttacagaatatcagtatgagcgatgattatagtgctatttgtggtattacagagcaagagttgctaagtcagatgcaaccggatattgagaggatagctcaagcaaatgatgaaacctatgaagaagcttgtcggcatttgaaacggcagtatgacggttatcatttcagcaagaattgtgaagatatttacaatccgttcagccttttcaatgccttttcgcaaaaagattataagagcttttggttctctaccggtacatccactttgttgattgaaatgttacagcgaatggatttgaatgccattggtaggactgac

SEQ ID NO: 11890 - DNA, 1472 bp, Unknown
  gut microbiota DNA sequence
agagcattcctttcaaagtggaaagtgactggagcgcagcttcctattggtatcagattgccgccttatctcccaaagcagaaattgaattattggggttgtttcctaacagttatcagggagatagccggggagcagaagttttctcacgcttaggtataactaccgaatttacatcgcaaggtgtgaaactgaaaaaaacaggcaaagcgctggaaagactggaagaagactttgtcgacattccggatttggcacaaacgtttgtcgttacttgcgtcttgctgaatattcctttccgtttcacaggattacaaagtctgaaaataaaagaaactgatcgtattgccgcattgcgcaccgagcttaaaaagctgggatatgttattgaagaagaaaatgacagcatattaatgtggaatggcgaacgatgtgaaccggaggaaattccggtaattgacacttacgaagatcatcgtatggcaatggcatttgctccggcagttatctgtcatcctaatttgcttattgccgatccgcaggtggtcaccaaatcatatcccggatattggggggatttgaagcaggccggatttcaggtgataaacgaagggtaaccttcggacattatagtctgtcagcaggctaataaaggattataattaccccactggctgatcgatactatctaaataaaaacgagagcatatatgaatactgatttcataaacttaacagcagaaaatctttcttatgagcatttatgctgcattatccgtagcaagaaatcccatccgggcattgaagcaaaacagcaatggctttccgaccgactgaaggaaggtcatgtttttagaaagttaaatgcaaaagctacagtctttattgaatatgctcctctcgaaaaagcttgggttccgataatgggagataactattattacctctattgtttatgggttttaggtagtcccagaggaaacggatatggaagttcgttgatggagtactgtatagccgatgccaaagaaaaaggtagatccggcatttgtatgctcggggcaaaaaaacagaagagctggctttccgaccaatcatttgcaaagaaatttggttttgaggtggttgacactacggataacggatatgaattgcttgctctttcttttgacggaacagtaccgaagttcgcgccaaatgccaagaatcagaaaatagaaagtgaggaactgacgatttattatgatatgcaatgtccctatatctataaatacattgaaatgatcaaacaatattgtgaaacaaatgatgtccctgtttcttttattcaagtagatacgctacagaaagcaaaagagttaccgtgtgtttttaacaattttgctgtattttataaaggaagttttgagactgtgaatttaccaactatcgactatttaaaaagaatactcaaaaaataagaaatacaatcc

SEQ ID NO: 11891 - DNA, 7216 bp, Unknown
  gut microbiota DNA sequence
ggaaaggttgttgcttttgcttttccctttacagctctggaaagtcagggcaacggcggatagaaatagtaacatgagcggaagtgcactcatttctattattcttttatatttatcgttcataatcaaggtgataaaagtttagtttaacgtgaacttcgcggttttcacatcacggctgttcgtaccgatcatcacttcaaagtcgcccggttcggcaaccagttgcaagtcataattatagtatcgaagcatttccggagcaatcttgaaacggacaatcttcatttcacctggttgcaggaatatcttttggaaacctttcagctctttcacagggcgggtactgctgcctacgagatcacggatgtagagctgtaccacttctgtgccgggccatgtgccggtattggtaacttctactgctgcggtcagtgagccggtcatgtccattgatgaatgactcagatcaatgtcgctgtaagagaaggtggtgtaggacagtccgtagccgaatgggtaaagcggatcattgtccacatccagataattactgcggaacttctcaaaccatttgccttctttcaacgggcgtccggtattcttatgtgcgtaataaagaggaatctgtccgacattcttcgggaaagtcatagtgagtttaccacccggattgacataaccgaagagtgcgtcgccaatggcgtatgcagcttcactgcctccgaaccacacgttcagaatagcgggtacatgttcctgttcccaagtcaacgtaagcggacggccggtgaataataccagtaccacaggctttcctgtctttaacagttccttcaataagttctgttgtacatcggggatattcagatccgtacggctgctgctctcgccactcatttccgaagactctcctaaagcggcaatgattatgtccgaatggcgtgctacattgagcgcctcgtccaacagctgttggtctgtgcggccatcacggttcagcgaacggccgaacatcgttgcccgttcttcgtatgcggcgtcactgatcaggttgctccctttggcgtacatgatattcgcttttcctgctgtcatctctttcagaccttccaccaatgaaggagagcggtcgagtacggcagccacactccatgtgccgggcatattcgtccggctgttggcgagcggaccgattacggcaatattgcctttggggttgaaaggcaatagcggatttccgttagggttcctgtcggggctgtcgttctttaataagacaaagctttctgctgcaatcctgcgggcggcttcacggtgggctttggtaaatatgtcacgtgccggacgtttcgggtcacaatatttataaggattatcaaataatccaagtttatatttggcttccagaatacggcggcaggctgtattcagtgtctccatcgaaactttaccttcttgaacggattttttcagtgttcccacaaagccctcgcttaccatatccatatcgactccggcattgatggcacgtgccgatactgtctgaaggtcaccgattccgtggtcgatcatttcggaaatccccgtgtagtcggttacaacaaaaccgttgaagccccattgcccgcgcaaaatatcggtcatcagccatttattggcggtggcaggtattccgtctacttcgttaaatgacgccatcacactgcctacacctgcttcgacggcagcttcgtaaggcaacatatagtcgttgaacattcgctggcggctcatgtctacggtgttataatcacgaccggcttctcctgcgccatataaggcaaagtgtttcacgcaagccatgatttcatcgttccgttgcatattctttccttgataaccgcgtaccatcgcttcggcaatcatggctcccagaaacgggtcttcaccgctaccttcggatacacgtccccaacgagggtcgcgtgagacgtccaccatcggactaaacgtccatgaaatgccgtcggcactggcttctacagctgcaatacgggcggattcttcaatagcggacatatcccaagtgcaggataggccgagcgggatgggaaacatggtttcataaccatgaataacgtccatgccgaacaacaatgggatacccaagcgggaaccttccactgcctgtttctgtacatcgcgtattttctctactccttttaggttgaacagtcctcccacttcgccttttttgattttggcggcaatatcactgcttttggcttgaccggtggtaatctctccggtgacgggaagattcaactgcccaattttttcttccaaagtcattttgttcatcagtacgtcgatgaagcgatccatatcctgtggagacttttgtgccgatacagtcagaagacctgtggcaaacaataggatgagtaaacttaactttttgtatatcatgttattatatttatttatagataatccggattttgtaccaatactccttttgatttatcaatttccgtctgcggaagtggaagcaaggcgttcttatcctggtaatttaattttcctgccgcgtgcaacacatctttggcaatcccccaacggacaaggtcatagaaacggtcgaattccattcccagttccacacggcgttcgtgacggatggcctcgcgcaactctccttgatcggtagttgtcactttgggcagtatattggcattagaacctctggcacgtgcacgaacttgctccaggtagtcgatagcttctcccggaattcctttttcgttggctgattcggctcccatcaataatacatccgcataacggatcagacgaatgtttacccaaaagcccttattgctatattctttacgcaaagccgggtcagtgtatgctttcttgttgaagtaggcgcctatcgccggagaaacaggagattcgccgtaaggctcgttcgtattctccggagtgatggggtcgctgtccgaatggcggaaataaagcagagtggcattcttacgcggatcgcccggttcgtatgcctccgccatatgttcggttgccatgttccatccccagcctaaatcccactgatcggctccacgaacaccttgtacttcgcagaactggctaccgataatatcgctttgcggtagggccgcagtagcggtacattgcagttcgaatatggagccgctgttattttcaccttcgtctgtgaatatcttattgtacggggtgttcaggttataaaggcctttcttgattacgtcggtggaggcggtgtacatattgtcccaatcgttacgcatcatataggtacgcgcgtgtaaagaacgtgcagctccccaagtcagccgtcctgtataatcggaactccatgtttcaggcaatgactcttccgctgttttcaggtcgcggtctatttgctcgtatatcttatcagcggtcgttttcggaatattggcctccgaagcgtcgttgattttataagtcaccaaaggcacttcaccgaaggctcttactagattgaagtaacaataagcacggaagaaggaggcttctcctttattgatgatgtcttcgctttccgtctgtcccgttgtttccttttcggcgatagcgttgagaatgtcattacattgatagatgatggcgtaatttttgccccaataagcacctagctgaccattggaaggagtgtagatgaagtcgtcgtacatttcggccacatcggaaccgtcgctggcaagacttcctttctccgcatcttcggagcggaaactgtggatggcgaaggcgggtgtaccggaggttacgtcgaagctacgcatcatggtgtatacattatagatcttaccgttcactagtgcgttcggattgtcatcttctgtgaactgtccttgcggactacggtccagaaagtcgctgcaactgctcagaagcagtgtggtagcggcaataaaggttgaaaatatatatttatccagtttcatacaattatcgttttaaaaggttaagttgattccgaaggtgtagactgccggtacgggataactgccgttgtccactccgaatgcggtggcggtaccacccagctcgggagtatagccggtgttatgtttccatgtcttcaggttctgaatgttgacatagactttcagggcttgcagacgtatctttgcgagcaggctcttgtcgaaagagtatgccaactgtacgttacggatacggaagaacttgccgtcttcgatgtagtattcagaattcaacgtattgatggaatgtttggagttcaataacggttggctgttggatgttccttctccgtgccagcggtccatgcgttgtgccagatagttgaactgggcaaagttatagttgtcccatgtacggaagatctggtttccgccttgtcccatcatatcgataccaaaagaccagttcttgtaatccacgccgagcgagaaaccgtaagtgacattcggtgtcggatcacctatcatggtacggtctgcgggagtgatctttccgtcgttattgacgtcggcgaatttcaagtcaccgggagtaactgtagcaagtgtattctcaggagacgatttgatatcggcttccgattgatagactcccgctaccttatagccatagaagtatccgataggataacctgccattgtgtaactttgctgtttatctccggcaatgatggaataaccgtcctgaacaaggctttttactttattcttgattgtagtaaggttggcgctgacggaatatccccattcaccgatctggtcgcgccaggtgattgccatttccacacctttattctgaatccgtcccaagttaccgataccgggcattgttccggagattccgggaacttcagcaagcaaatctttagtgttcttcatataatatacaccttcgaaatgcaagcggttgcgaagcatattcgtttcaaatccggcttcccatgcctctactttttcccagcggagggtaggattaggcaaataggcaagttgatatcccggataaatgatggacggcttaccgaatacggccgaataggcattggtcaatagcggttcagcaggataggccttgtccagattctgatttcccaatgttccgtaagaggccttaatcttcaacatatccagccacttgatgtccttcatgaattcttcttcggtcatcagccaaccgccacctagcgagaagaaattctgccactcattgcctgtataagagaatgcggaagaaccgtcccgacggaatgacccgttgaacagatatttccctttatagttgtagatgacccgtgcaagcatagacacggtactgcgttcccattgggtacttccattggttgccgtagcggcatctccgatactgacgaaccatttatccggatcgtccggaatcacaaggcctactccttgtttgcgcgctccgtccaggcggcttagtgagttataataagtggtaaagccggcagtggctgtcaggttatgattgccgttgtcgaaactgttggtataggtcagcacatagtcactctgtactttcgtctcgttttccttgaactggctgacttctgttttacctgttcccaaagtggaaacatctcctttgacggtagagtcgtatacttttatgataggagtataggtacgtccgttgttggaagcgtagtccatagagaacgtcgctttgaaggtaaaatgtttcaggaagtccacttcgccatagacattacccgatgcgcgatagttttcggctttcgttgtgttcgcttttaaatcgacatctaccatagggttgttgatctgtgctttctgaaaattgggcaaagcgctgtataatccatactcgtcgttatataccggagcgataggagtggagcggagagcacctaacacctgtttcgagtcggcaggtagaaggcgtgcgccgttgaattggaaacctactttcaggaagtcggtgattttataatcattgctggcattgatggtcaccttgctgaatttctcatgttcgatgttgccttgttcgtaagagtagccgacacccagatagaaactatgtttgggagaagctcctgtgatactgatattattgttcgtgataaaggcagtctggaagatttcatcctgccaatcggtgttggcgtcccagccggtgtaatcgaacgggtcatctttctggttggcaagctgttcgctatacagctctttgaattgcgggccattgactaattttactttgtccaccactttcttgaagccgaaagaagtatttatattgaccaaggtctgtccttcttttgctttcttggtggtgatgatgataacaccgtttgcaccacgaacaccaaagatggctagggacgacgggtctttcagaatctccatcgactcgatatcttccggattaaggaagttgatattatcattgaataaaccgtcgacaatgtacagcggtttatatccattgatggagtttgtaccacggatacggatttccggatcggctccggctcgtcctgagtttacaatctgcacacctgccacttttccctgtaaggaagaaagtgggttcatagccggtttattggctatttcttctcctttgacgttggtgatggaacctgtcagatctcttttctttgcactaccgtatccgataacgactgtttcggctagtacttgcgagtcttcttttagggtgacgttaattatgctttgtgttcctactttgatactctgtgtagtcattcccacgtatgaaaacaccaatacatcctccggagtgacggagattgaatatttaccgtccatatccgtaatggttccggtagaagtcccttgtacgagtaccgatgcaccgatcaacggctcattggcggcatctgttaccgttcctgtcaccgtctttgtttgtgcaaaggcagagatagaacctagtaacaggcaagtgagcataatgaagccctttagcctgatggcttttgtctgaagatgttgtgaaagtctagtcctcattgcattaaatttttccatttgttactatttaggttgaagtatctattctgtcgcctgtcggcgaaagtaacaaaggaaacaaaccaaactcaaaaaagattatgaaaaagggaagaatacttgtttttaacaaaaaagccctcaagaaaagttcttga

SEQ ID NO: 11892 - DNA, 868 bp, Unknown
  gut microbiota DNA sequence
ttcaaattattcaccagccgggaaaggcggactatccacccgccgcccggcattaaaaacaaatcacaatgagaaagaaaatcttcttgtcggcggctatacttgccgccgtggtaagtgcctacgcacaaggaaacgggcaggcgggcatcaccgaagccacgaacctaatcaccgggtatttcgaccccggaacaaaactggtgtacgcaatcggggcggtctgcggcttgattggcggggtaaaagtatataacaagttttcaagcggcgaccccgacacctcaaagaccgccgccagttggttcggggcgtgcatcttcctgattgtcgccgccactatcctgcgttcgttcttcctctaaaaaggcggcaatgtctgaatatccggtaaacaggggtatcgggaagccggtggagttcaaggggctgaaaagccagtacctctttatcttttgcggcggcttgctcgctgtcttcgtggtgttcatcgtcctgttcatggcaggcgtgaaccagtggctatgtatcggtttcatcgtgtcggcttcgctgctgctcgtgtggcagacgttccggctcaacgccaagtacggcacgcacgggctgatgaaagctgccgcacgcaaaagacacccacgcttcattatcagccgaaaggcgataccccggctgttcaactacaaaagaagaaaggaagaaagaacatgaggaatatgttaaaggctaccacgctggaaaggaaatttccccttttggcggtggagaacggctgcatcatatcaaaggatgcagacatcacggtggctttcagggtggaactgcccgaactgttcaccgtcaccagtgccgagtacgaagccataca

SEQ ID NO: 11893 - DNA, 111 bp, Unknown
  gut microbiota DNA sequence
tatgaggaatatgttaaaggctaccacgctggaaaggaaatttccccttttggcggtggagaacggctgcatcatttcaaaggatgcggacataacggtggctttcagggt

SEQ ID NO: 11894 - DNA, 1100 bp, Unknown
  gut microbiota DNA sequence
ccgtgcaggatgaaagtcttgtcgtgtacggcttcgtagatggcttccagttgcgaagaatcggcgatgatgggtaatacaatgtctgcgggcgacacttgtttgtccatatccgttgcatctatttcctctgtggcggcttcccattctatctttccgttgatgaggctggacacaatcttgttctgaaccagtttgttggcattgttgtgaatatcattccacatgatgaacttgttgaaagagaagatacccagaatcgcttgctcttccacgtcccatttacgctggttcttgatgctgttgcggataatggaatagatcagtttgacgtttacaccgctttcgtcggtaggtaacgggtccaatcctgatatggagattccgaagttttggcgaagcatttccaataaggtgatgttcatcatcgtttcttcttcccgggtacggattacgtaacctttggctgccgatttacggataatttcaaccggtaatagcaagatgggggcatagcggggacgttcgctggaaggtgtctcgtaccatttcaaaagtccgagagccagatagagcgtgttggctccattctcttcgatagaagtacgcgaagagcggtataagtgagtcagtgccttacctaaatcgttttcgggcagatagaaacgtaaccttttctgtgaaagttccgagttgatgaaaccaaccaccggatccgactccggtatggaggaataaatcccgaagtccatcgccggactttcccaatcggcagggcggtgaaggatgcggaattcttctccgtcggccaatgcatcttccagacaggatagattagccgggatgagttggagcgtgtttttggtaatccggatattcagcaggttgttgcgcaggcttaaatccagcaaccgtctttcccataacagttgtttggtaatcacagcctgggtttcattacccgataaatcataaggattgatactttgcggagtggcatgaacggcacttctttggatgtcggtctccttttcttctacttcccatacctgcccgtgcagagtacgttgggggatggggcggatgcccgaatgtctcgc

SEQ ID NO: 11895 - DNA, 2000 bp, Unknown
  gut microbiota DNA sequence
agaccgggtagtaccggcaagcgcaggcacgctttacgaatttatcgaggccggtgtacgctccataggtgaccctgtacactattttgaaatcaacttctacctgggaaaccggatcggaaatttctacaaagaccgtccttcggaagggttcctgctaataggaatgcaggatgcggaacggaatcttcccgagttcgaaaaggaaggctaccagttcgaacggatctatcaatcacccaaacccgttcttcgccagactgccgagatatacaaattcatcaaaaagtagtctcggatgaattcactgtttttccatgcttcaccagatattccgctgactggagcatggaaaaactatattctttcaagggcagaaaactatcatccatcgggacgtgaaccagcttcccattatcggtatgataggtaaattcctgattcgtctcataattgtacatatacaactgagtcgcattacggcctacaatcatattatcggctgtataaaacatacacggacgttcttctttcaacaagtccactccgaaattattctgcaaataatcaatacccaacagtcccaataccgtaggctgtatgtctatttgtccaccaaaagccatatgttccgctggagttatactgctggaataaatcatcaacgggatatgattatacgattgcggaagttcacactccgcatccccaaccaatttgccatgatctccctccaacacgaatatcgtattctcaaaccacgactgtttgcgcgcttcttcgaaaaatttacgcaaagcccagtccgcatattccacaatctgagtttccggtttgtccgttcggggatggaaataaggaggtattacataaggcggatgattgctgattgacaataaggtagcgaaaaacggttgcccttcgtctgccgtccgattcaaaaccggaatagcatagtcgtataagaaatcatcctgtactccaaaactattcacaaccttctctgacggataatcttcctgagcaaagacctcatcaaaaccgttcgtcctgaaaaaggcattcatattatcgtactgcccttcatgtgtcataaaaaacagattatgatatccattctccttcaataccgtaggcaatcccgaataatggggaatcaccgaacctttcatcaagttccgtttcatcatagcaggaaaagaatataaagtagcgtacaaaccatgattggtatgaatccccgccgaataaaagttggggaaactaagggaacaggcatacaggctatccaaaaaaggagtcagattctgtgactgcccgaaacgtttcatgaaattggacgacatcgactccatcataatcaataccacattgggacggcgtcgcgatacgctatcctgtgaattatgccgataaaccgccaacggagagacatccggttcacccggccgtgctaacaaagcttttactttttccagcgcttcctgttcatccatcagatgcagatatctgttttccggccgtcggtcgtccagcacgctcgtcaacaaattaaaggtcggactgacccccaactgattcaaaaaggcatcctgacagaaataggcggcacttaccttgatcggattatagcctgtacgtcccctaatgccaaatacacaaagcccgatcaagccaagccctaccaaacccgcaacacttcgttgcaagcaagggaatgaaccgggagcagacaggcaacggtgacggaaataccggccaagaaaggcaatccacacaacaaagccaatcagaaagagcaggaataaggcaatggacaaataataggaagtctctcccaatatcatccccgcagtagtacccgcataaccgaaccattcgaaaatggaagaattgatatgcttgaaaaagtaggcgaaataaggaatatcagccgcactgatcagataaaccaacccataaaagacaccgaagaagatagtgaagaaacggaataaagc

SEQ ID NO: 11896 - DNA, 4811 bp, Unknown
  gut microbiota DNA sequence
aggctacagctaccgtcagcggaagcagtaatatgtaacaacctatcacgttatcgaaccatactccatgtataaatgctatcaatgacagacttttatcagacagtgcttcggcagtcagttgatggtaagaagaaatgaacaatacccctctaaacaatccggtgattatcagtgcggaaagatgcacggaaagtatatatacaataagatttagaaaacgtttcataatagctttttctttttatgaatagttctgaaagcagacctactgtttatttttataagtatatacgaaatgaagaatcaggaaattgatgggaacgactacgataagcaccaatataggagcgagaaactcgccgaatccgatccacaggaaaaggttcagcaaacctacctcaagcagataattaagtaaatgactaaagccaaacccgacagcgttgcgcgatgaaggcttggaacggaatgtaaagaatgtagttagaaaatagttacagacaaatccgaccgcataacctgccgtaaaagaaagcgtcggattggccaccaacagtaccagacaatatacgccatagtgaatcgccgaagatatcgtaccgacgatgccaaaacgcataaactgccagaatttctcctgccagtccgggtgttgttcccatgtctctttaatgactttgtttatcctcatcgcataacacctcttctacattataaagcggacgatgtttcacctctttatatatctttccgatgtacagccctaccgcaccgattgacatcaggacgacaccgcctacaaaccatacggacaacatcagagaggcccagccatgttccgccgttcccgcaatcaacgaataaaggacataaaaaccgatcagaatgctgataaagacaaagataatacccaaatagacaatgccataaatcggcttcaccgagaatgaggttattccgtcgagagccagtcccagcattttccgcagagtatatttagagcttccggctgtgcgttcccgaatcacatcgtccaccgtagtggaaggaaagcccagcagaggaataatgccgcgcaggtatagattacgctcttgataatgtgacaactgttccagtaccctccggctcagaaagcggaaatcggcatggttataaatggattccactcccatcctgcgttgcagtttgtagaaagccgtagcggaaagacgtttcaacaacgggtcggcctggcgggagaccttcactccgtacaccacatcgtaaccggctgtataagcatcaatcatttcctctatcgcattcaagtcatcctgcaaatccgcatcaatggtaacaacagcgtcactccagtctttggcagtcatcatccctgccatgatagcactctggtgacctacgttccgcgccagattcattcctttcacgtaaggattttccttatgcagcttcttgataatgttccacgtacggtccttgctaccatcatttacaaaaagcacgaagctgtccgcactgatcttttccttcccaaccagctcatcaaacaaggctgtcaaacaggcggctgactgttccaacacttcttcctcattatagcagggagacacaattgccaatttaatcatttctcgttctatttagttagttctgtccgtttcattttcgcaaattccgagtacgtcagaaaatcggctctcttctccttgaaattacggatcagcagatccagccgttcttccatccctttgccggaatgattacggataataaacggcattttaaattcgggatgttcattcaatggataaaactcccacgggtggaaataggtcacaaaatagccgtcgtgcttcagcaccctgtttgccatccattggtacaacttcaccggaagattatggcaagacaaccagaatagcggaaaacgtatccacggagtcaccgacgcaggaatttgaagaactttacccgtcataaagcaagtacgcggctcagaaagatgcatatatctgccgggaataaacgccggattcaatgaagaattatacagatatcccatccgctctatttcttcatcggacaccggaaacatacgcggctggcgatacccctctatcttcctccccgtcaaccgttcgagtatctctttggaacgactgacatccgaagcctgaggctgccaatggtcacacccatgagccgccacttcatgcccttcatccataatacggtgcatcacctccggagcattctccgcaaagttgcttgtacagaaaaaagtagcccgcaccccattctttttcagacagtccagtatcttgttcgtaccataaaccgatacttccattgccttatccaacggaaagtccactccatgttcacggggtacatcaaactcctctgtgtcaaaacttaataatatcattgtcaattagctttctatttgatatccacttataatggaagatcgtgcaaagataattattataaaataataaagtccattccctacataaaaagaaataaaacaaaaatgcacatattaaacaatcatatcactccaaagccaccacatgataatacaccccatgtgttttcctgaacgactctactcccaaccgtcgcaggatacgcccgaaatgggtggcttgtccgaaggagaatttcattttggcggctttctgtatacgttgcaatatatccgcagcaagcaaccattcgccttcttcctcctttcctgccgcccgataatacacttgaaacaactgttcaatagcgggcgactgctcaaattcctgattggcctccgtcatgatggcctcatcccgctcgtcaaaccaataccgttcattcttatataatgccgccatcgcttgcgcgtaaagctgttcgtaatcaataggacggacaacatctatcactcccgtcacctcgacagcgatatagcggcggctgccggaagtgtccgtcaacaagtccttatgattactcgtaccgataaaagaagcatagcgccgaagttcctccaccgccgaagcattgggacgccttgtattcacaaccggtttttgcagaatatgctttaggaaaggctgttgagcaatgctgatctggtcgaattcatccatattaatcaacaggaaacgattcaggtacagttccgcatcccgcttccggctgaaatcaatgctatccgtgtaataagcttgcagacacggtggcagaatcaagcgacagaacgtagatttcctgtatgcctgcggaccaaccaatatcggtgaagtgctattcgcataattcttcctcatcattccacgccaatgcgccaccatgctgagaaaccaacggcgaaacaaatgcggccaatgaggattgtcgcaaggcacccgttttgccagatctccaatatgatccttcccatcccaatggggaaggtcataaagaaattcttcagctggttgatacacaggaacatgatcggaattcagataacgcaccacatccttgtcccaaagcttaagcccctcgtactgcgcattcatcgtaatgcttgccatctgccgtttgtccaccggatgaaaatagaaattaaaggtattccgctcccgacattccacctgtgtagttaactggttgaaacgaaactcatagcggcgtttcataaattcatccatctgcataacaaatatctgttcgggaagcagactgcttttatcggcaaacccacgtccggaacgatagacattcttcaccgtctcccgaatcagaaaatcatctttcggcaagtgataatgagcgcgcgaccaccgtaccgtatcctcttcgggaatacctgcacggaaacaatgtcccgcaagggcaaccagcaacgaatgtatatctccgtccggctgaaattcctcctgttcctccagcgcccgcgcaaaagccgcttcgaacagaacggaaagcgcttcatgactttcatatccgggcgcaagccgttgtaaaggggaagcctccgtctgtacctgttcacgataagtcgtttcgccgggcatagatacaggctgcttcatgtaaatcggcattgattcgggattgaaatacagctccggatcgaaagtcaggcgacaatactgttccaacgaaggctctttcagttcaatatgaaaaggaaattgaggttggtagaacttcaccgccagccgataagcgtgcgcatgaaataattccgcttgttcacgggtaaccggcaaaagatcgtcaggataagtaaaacgtacccagatcttgacagacttcccggaagaaccgacaaatgccagatacgtttgcgggagttctttcacccacttcttcacctcatcggcctccataggccccgacagattattcacctgaatcattacaattccattgtattccgccataaccatcatcccgtttttacggacaaaggcggcagcaggaagcagtttcggcactttctgaacatagtcgtttttatcaccgggaagcatatagggcaggacttctctcatttttgagacgggctgtgctttggtttccactttcatcagctccacgagctgctcaattctcaacgtacgcagtgtattcaccttgccatcgtctctcacctgtgttattctcattattttatttatttgtcctgcatgtgtggtgtagggctgttgtttatagacacaaatgtactgcaaatatttcacagaagcaaatgtatcgtctcgacacctcgaataccgttccgacagtatactaacaagaaatctcgtaccccatctctcatatctctcata

SEQ ID NO: 11897 - DNA, 311 bp, Unknown
  gut microbiota DNA sequence
aagacattcaacatttccgctatcgttgcggcagcgttgaagaatgacgaggtactgaagtattcggcatacctgccaccgaacaaacggaaaatcctttatgtcgataccgagcagagcaaataccattgccacaaggtcatggagcgtattttgcggcttgccggactacctaccgacaaggacagggacgattttattttcatcgtgctaagggagcagacacctgacaagcggaaacaaattatcggctatatgcttgaaaatatgcccgatgtggggttgctcatcattgacggaatccgtgactt

SEQ ID NO: 11898 - DNA, 951 bp, Unknown
  gut microbiota DNA sequence
tttttgcgtgtgttctctttgcccatccacaatattgtctctcaatgtgcgaagggcatttttgaataagtcaaaatctgttgtttcaatcgcaacctgtctatatgctttgttcaaaacttgattcggtttgagtagtcccataatgtttggtaaatgagttaataaaatacaaaggtagtctaaaaacttgataataaagaatgaacgtattggtttaacgaaagtttgttctactgccagccattatcaacaaacaatagcagcagtagatttgacatgattctacttattatattgtaatagccagccaaagtaatcttttcacatccggatctatcacaggttggataagttgttaacctgaaggtaaccgacctgatggtataggaacaggaagaagtctgtaatcatggcatttacccggatagagaagccacattttttattgccggacttccggcattgcctcatccatgtgtgaaaaggagttttttctttcaccacaacgttcctttcacatacccaaagggggtagtggatccagacctgcttcggctttctttttccttcccatatgacaaaaaccgactatccatgactattcctgccagtgtgccggtcgtgcttgcctctcatggtttcttcccttatattcgcactgatatttaaacgagttgaaaatatggaaatatgctacatcgaggccggtgtccttgagaggatgctggcgcgcgccgagaacctgtccgcacgtgtggacagattgtatgagagaaaccgctgtaaggaacccggagagtgactggacggccaggatgtctgcctgcgccttgacatctcgccgcgtaccctgcagactctccgcgataccggacggctggcgttcacccgcctccagcgcaagttctattacaagcccggggatgtggagaagttgatggtctacgt

SEQ ID NO: 11899 - DNA, 3746 bp, Unknown
  gut microbiota DNA sequence
tattcattggtttaggtttaagtttaatttgtcttatatatataaggtagtaaacttgaactgctccgaaacgagtttgattttatatgattgaagaggcatgtatatatacatgggtaaactaaaccttaaacttggttgtttagtttacccatgcttcagctgttcgacttttctttttaccgagaagtcattacataaagatttgccagtcgttatacttcgatatttttacaaggatcgaaagactcatgttctccatgaaagacataacccaactgatttgatatgcacatggtattgcctatcctcacatccgcattatagtgagaatgaccatatatccagaagtcaataccgctatccttgatataatcttccaattctacggtaaaggctccgttagccagactgtcggcaaacttgggacattgcatttggaaagacggtacatgatgagtgacaactatctttttcctggcgttgctggatgaaacggcttctttcaaaaacgcaaggcaccttgcgtgctcacggttgaagtctgcaaacgtgagaagctcttcattgaagaagatgcgtcggaagtcgcttatgacttgttccgtatagtatgcctccttcaagggaatcttagaccacaaagttgttacgatgaagtcgatgtcttctacgtgtacaacagcattataataactgtgaacgttgggacgtatttcaagacaaaaaccatcgttaagattggcaatgtcatagtatttatagaactcatggttgcccatgcaaactatcacctgctgatagttctccgaagcccaatcccaaaatggatgcttagaatagttctcgtcccccaggtagccgatgtctcctgcaagaacgagaatatcccctgttacttgcaagggattctccttcaggtatctccagttgtcggcaaactctagatggaggtctgacgcatattgtattttcataactgttctgttataaataattcatctaattgttccaataaagcctcgatgaatgatgaattctgatcaagagcctttgcaagaggctctgaaagcgtgttccaatcatttcttattgaggttacaaaatctcttatgcaagcaacaatcgattcgggagcgataatctcgttgtcttccatgatgaccacattcttcaacacatcagaccgatgcttcttgatgtctttactattgacatgctttccgttagctttgtcttgcaaaagattgaggtaagcacgtgcttttagagctatgagcgcagcagagtctgcatgacgaagcccattggtcagcttgctatgctggatggtgaagtgatagaaatcatcatccatgatgattgcacttagacttgatgtttcctcgtcaacggggagaggctcaacaatcagtcctttcggctcgccaagaatgtcaggatgccgtgagagcagttctatcatttcgggatagtctggttttccgttgacaaaacgatacagttcgtactttggagtttcgccttcttcctgcttgcgtttctctggacgacaaccaccttctcgtataaattgccagaaatgctctgcaaagtcggctgtcatcttctctacaacaactatcatgtcaatgtcgtgggtggcacgcggacgtactgtcgttccagtcatggtgatgtcgcaagcagttccaccaatgatgacatagttatctgaataggcttcaaaagcctcacgaaatttctctaatccttccattctatttcattaattaaacgttcaacttcgccttccactcgtgggtcttcgtcctcacgcagagaaatggccaaagataatctgtcaacccattcggcttttgtaccaatagtggtgacaggtgggtatttccatgcttcaatgatgatgttgccatcaaattcgtttgggcgcactaaggttcccgatgatttgaattcccgtagttgtttgacaggtaccatgatcattctttccggatcgggattcagccacgtgtaatgtgcaagggcattgatgccacatactgggaaattatcgtctgaaagcaaatcgtcacaataaatgcgttcttcaacagggttaacgaggaacgactgggcttgcttccacaattccattcctttcttgtcaaagtggatgaccttccgcttagagcctccagatactttttggcaaagccccaagtcttcgaggcaagtaataccaagtgtaatgcttgcgtaggagtacggaattttgttctcaatatcacgtgcagccaatccttcgatactctctatctgaagatgatagagcagcaggtattgtgcgacaggcgttaaaaccttagcttgtttggttttacgaatgcgctcattagccagaagcataggcaaatggacgtatttgtcagatacaacgaaatacacgtctttgtcgatcagtctctgccgttcataggcaggacaagttggcaacaagaatacggtaggaagctggaataacgaagtaaggttgtttgctgtaacagacaagccacgtggggtagctactttatctttaggttctgcgaatagcaatggcataccatgaaactctccatcgtagaacttgtacgacaacatttctccgatggtaacacctttcatctgcgccttgcttcgttcttgcagttgtataggtcttcctaatatggcgatctctttcattttaaccattctgcattattttaatacatcattaaaatgatgcaaaagtattaaaataatctgagataaccaaagattttcagacaatttatataagatatgcgtcatccaccatataatcataacgaacttctcccatacacttacattccatcgaagagatttagtaaacatgcttcataatgtcagtgtgacattaaccttattaccaccatttcgaaactttatagtatgattattgaaatattatcatacttctattataatctgtgttaagactgaattggtttttcgtgtgttttttcgtcaatcatataaaagtctgttcctttgcaatgcttttgggagttctcctgccttttgagagtatttccgagtatgataacaaacaaaggataacaattaaatatcagattgaaaaatgtcaggattcgtaatttttgcgctcgtcctcacctttgtctatgtggtctactttgctgtaatgatcacactagacctccatggcaagaaggatgaaaagaaatcagaagaagagacctatgatgtaggggatatgaccaacgaggaacagcctgttgcaatagaagaacgcaacgacaatcctgacgaaggtgatatgaccttcatcgaacaaatcacagatgatgggcttagagttgttaacccaactgggaatgtaactccccactcttcttttatcgaagaaccaccaataacggaacagccatcatcaacgacaagtgaagaactcaacgagaaaaacgatgaattcctggagcacattgaaccagaacatcaatgtagttacctctcagaagagtttatgcagaatctcaacaataagcacaacacccgaaaaatagaaaagaagaatgccagagataaactgtaaaaagaatcatttgtttgccatattgtcgatatgtgtcatgctcttccagccaatgttggcatcagccaaatgcggaggtgtcgattacagctggggagcagacgcactgagcaatgctcatgattttacggtaacaatgatg

SEQ ID NO: 11900 - DNA, 3196 bp, Unknown
  gut microbiota DNA sequence
ataagaatatgagcatcgaattaggaaagttcaaccagcttgaagtcgtgaaggaagtcgatttcggcgtatatctcgatggtggggaagaaggtgagattttgttgcctacccgctatgtgcccgaggattgtaagataggagattttttgaatgtgtttctttacctggatatggatgagaggctgattgctacgacactaaccccgttagtgcaggtcggacagtttgcttgtctggaagtctcctgggtaaatcaatacggagctttcctgaactggggactgatgaaagatctgtttgtgccgttccgtgagcagaagatgaaaatgcaggttggacggaagtatgtggttcatgcacatgtggatgaagagagttaccgtattgtagcttcagcaaaagtggaacgttatctgtcgaaagaaaagccggaatatgctccgggagcagaggtgaatattcttatctggcagaagacggatttaggctttaaggcaattatagataataaatatagcggcttactgtatgagaatgaaatattcagttcgatagagaccggaatggagatgaaggcttttgtgaaacaggtgcgtgaggatggaaaggtggatttgattcttcagaaaccgggctttgaaaaggtcgatgattttgcgaagacattacttgattatatcaaagagcagggaggacggattcatctgaacgacaagagtcctgcggaagatatttatgatacgttcggtgtgagtaagaaaacctttaagaaaggagtaggcgatttgtataagaaacgtctgattaccttgcatgaggatggcattgctttggtggaatcctaaatagaatagggaaatccctatgcacgaatagagggaatcattggggtggggagttttctcaccctatttttgtactatcagattagagatattaataataaaaactggataagtatgcgtaagattgtaataagtttctgtatcctactcgctgctctctctttaaaggcgcagactgtaagtggaattcgtattgatggcggagataccccgattcttgtgtattttggaggaaaccagatgtgtctgccgactacaacatgttttgtcgctaacttgaaatcaggatattacaccgttgaagtgtatgctacgcgctctgcccgtccgggagagagagtatggaaagggaggcggttatataatgaacgtatttattttgatgggaatagtgtgaaagagatttacgtggatggacgtggagagattcgtcctggtagtcctggccgccccggacaagagggatattgtccggatagtcaatatgatagagtgatgagtgagcaactttttaagaggtttctcagtgaggtgaagaaagaaccttttaaggatgaccgcatggagatgattaagacggcgttggccggttcggattttacttccgggcaatgtcttgaattgacgcgactttatacttttgatgatgaccggatggagattatgaagatgatgtatccgcgtattgttgataaaggggctttctttacagtcattgctacgctgacattttcgtctaacagggatgagatgaataagtttgtgcaaagctacggcagacgtcgatagtgataaatgattaagtgtgtggggggattgaaataataaatgataggaggttgaattatgaagcggatattatttttactttttgctatcggtttgggtgccggtatgactgtgatggcaggaatgagtactagcaagatacgtaaggaaacacgttttcttacagataagatggcgtatgaactgaatctgaccactcaacaatataatgatgcgtatgagattaattacgactttatttattcggtccgtaatatcatggattacgtggcacgtggttatgaatgggcgatggatgactattatgaagcgttggacatccgtaatgacgatcttcgttgggtattgagtgatggacaatatcgccggttcatgggagccgattatttttatcggccgatttatgtgaccggaggaagatggagtttacgggtttatatcaattatccgaatcgcggcttgttctatttcggtgtgccttatcattatcatacctattgtggagcgcactatcgtccgcatattcatcataccagctattatcggggtagatacaataattttcaccattattctacgcctcatcgggtaagagatcaaagagtgtatcactcttaccgccgttcggattttggctcggttcggattcgtccgaattcttcggtacgtccgcataatgcaccgactcgtccgggtaattcttaccgtccggaaacaggtcccggttcttcaagctctaatcgcagaccaacaagcggaagttcaactggcttcagttcctccaatcgtgaaagtggaaaaacaagtagtagttcgagaggaagttcaagtaaacgaaacgatagtagttcctataatagaaataacagttctgagagaaataacagctcttccagttccaggcgcggtagttccagtcgtagtagctccagtcgcagtgattctggtcgcagtagatctacccggagcaatgtctctagtggacaaacagaaagacgctcttcttccggaagtgcgagaagcaatagcactcaaagctcttcccgttcctctgaaagaaacagcagcggttcaagaagataacctattcctttattatttatatcaatctcattactcctcagcggaaggagaactagactccgggttttcaccggctagactattccgggcaacgcccgtaacttggatgaggttgtgtcagcattttgacacaacctcgttcgttttcgtacaccattctgtttttctaatgaacaattacgattagcttttgtaactcttcaatatctatttaacgagcggcaaatattctccataaccttcctcttgcattttctctttcgggataaaacgaagggaggcgctattgatgcaataacgtaatccgcctttctctttcggaccatctgtaaatacgtgtcccaaatgggcatctccggttctactgcgcacttccgtacgtatcatgccatgcgaagtatctttcttctctgtgattagatctttttgaatcggttgggaaaaacttggccacccgcaacccgaatcgaacttgt

SEQ ID NO: 11901 - DNA, 184 bp, Unknown
  gut microbiota DNA sequence
ggatagagaagcagcaacgggttgtcagtacgaaactgaccgagttgcagtattacgccatcagaaagagagccggagaagccgggttgcgtgtcagtgagtatgtccggcaggcagttgtttcggcagaggtcataccccggctgaataggcaggatgcggacaccatccgcaagctggcagg

SEQ ID NO: 11902 - DNA, 6889 bp, Unknown
  gut microbiota DNA sequence
acattcattccccacatactgcctccatcaccatatattcgaccgtctttttcttcaccggtcacaggatctgttacaattttatccggtgtgtgggctttccaaagacgacgagtagtgaaataacggtcaccttcaaaacaaagctcaatctgacgttcacgaataatgtattcatgcattaaagccggatcagaagctatttcaggagtagcgacaaacgcgctttctacacctgctcttttacgaatttgatcccaatatttacgaatgtccgcattggtaggatcataattgcttaacgcttctatatagtctaacaagatttcagcatagcgtatgtaagtacaagcatagttttgaggataagcacggttatacatgtctgcctgcgggtcgttgcgcttgaatactaacatacccgttttagagtagttcgcataattaatagatggacgagctgctcctcctaaatataattctgcgcgtccgaaaccatctttctgtcttccagtactccattcgttacgaatgtttttatcatccgacagactaggtatcactctgtgattatataggatagctgcatagaaacgaggctcacgattgcagaacatattccagtcacctttccaatgcccccatgccttactatcacggatatctgctatgatacctttacgaccttcttcggaagcaatgtcatgtccgttgggattccaattatctccaccgtcagccgcaaatcctttttcaacataaccggaaccggccacatcgataggctttccgttcttcatcagaaaagcatctaccagtcgtaaagtaggacttactcctcccaaacagtgcgggccgggtgtattgtgtaccatccatgaccgttgaaatgtatcatcatattgtccttctgacctagcccatattacctcacaattccaagcctttagttgaacatccacacatgatttatacggattaaactctgtatccccattctcatcattccggtatagtttcaaacgagtgtccggatatttctctgccatatctatgacggcttttgctgcggctgccgcatctttccatttttgttcactgtaagtggtattaataagtggggtaccatcatgatttttgaagttggcatattccgtattaccattaaattgaggagaggcggccagattacgtacaattgcttttactgctagacaaaccaatttgttcggtcgtcccaaacgggtctggtcatcccaataatgcatcggaaggtcataagctgctaagtccatcatttggcaaatatattctacacattcatcatagggggcacgctgcatatttgcaaaatctgtttcagaagggagcaattctttaattaacactaccggaccatattgacgaagaagaagataataataatatccacgtagaaaacggacctcggctttataacgcgttttcaattcgctacttagttcgccgcaacgatccacattgttctcaaatgtcaaagtagcacgaatagcttgataaaaacgagcgtatctatcacacaccaattcactggaaggggtccagtcacctctgttgaagttatccgcctgatagaaattccaggttatattacattcatcggctgctccaacccaaggttcatgttgatgcaaatgccctgtggggattcctccgtaacaattggccagatacttctccgtttccatgcgggaactccaaaccatttcatctgttttcatatcatcgggctgtttgtccaagtagtcagtacaactagtcgacaatgccaacaaactaaataaaactataatatattttttcatattcgatgtgttttaaaaagaagctctaattccaatattaacttttctcgggagaggatatttgctaccattaaatgaagctgtttccgggtcccacatatcccatggtgcaaacaatgcgacattattcgccaagcaatagatgcgaagagatttcatgccaattggagcaatccagtttttcttgaaagtatatccgagttccagatcggccaagcgcagcaaacggccattataaatggtacgcgtagatgattgccagttgttggatgaagctccattggacagacggggatagaatgcattgggattaggattatcttccgtccaacggtcaagtgctttttcaaataagttacctttccctactcctttattgaatggaatgaatgtatccccccctagaccgtaagtaacatgtgcctgtcctctgaagaaaataccgaagtcgaatcctttccagaaaagctgagctccaaaaccataaacaatttccggaacacttgaataaccgatcggacatttatcatcttcatctactacgccatcttcgttataatccaaatattttacatcacctggacgtacatcaccgaatttctgttcaggactttcattgatctctttttggtcttgaaataatcctaaggcaattagcccaaaatgctgtccgtaacgatgtcccgtttgcatacggtatgcatattttttctgagcttcatccatttctttaatttcattatgagtgtaggtgaagtttccatagagtttataacggaaatctccaattgaatggttaaattccaacgtaccgtctataccttgattcaccattacacccatattagcaaagggctgtttgatgactcccatggttgcaggaacagactgacgttgaataagaatatcggaacgtttttcgtggaagtagtcaagatccagagaaaccatgctatcgaacattttcagttcaataccgatatctttcttaaaacctttctcccaagtcagatcagctactccgatttggtcttctccgataccttcgtgaaagctaggggccataccgaaatagtatcctcctaaaccttcaccaaaatatgacagataaccgaaacgcatattgtcaggcaatgattcggaacctaccagaccaacagagcctctgacttttaatacatttatagctttaaaaggccagaaagactcattggatatcaaataccctaatgctcctgccggaaatagaccaaaacgttttcctttcggaaagttctccgagccattatatcccatattaaattcagcaaagtaacggtctttgaaagcataagttgttcttaaagccagaccttgctttttatagggcaatgatttaatagacgatccggcagtctggtctacgtagtcacgctgataatacatcgccattgcaccgatgcggtgtgtttcattgaaaatctgattataattcaattgcactttcagttcttcggcgcggttactggatggagttacattgtatcccaagaattcatttcctttggtaatttccgctacttgaaattctccggtttcatcgtcaactcccgttatgttataggtagaagaatttttgcgtctgttctgtatggtctgattattggcatcgaaagagaaagaagcttgtatgtcaaggccctttaataagaaactcaagtcttgttttaatgtaatctggctcatgatttgtgagcggaatgatttattatatccagagccaaacaaacgttctgccggattcacttcaccgacctgtgatggtgctccccaaccccattctgtattaccaaacgcatcttttccgataggtacccgaaccggagcggataatggattggataaataggaatagtaataaagtaattcaacagggctgaaccatctgttgtctacatactcatttcctaaaccgggttgatgcatatctgtcatattggcacctatttctaatgataaattggttgttttagtcaatgtcaaatcaatgtttgatcgaaagttatatcgacgaagtgaaatgtttgatttgtaatccgcttccggattatttttcaagttaccgttatcttctataaaactggcactaatataataacgtgctctttcgccacctccacgaatattgatggctgcattcgtattagttgaatacttgcggaaaagttgatccatccagtttacattcggatatagaaaaggattggttccacttctcaaattgtctatgtactccggagtataattttcagtacccaatgcttcattggctagcaatgcgtaattgaccccgtccaataacttcggcattgtcgggagatcggagaaacctgtttccaattttacttctatgaccggtttttgggcaacccccttacgggtagttaccaatacaactccattggctgcgcgcacaccatatactgccgttgccgatgcatctttcaagatagaaatggattctacttcttcaattgacaaatcagacatatcccgttccactccgtcaactaatactaatggtttttgattagctccgaacgaagagataccacgtacccagaaatcagcattgtcttgtcctggttcacctgaacgttgtacgaccactgcaccggcaatacgtccggaaagagcgttagtcagatttcgttgcggtacttccagttcctttattgaaacagaagagatagaacctataacgctggctttccgttgtttacccataccgacaataaccgtttcttccagttcgtgtacatcttctttcattacgatgtcaagagccggtttcttaccgactgtgatttcttgcgatttgaagcctacaaacgagaatactagaatatctcctgcttttgcgttaataatgtaataaccattaatatctgaaatcacaccagtggatgtgcctttaattgcaacactgacaccgggtagaggaacacctttttcatcaataattgttccacgaacagaattgtcaattggagaaacgtttgatgtctctttcatcattgacaaaggttgtgttacttcatagaatgatttttgctcgttccctacatttgtacttgctgtagcatagctaggtgctaataatgcaatacacagcatcatacattgtagtcctttttttgagtctaaaattccgcgatggtatttagacatgtttaaggtccattgtttcataattttgaatttagtaaatagatttaaattgtgtttcagcaatatttaataatccgggaaatgtttgtagcgaaatagtttctagtattttccagcattgaaacagtcctctaggtacatgaaaacatcctttccatttaccacctttcaagggtaacaatacttcgcctcttctattcaagtatccgtaccattccggatattcagcgtccctaaagtgtgcccatgtataatcatgtactttttcaaaccaatccaaacactgtttgtctcctgtcaactgatagccttttaacaatgaaattaaagattcgatatgtacccaccagagtttctggtcccattccaattgttggggaggaaaactgttacgatctaaaaagtaaaagataccgccatgctccttatcccaaccgtattcaagcatggtaaaagtcgtgttttttgctttctctatcagttccggacgatgcagacgtttacccagatccatgataaaccacatcgcttcaatcgcgtgaccgggagtaatctggcgaccctcaaaacaatccacaagattaccgtttatatctacattttcgacaatgattccaccaagttcgggacgataaaagacgtccataacttcatggatgcaagtgttcatagctcgttccaagtagtctttacctaaaatatgctctatttccatagcgagattgcatagaatcatcggcagagcaaaattctttagattgcgtgtatcaggatgaagcttgttccattttcctttaggattatcaactttggacaagataatatcgaatgtctttctggcaatatcggcatactcctgattaccggttgccaaactcaattgtccgaaagccattgtcgcaaaagtataggagaaaatgttatacggttctaccaacggtctacccgaacggtcgagggaaaagtaccagttgtaatttccgtcatgtccgtatttctttaagaattcgccaccttgaacggcacagtccagccattcctggcgtttctccaccttattgtaaagcatggagaacatccatacctcacgcccttgcagccagataaacttgtctgtatcgaatactttgccttcacgatccagacaggtgaaatagccgccaaactctttgtcttgagagttttgaagccaaaaaggaagaacattgttcaacaattcatccctgtattggtccgatagttttttaaaatccatatatctttaaagtgttaagttaatatgatcttttttactgttccgaacggttccagtatctttcaatttcctccagtgacttcccggtcgtttccgggactagtttccatacgatgagcatatacggcacacacatgagcgcgaacaggaagaatgttccggtgggggtaaggttctggagcatccagggggttaactgtccgatcaggtacgttccgatccagagagcgaatcctgctatcgacatggccagtccgcgaaccttggtgggatacatctccgagaggagtacaaacaccacggcacagatggatacggcacagcagaatacatagaacaggaagaaaacaagcaggaagaggctggatactcccagggaatctccgaagaggaagtacaggccgatgagaatcagagaaacaaccattcccgaaactccataataaaccagcttcttgcggcccaccttatcgattatgacaagagccagaaccgtggtcaaagtattgactagtcctaccagaacttggtaaaaaagagaatcacctcctgaaagtcctgcattctcaaaaatagaagg

SEQ ID NO: 11903 - DNA, 6791 bp, Unknown
  gut microbiota DNA sequence
taatttgtataagaaaaatcctatctttaccgcgttaaactaactaataaccccattatgaaaagaaatcattattttctcctctttattttattaggatttttctttagtgttcaagcttcagatactgtccgagcttcagatacagtttttatccgtgaaacacaaatccccattctgatagaacggcaagacaatgttttgttttatattcgtttggatgctgaagaaagtaagtttctgaatgaagtcgtattagatttcagcaaaagcacgccacagcacgatatccagtcagtaaaactctattatggaggcacggaggcattgcagcatagaaataaaaagtgtatggctcctgtagaatatatatccagttttcatccgggaactaccttatctgccaatccgtcgtattcggtgaaatgtgcggaagtagtgagaccttccaataaagtagtacttaagagtaattataaattatttccaggcgtaaattttttttggattagcttgcagatgaaaaaagggacttctttatatacccgaataaactctgaactatgtgcggtaaaagtagatggcagagatttgacttgtaaatatctttctcctaagaacatctctcatcgaatggctatcggcgtacgtcacgcaggagatgacggatcggcagctttccgtattccgggattggtgactacgaataaaggaactttgttaggagtatatgatgttcgttataatagtagcgttgatttgcaagaatatgttgatgttgggttgagccgtagtacagatggaggaaagacatgggaaaaaatgcgtcttcctctttcatttggtgagtatggtggtttgccaaaagcccaaaatggggtaggggatccttctattctggtagacacaaagacaaatactgtatggatagttgctgcatggacacatggtatgggtaatcagcgtgcgtggtggagttcacatccgggaatggatatgaatcatacagcacaattgatgatggtaaagagtactgacgatggtaaaacgtggtcggaaccaatcaatataacggagcaggtgaaagatccatcctggtactttctacttcaaggaccgggacggggaataacgatgagtgacggtacattggtttttccgacccagtttatagattcgacacgtatccctaatgccggaattatgtatagtaaggatcaaggtaagacatggaagatgcataacatggcccgtaccaataccacagaagcccaagttgtagaaatagaaccaggagttttgatgttgaatatgcgtgataacagaggaggtagccgggcggtatccattacaaaagatttgggcaagagctggaccgaacacgcttcttcacgtaaagcacttaatgagcccgtatgtatggccagcttgctgaatgtcaaagcactggataatgtgttgaacaaagacatccttctattttcaaatccgaatacagtaaaaggacgtgaccatattacaataaaggcaagtttggataaaggacttacttggctgccggaacatcaacttttattggatgaagattcgggatgggggtatagctgtctgactatgattgataaagaaactataggcattttatacgaaagtagtgtagcacacatgacatttcaagcagtgaagcttacagatattattaaagaataagataattatattatgaagaaagctatttttggtgggttattgtgttttacctgattaatatattttgttaaattatccgtggaatatgatggaaaatgtgaaatatggcagaaaaataatatctttgactccataaatttattaataacttaacacttaattttttaatttatgaaacaactgttgaatttaaccagatgcttggcggtggcagggctttttgcttcttgccagtcagttcagcaagaagctaattatcaggtaattcctttgcctcaggaaatcgttgtagagcagggagccccctttatcctgaaaagcggagtaaagattctctatccggaaggaaacgagaagatgcagcgcaatgcgaaattcctggccgactatctgaagacggctacgggagaagactttaccattgaggccggaacagaaggaaaaaatgtcattatcctggctttgggaacagaaaatgagaatccggaagcctatcagctgaaagttgccggtgacggagtaaccattaccggttctacggaagccggagtattttatggtatccagtctttgcgtaaatctttgcctattgctgtgggagcaaatatagccctcccggccgtagaaatcaaagacgctccccgttttggttatcgtggcgcccattttgataccagccgtcattttttcacggtagatgaaataaagacttacatcgatatgcaggcattgcacaacatgaatcgtttgcattggcatatcacggacgaccaggggtggcgtctggaaatcaagaaatacccgaagctgacagaaatcggttccaatagaacggaaaccgtcatcggacgcaactccggtgagtatgacggtaaaccttacggtggattttatacgcagaaacaggcaaaagaaattgtagaatatgctgcagaacgttacataaccgttgttcctgaaatagatcttccgggacatatgcaagctgcccttgccgcttaccctgaactgggttgtaccggtggtccgtacgaagtatggagacagtggggagtatccgaagacgtgctttgtgccggaaatgatcaggtattgaaattcctcgaggatgtatatggagaattgattgaaatcttcccgtcggaatatatccatgtgggtggtgacgaatgtccgaaagtaagatgggaacaatgtctgaagtgccaggcacgtgccaaggcattgggcttgaaatcggataaggaacactctaaagaagaacgtttgcagagtttcattatcaatcatatcgagaaattcctcaatgctcacggacgccagattatcggttgggatgaaatccttgaaggcggacttgctccgaatgccactgtgatgtcatggcgcggcgaaaaaggaggtattgaagccgccaagcagaaacacgatgtcatcatgactccgaatacttatttatatttcgactactatcagtctaaagatatcgaaaatgaacctttcggtatcggaggttatctgccgatggaaagagtatacagctacgagcctatgccagcttctcttactccggaggaacagcaatgtataaaaggggtacaagctaatctttggaccgaatatatcgctacattcccgcatgcgcaatatatggtattgccccgttgggctgctttgtgtgaagttcagtggacgaatcccgataagaagaattatgcagacttcctgtctcggcttcctcagttaatcaaatggtatgaagccgaaggatataattatgctaaacacgtctttgaggtgcaggtccaatttgaaccgaatccgacagaaggggcattggatattatgttatctactattgataagtcccctattcattatactttggacggtacggaacctaccgttgcttctcctttgtatgaaggcgtgttgaaagtcaaggaaaatgcaactttgtctgccaaagctattcgtcctttaggagacagcaaggtgcttaccgagaaaattgatttcagcaaatctagcatgaagccgattgttgccaatcagaaaatcaatgaacaatacatgttcaagggagctgctacattgatagacggtctgaaaggaaacagtagttacaaatccggccgttggattgctttcaacgggaatgacatggatatgacgattgatctccaacaacccgtagagatttcaagcgtgtccatctctacttgtgtggccaaaggcgattgggtattcgatgcgagaactgtgaccgtagaagtttcggatgacggaaagaactttactaaagttgcttccgaagaatatccggaaatgaaagaagatgataaagacggtgtctatgatcataagttgacctttactccggtgaaaacgcagtatgtaagagttattgcatcaccggagaaatcaatgccggcatggcatggtggaaaaggtaaaaacagtttcttgtttgtagacgaaatcagtattgattaatgaatataagaaatagatacgctaaagtttgtcttttcttatggatattagggatgtgccttgcggtgcatcccatcaaagcacagtccgtaattcctgttccattgaaaatggagcagggtgcggactacttttttctatcagaaaagacaaagctttatacaaacttagagggggaagaagcgagactttgggagaactgtctgcaagcacttcctgtttcgttgaagaaaggttcgaaaaaggacgtacgccaagtactttcactgctgataaccgaaaagaatgaccggttgccctctccggaaagttacacactgtccgtcactccccgacgaatcattatctgttcaacttccggagccggattattctacggaatgcagacgctattacagttgcttaccccttcgggcacgggctattccgtcgcatccgttgaaatagaggatactcctcgttttgcttatcgtggttttatgctcgatgtttcccgccatttcttctccaaagaatttgtgaagaagcagatagacgcattggctttttataaaataaaccggcttcatctgcatctgactgatgcggcaggctggcgcattgagataaggaaatatcctttgctcactgactttgccgcttggcgtacggaaccgaactggaagaaatggtggaacggtggacgcgaatacgttcgcttcaatgaacccggagcttccggcggttattatactcagaaagacatttgtgagatacttgaatacgcccgtcagcattatatgacggtcatccctgaaatagaaatgccttcccattcggaagaagtgctggctgcttatccgcaactgtcctgttcgggcgagccgtacaagaattcggacttctgtgtcggtaatgaagaaacctttacctttctcgaaaatgtgctgaccgaagtcatggaactttttccgtcagaatatatccatatcggtggtgatgaggctggcaagtcggcatggaaaacgtgcccgaagtgtcaaaagagaatgaaagatgaacatcttgccaatgtagatgaactgcaaagttacctgatacaccgcattgagaagttcctcaatgcccacggccgtcatttgctgggatgggacgagatcttgcaaggaggtatagctcccaatgctactgttatgtcctggcgtggagaagaaggtgggattgctgccataacctccggtcatcgggctgtcatgacacccggcgcttattgttatctggacagttatcaggatgcaccctattcacagccggaagctatcggcggatatctgccattgaagaaagtgtattcgtacgatccggtttccgtttccctgactacagagcaggctaaacttgtttacggtgtgcagggtaacttatgggtggaatatattcccactcccgaacaggttgaatatatgatgtatccccgtatcctcgcattggcggaagtggcttggtctgctcccgagcgtaagtcatggcgggatttccatgcccgcgccttgaaagcggtgagagagttacaggcaaaggggtatcatcctttcgatttgaagaatgagattggcagtcgtccggaatccgtaaaacctgttgcccatctggcattgagtaagaaggtaatatacaattcatcgtatagtccccattatccggcacagggcaataccgctctaacggacggcatacgtggcgattggacgtatggagaccgttgttggcagggatttattgacggtgaccggttagatgtgataatcgatatggaaactgttactcctattcattccgttactgctgctttcatgcaagtgacgggtgcggaggtgtttttgcctgagtctgtcacaatctctgtctctgacgatggaaccaattttacggaattggaacaccggacttttgaagtcaccaaagaaattcctatccaatttacggacatctcatggaaggggaatgctacaggaagatacattcgctatcaggctcaagccggaaaagaattcggaggctggatattcacagatgagataatcgtgaaataatccgtgaaataaccgtgaggtactccgtgtcccaaaaataaaaaaagaaggaatccactcaaccagattccttctttttttgttatatttatagtattaccttaaaaactaacaattatgatacgacgacacggtaaactaacattgctcactcttcttttgtcggcttcgtgtagtggtatattcgctcaggagatacccgttaccacgcccatagactcattgataacagttggatatgccaccggaagtttgaaaaccctctccggttccgtagagaagattacggagacacagatgaataaggaccagataacgaaccctttggaagcaatccgcggacgtgtgccgggcttgactatccaacgcgggtcaaatggtccggcagccttggatgcagtacgcctgcggggaactacctcactgaccagtggcaatgaccctttgataatcgtcgacggagtatttggtgacttgagtatgctcacctccatttaccctacggatattgag

SEQ ID NO: 11904 - DNA, 5879 bp, Unknown
  gut microbiota DNA sequence
acacagtttattttatagtgccaaaatcttttcattcaaactaaggactacacatctccccaaccctatcactcttgaaacaccttctttaagtactcgatattcgttccataattcttcctcacattccttacatcctccttatctcgcgagcgttccacgaccagccatccgctccatcccatcttatcgagcgtcttttttaccttattcatgtccagccgcttgttgaacggcagggtaactccgtccgtatctgtgcaatgaatctgacaaattctctttttccccagaatcttaagctctttgcacaaatcccgtccattctccaatgcattctgaaatttgaaataaatcttgatgccgggagaatttatctctttcagcagtttcacctccccttttgcatcaagctgagtttctataccgatgaccagaccttcggaagctgccatatctcctacctctttcaaacgttttactactgccattctaagttccggctcattctcccatccggccttaatacctcctaatggaagaaaagcgaccttagcccccatcacttgcatggcgtccaaacattcccggaccaattctttgtaattagtccgttctaaaaaagactgcccgtaaaatccggacatggcaatagatgaaacttctacttggaatttctgtgcagtttcccgaaacagttgctggaaatgaggttcacggagcttattatcaaatctttctcttttgccaagaccgcccatatccagttccacgccatcccctttcaattcatgcaccaattgaaaagaaccgattttctgacgtttcagaatcatccagtcgcatacggcaatcttataacgctgttctttttgttgcgctccggcaacggccaatagagggaaacatccggcaagcagtaatacccataggatacacttcaacaaattccttttcattatcattctattttatacacgatttatgtactagacgaatgaaagagaattttgtaatcgcttataacacaaagaagaaaataaaagaaggaaagagagaagaagagaaaagaatgagaagaaaaatgagaagaaaaatgggctgccggaccctgaaatgtccgacagccctgtcaacccaaaaacgatacctatgaaacactgtgcgtcatttcaaatcaaaatatatgtgttgaccatgaacaagttcatcatgtgtgatacgatatttattgaatttctttccattcagtaacaccttattgatataaagagttcccggttgggcgcgattactttcaatcactaattccttttctttataccatttcggatccaggcgaatagtcaccttgtcgaataccggagtcgtcaatgtatattccggcaatcccggacaatccggatagaaacctatcatattgaaaatagcccatgaagacatcgttcccgtatcatcatttccggggataccatccggcttcgttgtaaaatacttatccaacaaccgttgcgtttctttctgcgtgcgccattcctctcctttaaaataagagaacaaataaggatatgcaatatccggttcgttggcaggatcataaagtccttcatcaaacaccatctgcaacttgtcaatgaaacgtttcttgccccccatcaactttgccagtccatatacatcatgcggcacataaaatgtataattccaggagctgccttcatgaaaaccgggattcggctcgaagttctctccctgtctcggattaaacggactataaaaagtaccgtcaggcaatatcggacggaacgttccgaactccttgctataataatgtttataccctaaagaccgcttatagaacagttccgcatcctttttcttacccaaagcctctgcaaaacgggaaagtgcaaaatctgcaatataatactccaaagcgtgagataccgaattgtcatactgttcgcggaggggcacgtatcctttcgacagataatcgtcattgtcaggacgcatcagattgtccgctcccggcagtgtagccgatttgtacattgcttcgtatgccagctccacatcaaagtcacgcaaacctttcatccatgtatctacaatcaccggaatgctagggtcgccttccattgtcaatgtctctctcccatacaattcccatttcggcaaccacccatgttcacgatacatatccaacatggtgcgtaccatctccatctggcgttccggataaaccagtgtcaacaattggtgaacattgcgatacgtatcccaaagagaaaatactgtatagcggtctccctttgtcgtcataatcttatcgctttccattgccggatattctccgttggcatcctgcaagatattaggatgaatcagcagatgatagagtgccgtataaaacacagtcttctgcgcatccgttccgccctctacagtgatacgtgacaagtcgtcattccatttagcatgcgcttcggcaagaatctgctcaaaattctttccttcctgttcacggttcaggttcaaccgggcattttcaatgctcacaaaggaaactcccatctgcacttctacctgttctccctcttccgtttcaaaagaaaaataagtcccgatgtcatcaccggctatttcttttccatagcgggtatagagtttatacttcccctgatccgcatcccattcggcttccacacccgtcatcggacgttgcttcttccagtagccggttgcagaagggacttttttaacccgcatcacaaagtaaatagggaaaacagcttgaggattataacagaacgtaccgagcagtttcatgccttccacctcgcaatcactgacacggcggagcatagcaccactttcgttcgtcagtccctctcctaaattcagcaatatatggcttttgccttttggaaaagtaaaacgggcgatacttgtacgtggagtagcggaaacctctgtcttgacgctatattttgtcagataattggaataataacccggtgaagcctgctcatccttatatttacttccgtattctttataatccacattcagctctccggtagtgggcattaaaagtaaagaccccaattccggacaacctactccgctcagattgacatgagcatatcctgtaaagaaacaattggtatattcgtatggagtagaccaccatcgtgcatctttatcatacgtgttttccgaagagcccatcacattaaaaggaaccacggacatcattccgttcggacacaccgctccgggattggtcgtgccgaaattggtcgttccgataaaaggatctacgtaatcaaccggaagactcttatcagcggggggacttccaccctcccccgcatatacgggaagaagggcgaaagcaagtgtgtaagttaatagaatacgtttcatggctttattaaatgatacttgtccgtttagtaaagtcgataatctctttaatatatccgaaggccatacccacaacagtgtcggcggcgccataataaacagctacacgttctccatcctgcaatgcggcacaagggaatactacattcggcacatctccctgcagttcgtacggggcagccggacctaacaaatattcgcgggtacgatacagcactttttccggatgatccttatcgagtatggcagctcccattgcatagcggaaaccgttgcaggtagtaatcacaccgtgatagaacagcaaccagccttcatccgtaaggaaaggaactgaacctgcaccaatcttcgtacactgccaggcgctttccgggaaaggagtcactttcatcacgcaacgatgttctccccagtacttcatatccgggctataactgatatatatatcaccgaacggagtatgcccgttatcactgggacgactcagcatggcatatttaccgtctatcttctgcgggaaaagcacaccgttacggttgaaaggcaggaaagcattttcgcattggaagaactccttaaagtcgaaagtataagcaatgccaatggtaggaccatgataaccgttgcaccaagtcacccaataacggtcttcaatccacgtcacacgggggtcatatttatattccgattcgatcatctccgtgttgccggctttaaactgaataggttcatgattgatatcccaatgaattccgtccttactaaaacctgcaaagatattcatctgtacagctttgttatcacaacggaatacgcctgcaaaaccatcctcaaaaggaacgacggcactattgaaaatactattggatgaaggaatatgataacgtccgataactggattttgtgagtaacgccacataacgtccgtacatccgacaggacgatcttcccaaggaatttgaattttattcatgatctttgattgtttatattgttatttttttgaatcgtcatacgtaaacggtatgaaataagtaatcagaaaagccggtatagttgctatcagaacataaataaagaagttccggtagcccagcaggtcactgaaatacccgctaaccattcccgggagcatgactcccagattcatgattcctgatgcaaaagcataatgcgacatctggtgttttcccggagcaatctgttgcatcataaacaacgtcaatccgacaaacccgaagccatagccaaaatactccatcgtaatgcacgttcctatcagatacacatcggtaggctgcaccaccgcaaggaaagtataagccacaaacggaagattgaagatgcagcagagagtgaacaaagtcttcttcaatccgaacttagatacataaatacctgccaacagtgaacctaacacgaaagcggcagaaccaaaaattccgttcaatgtaccaatctccttcaaagacagtcccaacccgcccgcttctctcgacgcacgcagaaacagcggagcaatcttcattatgaatccttccgccaaacggtagaggatgatgaaacagatataataaagaatatgctttttagtaaagaaattagcaatcacacctaccaattcccgtcccacttccgaagtcgtttttttcgttgttgagggaatctgtgtagaaggcagtacctttatatgatagatacctatcaataccattatcactgcgattactgcgaaaataatcatccatgcagacgaatacgcacctttattggcatcgattgaagctccctctatcgccccgaaatgttccgccaatgcacctgccatagcgaccagtccaccgttagctaccagtttggctacattatagaaagcaccttgcacaccgatatatttcgcctgatcctctttgttcagttccgccatatatacaccgtcgcaagcaatatcatgtgtcgcgccgctaaaagcaatcaccgccatcgtcgaaatactgatagcgaagaaatagtcgaagaataaagaaaaagccaccactccaaacaacactccgctcaacaattcggtcaccagtacgaagaatttctttgtccggaacatctcaagaaaagggctccacaagaatttcagcgtccaaggcatcataataagggaagtccagaatgcgatttgtgtatccgacactcccagatccttaaacataaatacggaaaccagattaatggcaataaagggaagtcccattgcaaagtaagcagtgggaacccagcaagccgggttaatagtctttcgttgagaagcagttttattctgttgcataaatcatagtatatagatgaataaactcatttttctgaccaatctatatatagtacaactaaagggaggaaactactaacgtcttccctttgtttttttcatttattatcatttcaaccatgcg

SEQ ID NO: 11905 - DNA, 2106 bp, Unknown
  gut microbiota DNA sequence
atcgttgacatgatattttgttccccttctgtttccttctgaaataaggaatccttgattacaaagctttttcagcatttttgtaatatcagaacggtgttgcggaataacatattgcagttgggtattattaatccccccctcactgtaacaagttactaaggctgtcaactcatcttgcgtcaagttctcaacctttccatcaaacagctcctttagtttaattacagcatcatccggcaataaactaatcataggcagggttagttccaccttatccggtcggctgaattcttcaacatacggtttctgccagtttgcttccctccaacctttaatgatcttattcactccgcttcccgctttttcggaaaacccgattagcataaacatcttctgcaaggctttattgcggcagacgctatctcctcctagataatattgagctttgctgaccagcattgttccgggatttttaaatcggtacttatctacccattgttcgacaacaatattgccctcctccgagaaatcacagtggataagcgtattgataaaagcttcgcgcacagcaatgtgcgtaggtgtctcatcaatacgtattccgtttctgataaggaagggcttaggcaggggagcagttagtttgggatgaaccttgcgataaaactgaaagagattggcttcccaagttccgtccggacagattctatccgtccatcgaatatcggagttttcgttaagatgctctctatagtcggggaaataattgggcgcacattcgggatcggtaatactttctgtctttccaaacatcagtatgcctgccaatgtgaaaccttctactttcgtacttctgtccttgcgatatgcttcaagtttagtcagaaattcaatatcatttaaattaagccatggatgagatggtttcaaattggcaaaaagctgtctgtattgaatcaatgtttccttatcaatgtcttccatcgagtaattgggcagaatcctagagtcacggggatgactttcgtccgaatcggcaatcatgcgtctgacttctgcatccgtacacttataatctccttcatggttgcgtttaaatgtatgcccaccgaaagggtttcttgtcctgtagatagggcgctgcacacggtttgcacagggaacatagatgagaagcagatttctttctttatagcgaccttcgtataagtcattgtcggaaagcagattctcatttacgcaatccggattattaatttgattccagaagtcttttttgtattggctgatttgttctttagtcagtccttctataatgaattgctgtttatgctctttcacaccaagcacaatgactcccccatccgtattggcaaaagaagaataagtatcccataagctattaggaagaccatctttggcaaccttgaattccaaatctacagcctcctctttttgtatcaacgagtctatatagtcggtaaaatcccactcttccagattgttgagtacgataggtttcttattttccatttcttctttctgctttattctctgcaaaaatacggataaattcgtacctttgcatatttctatcatatttaatgattatcagacagtaaaatgaatataaaagattttgaaataatggctcctgtggggtcgcgcgaatctcttgctgcggccattcaggcaggtgccgattctatctatttcggtatagaaaacctgaatatgcgtgcccgttcggctaatacattcacgattgatgatttgcgggaaatagctcgtacgtgtgatgagcacgggatgaagagttacctgacggtcaatacgattatctatgataaagatatccctctgatgcatactattgtcgatgcagccaaggaagcgggaatttctgcggtgattgcagctgatgtggcagtgatgaattatgcccgtcagataggacaggaggtgcatctttctacccagttgaatatctccaatgcagaggctttaaaattctacgcacaatttgcagatgtggtagtattggctcgtgagttgaatttggaacaggtggccgagatttatcgtcagatacaggaagaacat

SEQ ID NO: 11906 - DNA, 9530 bp, Unknown
  gut microbiota DNA sequence
aagataaacaatgcaaatatagtgaatgatgtgaataaaacctgttgaaaacagaaataaatgttgtgcctaggttataattgtaataacctttggagtgtatatttttattgtgatgagaaaatatctcatcatgttgagtatttaaacgcgattattattcaatatataaataatcatagtgtacaacaggcttctttccatgttttccgataacctctttggcttgctgggagtcacagtttgcttttcctacacccacttggtttccttgaaagtctatgatacggacaatatcgtctttttcaaattctccttcgatatgagtgatacctatcgggagaatactgactgctttctccgaactgagtacctcagtggcacatttgttgatgtgaatttctcctttggcaaagccttcactatgtgcaatccacttcttgatactggataccggttcgcaagaaggaatgaagcgggtgcaaagagtgctttcggggtgttctaacaagtctaccaagatgttgttacgtttaccattggcaatgataaccgtaattccttcatcagcaactttgcgggcgatatttgttttcgtcagcatacctcctcgcccgaagctggacttgcttgcttgaatatagttggatagatctttcccatgaccgatttcccgaataacggaagaatcgggatcggacggagagccgttatagattccgtcgatgttgcttaaaatgataagtgtctgcgcatccatcatagaagctatgagtccggacaattcgtcgttgtccgtgaacatgagttcacttacggagatagtatcattctcgttgacgataggaatcacattgttttcaagcattaccgtcatacagtttttctgattcaggtaatggcggcgcgtactgaaactttctttcgtagtcagcacttgtccgacggtaattccgtgctcacggaaaagttcgtaataacggttgatcagtttggcttgccctacggcagagaataattgtcgctggtctacactatcgagtttcttctgcggatgtacctcgctacgtccggatgcaacggctccagaagaaataaggatgatttctacaccggatttatgtagttctgctatttggtcaacaagtgcagacatacgggttacgtccaatgttccgtctcggcgtgccaaaacattactacccacttttactgcgattcgtgtaaattcctgtttcatctttgctaacgatttgaaagcacaaatatagagctttttgtcgatatgttaccaaaacagcctaaaaagaattatctttgcagccggatagagaaaagaaaaacaatgaaacatacaaatccgcaagtagaacagatgacctccttcatcgtaatggatgtgttggaacgggcaaacgagttacagaaacaaggcattgacattattcatttagaagtaggtgagcccgattttgacgtgccgtcttgtgtagcagaggcggcgaaagctgcttacgatcggcatttgactcattacacccattctttgggagaccctgagttacgtcgggaaattacagctttttatcagagagaatatggagtggcggttgatccggactgtatcatcgtgacttccggctcttccccctctattcttcttgccttgatgttgctttgcaattcggagagtgaagtggttctttccaatccgggatatgcctgctatcggaactttgtgctggcggctcaagccaaacctgttttggtgccgttgtccgaagagaaaggattgcaatatgatatagaagctatccgcaaatgtgtgaatcagcatactgccgctatttttatcaactcacctatgaacccgacggggatgttattggaagaaagtttcttgaaagaagtagcggctttgggagttcctgtcatttcagacgaaatttatcatggcctggtgtatgaagggcgtgcacatagtattctcgaatacacggatcaagcatttgtgctgaatggattttccaaacggtttgccatgaccggactgaggttggggtatctcatcgcaccgaaatcttatatgcgttcattgcagaagttgcaacagaatctgtttatctgcgcatccagtgttgcccagcaggcgggaattgcagctttacggcaggcggattcggatgtggaacgtatgaggcaggtctatgatgagcgtcggaaatatatgattgcccgtcttcgtgagatcggatttgagattaaggtggaacctcaaggggcattttatattttcgctgatgcacgcaaatttactgccgactcttatcgctttgcattcgatgtactcgagcatgcgcatgtcggtattactcccggagtggactttggtacaggaggggaaggatacgtgcgtttctcctatgccaactcgttggagaatatcaaggaaggactcgaccgtatcagtcgctatctttctcgtcccgggctctgataagctctgtggcggcctcatattcctcctctgtgacaaggatagagacagcaggagcgatatagggggctagcgttcccataataccgtctttgacaacgcaacgaatgtcattgctttccaataaacccttgatgatttcagcttcccacggggagccggagaacacctctattgacttgctataatccttttctttcatgatcttatatattaagggttgctatttacaaatataacaaaaaagaaagacaaatggttatccttcaattaaaatttattcaagcgtgatgtgtttaacacggatttgctgttggaggaaggtggaagctgattcagtgaacttctcttccgcctctgtcgtgtaaaacgagcagttcccgtttttcgtacatttcgcgtccatttccggatgtctcctcaaatagtctttcaggctttgggctacatattcgccttgcgaaatcacgctgatatgttccggaatgtattgccggattttaggtaggagtatgggaaagtgcgtgcatccgagaatcacggtgtctatttgcgggtcttttgtcagtagttggtctatgtatttacggataaagtaatcagttccttcgttttgtgattcattgttttccaccaacgatacccacatcggacacgctactccgctcacccggatatccggaaataatttatgtatctccaacggataagattcggactttacagtacccgctgtagctaatatgccgatatgctggttttgggtgatatttccgatacattccactgtaggacggattactccgagtacgcggcgagccggatctatattgggaagatcgttcatttgaatgctacgcaaagctttggctgacgcagtgttacacgctaatatgaccagatgacaccccatgtcgaacagtttgcttacggcttgccgggtaaactcgtatacgacctcaaaagaacgtgtcccgtatggagcacgggcattgtctcccagataaatgtaatcgtattccggaagtacctctcttattttatctaagatggtcagtccgccatagccggagtcaaatactccgataggaccgggagcatgggataaatgttgattcatgacatacagtatttatgtacgcaaatgtacgccaaaaaaagggaacgagaaagaagattaatcttctttctcgttcccttttttatattttcgcttcttggaactctcttttatttgattccaagatttgctttcaccttattagtcaggttgatactttgcgcttcgtttacgtaaggtattgaagttctagcaaggtcgaagatatagataacaccttcagcagcacctactgctttgatggcatcatccagtttcttgtagataggagccattgcgtcagtctgagctttctgcatctgctgctgagcgtcttgctggaattgttcctgtctctgcatcatgtcctgcaactctttttgtcttctttcagcgatgttagccggaagagagtctttggccatagcctgttggaattcctgatattttttgttgaattcttcctgagttctttgaagttcggcagtcagttgtttttctaatgtctggatatcattttgtgccttcgtaaattccggcattacagtgataatctcctgcgcattaatatgaccgaatttcagattctgtgcaaatacacccattgggagtgcaagcaacattacaagtgcaatttttttaagcatagttctataatttatttgaatgatttttagttatttccggatgcaaatgtatgaaattaatttgaatatcctagttttcttagtatttcatcgctaatatcgatacgcggattggcaaaaatgatgcctgtcgcagaggccctgtcgaccaccagatcatatccatattgttgtgaaatggcttttaccgcttcgtaaatatcatcctgaattggagtgatcagcttgtctctcatcttggccaattcaccttccggaccgaaatagttgcgcttcaactcagcagccgctttttctttggctacgatttcatcttctttctttgtcttttgagcggcagagagagtggaggatttcgcttgataatcctgaaacatcttctgagcttcttttgccaaagcttctacttcgctctggtattttttcgtagcttgttgcatttgctcgttggcgctttgagcggtcggaatatttttcatgatatattccgtatcgatcagtgcaaatttttgtgcgttggctgccatactgacggcaaccagcatcatgattaatagaacagactttctcataacgtttagtttttggtgatacattagaattcttgtcctaagataaagtggaattggcttcctccatattgtttagaacctaatacttggtcgaaaccgtaaccccagtcaatacccatcataccaatcatcggcaggaagatacgaacaccgacaccggcggaacgtttcaagtcgaacggattgaatttcttgatatcatgccaagcattaccggcttccaagaaacctaacacataaatgttagtacttgtttccagcatgagcggatatcttaattcaatgccgagacgtgcataagcgtaaccttccgaaccgtatggtgtcaatgaactgttttcgtaaccacgtaaggcaatactttcggttgcataagttgaataaccagtcataccgtcaccaccaacgtcaaatgtaccaaacggtgactttttgaactcgttgtagtgtcccaacaagccgaattccgtacgggtcatcaatacaagacatttcggatgtgcaaccgggtccatcaacggagtgtatgttttgcctttgaatttccatttgtggtattctacccatttatgaagcttgttcatattgtcttgagtaatggttccggtttcaggattgctgtaatatcctttatagtctttgccgtccattaatgagtaaggcggtgtgaactgcactgacaatgagaaatccgaacccgaacgcgggaagattgggttgtcaatagagttacgtgccaaagtcagtgaaaggctgaggtcattacatttaccgtttgttaccgggaagtactgccagtctttcaagttgtaacgttgataagccaactcggcagaaagggtgaaatagtcatccggccatttcagacgtttaccccaaccaacggaaagtccccacatcttgatcgatttatcggggtcataatagttctcgtagttattgtaattgccatagttgtacatgccataaccgccataaccgctatacatactgttatagtagttgttaaagtagctggagttgtagtaacggctactgatatctgtctgtacggagaagaacgccgaaacagagaatgagttcgggcgtttgccgccaaaccaaggatcgaagaatgaaatactgtatgattggtagtatttggcattcgtctgtccgctgatagtcagtgtctgtccgtcaccttgcggcaggataccgcgataattctcacccggatgcagtaagttggcaacagagaagtttgtgaacttcagactcagtttaccgataatacctgtttgtccccaaccggcagagaattccacctggtcattggctttggaagtcaacggcaggcctatgtcaaccgttccgttcatcgggtccggttgaatatccggctgaagtttttcggggtcaaagtgtcccatctgctggatttcacgcaaagaacgcatcaagtcttctttgctgaacaactgtcccggacggatacgaagttcacgacggactacattttcatacagacggtcgttaccgctgatgttgatcttattgatagtagcctgacggccttcatagattctcatttccaggtcgatagagtcgcctacaatgttcacttctaccggatcgaggttgtagaacagataaccgttgttgtagtataagttaccgatagcgtcatcatctgtagagatacgttcgttcagcaacttctggttgtacacatctccttttttcatacgcagaaggaagtccaactgttctgaaggatacagcgtgttacccacccaagtcacgttacggagatagtatttctgaccttcctcgatatcgagataaacattaactgttttctcgtcgtattgtgagatactgtcttttctgataactgcatcacgataacctagctcattatatttgtcgatgatgagttgcttatccgcttcgtagttttccggtacgaatttcttcgtacggaacaagttgcgaagtttccctttttcattggttttcttcattactcgtttcagcttggaagctttgattgccgtatttccaacaattttgatttcgtgaacttttactttctctttcttgtcaatgtcgatgtccacaattacttggttctcgctggagggatcatctttttgtgcgatgataacttctgcattcttaaaacctttatcgtcaaaataacgcttaatcaatgttttggcccggtctacggtattcggtgtaatctgcatacccttcaccattcccaacttaccttccaaatcggtacgctctgacttcttaacgccatgatagcgtacctcagagattcggggacgctgtgtcagactgatttttaaccagattttgttgccttctatcttttcggctgtgatttgtacgtttgagaacaagccatgacgccaataacgtttgattgctccggtgatttcgtcacccggcacagtaattgtttgtcctaccgacagtccggatagtccaatcaatacatagtcttcataattcttcacgccttcgaccttgatatccgctatctcatactttttgggtgttccagagtataagataacaggtttcgagtcttcatcagtgttggcattttgcgcaatacctgttgttgcaaaactgaacaggcagataaacgttatgaatataaaggaaatacgataatgcatttatgttataatttgatgtttcgagttatattagctgatttgttcactggtcttgccgaatcgtcgttcccgctgttgatattcgcaaacggctttatagagttcttctttgtcgaaatccggccaaaagatgtcacaaaaataaagttccgaataagcacattgccatagcaggtaattgcttagtcggatttcgcctcccgtgcggattaataaatccggatcgggcataaaattagtattcagatgtgatgcgatgcattcgtctgttatctgttcaggagataaatctccttctttaatcttcgtagctatttgtcggactgcttcggttatttcccagcgtgaagagtagctaagtgccaacactagacacattcccgtgttttttgcggaatgatctatgcatgatgttaaactatcctggacttcaaccggcaatttctttaagtcaccgattacattgaagcggagattgtttttcatcaatgtctcttccttaatagaatccagcaatagattcatcagtgccgtaacttcctcttgcggacgactccagttctcggtggagaaagtatacaaagtgaggtacttgattcccagacgggctgcatcttcggtaattctctgtaccgtttctgcgcctgcatggtgaccgtaagtacgttcttttccccgttgctttgcccatcttccgttaccatccatgatgatggctacgtgttggggtatccgagttttgtctatttgctctatataggacatttttctgttttaaacgtatgcgtttattattgacctgcatgcttgggactcttatcaaaccataattggtttaagcgtgcacgccagatttctgaatcatgactataaggatgtgtattctcaccttcttcgagtaaaacatctcccttactgaataagaagtaaatgtagtcattctttgtgtcttgtactacggagtaattagttcttcccatgaattccggtttttctattgttggtttgaactcggggtcactccaatcctgataagggaatgagaactttttgtccgctttttgccaagcaattccttcattctttgaaacatagatggattcaaacttgtcaccaaaagtataaagaaggttattgtaataaataatagtcggattcttgaactccgggcaataagcaaccgttgaagtggttcccaactcagcccatgttgttccattgtatccccatgctatgctgactggaatttctttatcaccaaccgttattttgatagattcatcatgttcacctattataacattctgatattgtcctccttttttgaaagttgtgtatgaaatgttctttgttgggaaattctcaccggctgcttgtattttagtttcagcatttcctatccctagttccgattctaaaatggaatacaaataacgtacgttatcttctgtcttgagataagtggcttgttgaatgtacttctcttcttcggtttggctattgtcattctcaatgggtattgctgaaataaatgtatttacttcacctgaaaatttatttgattctgtccatgctataccgtcggtagattcatataccttattatctgcggtagccaatataatcttctctaagggtaatatggagttaggaagagttgctaatcccgttgcattttgcaaattccaattagataagtcactactactatgtacttttacacttgacccatccatagaataggtgaaatattcatctttaaatttaatggttttctgtgctcctttaatctcatcacctattttcccgacatatccccagcttaaagaatccggatcatgtttgtgtactctaacctcaatagtatatggctttactttgttaggggctattcctgccagtgcctcagtagaccataccttgatttctaattttttacgaaggtctagtgaatcgttaatattgataatagagtctcttccttctttgtctttcatggtgatgacgcctgaagctgttgtcagcgtcttaatcaag

SEQ ID NO: 11907 - DNA, 24101 bp, Unknown
  gut microbiota DNA sequence
ctaatatgtacaaaattgccggtgagttcttgccttgcgtattccatgtatctgctcgtacattggcttctcacgcattgtgtatcttcggtgaccaccaagacgtaatgtcagctcgtcagactggcttcgctatgttggctgaaggttccgtacaggaagttatggatttggccggtgttgcccacttggctactatcaaatcacgcgttccgttcatgaacttcttcgatggtttccgtacttctcacgaaatccagaagatcgaaatgttggaaaatgaggacttggctccgctgatcgaccaggaagctttggctgaattccgtgcccgtgcactgaatccgatgaatccggttgctcgtggtatggctgaaaaccctgaccacttcttccaacatcgtgaatcatgcaacaactactatgaagcagttcctgctatcgtagaagaatacatgaatgaaatttctaagattacaggccgcaaatatggtttgttcgactactacggtgctgaagatgcagaacgcgtaattatcgctatgggttctgtaacagaagctgcccgcgaagctatcgactacttggtagcaaacggtgagaaagtaggtttggttgccgtacacttgtatcgtccgttctctgctaaacacttcttggctgctgtacctaagactgctaagactatcgcagttcttgaccgtacaaaagaaccgggtgctaacggtgaacctctttatcttgacgttaaagattgcttctatggtgttgaaaatgctcctgttatcgttggcggtcgctacggtctggggtcaaaagatactactcctgcacagatcatcgcagtattcaaaaacttggctatgccaatgccgaagaaccacttcactatcggtatcgtagatgacgttactttcacttctcttccgcaagaagaagaaatcgcattgggcggtgaaggtatgttcgaagctaaattctacggtctgggtgctgacggtacggtaggtgctaacaagaactctgtgaaaattatcggtgataacactgacaaacactgtcaggcttacttctcatacgactctaagaagtcaggtggtttcacttgttctcacttgcgtttcggtgatactccgatccgttccacttatttggttaacactccgaacttcgttgcttgtcacgttcaggcttacctgcacatgtacgacgtaactcgcggtttgcgtaagaacggttctttcttgctgaacactatctgggaaggtgaagaactggctaagaatctgcctaacaaggtgaagaaatatttcgcacagaacaatatttccgtatactatatcaacgcaactcagattgcattggaaattggtttgggtaaccgtaccaacactatccttcaatctgcattcttccgtatcacaggcgttattcctgttgaacaagctgttgaacagatgaagaaattcatcgttaagtcttacggcaagaagggtgaagacgttgttaacaagaactatgctgccgttgaccgcggtggtgaatacaagactttgactgttgatcctgcttgggctaacctgccggatgacgctaaagttgaaaacaacgatcctgcattcatcaacgaagtagttcgtccgatcaatgcacaagacggtgacttgttgccagtatctgcattcaagggtatcgaagacggtacttggtatcaaggtactgctaaatatgaaaaacgtggtgtagctgcattcgttccagaatggaatcctgaaaactgtatacagtgtaataagtgtgcatatgtttgtcctcacgcttctatccgtccgttcgtactcgatgctgaagaacagaagggtgctaagttcgaacaactgaaagccgtaggtaaagtattcgacggtatgacattccgtattcaggttgacgttctcgactgtctgggttgcggtaactgtgctgacatctgtccgggtaatccgaagaagggtggcaaggcattgacaatgaaacaccttgaaagtcagttggctgaagctgaaaactggacttattgcgttgacaacgtgaagactaaacaacatcttgttgacatcaaagccaacgtgaagaactctcagttcgctactccgttgtttgagttctcaggtgcttgctccggttgtggtgaaactccgtacgtaaaattgatttctcaattgttcggtgaccgtgaaatggttgctaacgctaccggatgttcttctatctattccggttctgttccttctacaccttatacaaagaacgaaaacggacacggtcctgcttgggctaactcactgttcgaagacttctgcgaattcggtctgggtatggaattggcaaacgaaaagatgcgtgcacgtatcgtgaaagtaatgaacgaagctattgctgctgactgtactcctgctgaagctaaagaattgttcgctgaatggatcaacaatatgttagatgcagacaagactaaggaattggcagctaagatcatcccgatggttgaagctaacaaggataaatgcaatcactgcaagcaaatcgctgaactgcaacaatatcttgtaaaacgcagccaatggattatcggtggtgacggtgcttcttacgatatcggttacggtggtcttgaccatgtaatcgcttccggtaaggacgttaacatcctcgttctggatactgaagtttactccaacactggtggtcagtcttctaaggctactccggtaggcgctatcgctaagtttgctgctgcaggtaagcgcgtacgtaagaaagacctcggtctgatggctactacgtacggttatgtatatgttgctcagattgcgatgggtgctgaccaagctcagactctgaaagctatccgtgaagcagaagcatatccgggaccatctttgattatcgcttatgctccgtgtatcaaccacggtctgaaagctggtatgggtaagagtcaggaagaagaagaaaaggctgttaagtgcggttactggcacttgtggcgttacaaccctgctttggaagaagaaggcaagaatccgttccaattggatagcaaagaaccgaattgggaagacttccaaggtttcttgaagggtgaggttcgttatgcttctgtaatgaaacaatatcctaacgaagcagaagaactgtttaaagctgctgaagcaaacgctaaatggcgttacaacagctacaaacgtttggctaaagagaactggggtgctgaataattaatcatactcaaataaatataaaaagggagtctgctcaaccgcatgactcccttttttatgtccaagccagttttatataagaccgatttttataataccggttatgaactaatttcgaagttgtcagacttcggtatccagctatccaccaactgccgatgttcatcccgccatttgcgtgcaatctcttcttcatccattcgagcgtctttcatagctgtcataaaagagctaagttcttctgtcgttaatttgatattagcgaaaaattcagcggcaaacggatcttttttactgaaacctttccaggcaatggcatgtatttcttccagatctccatatacttttttcggatcatccaggaatttcaggtcaaactgatcgaacatccaatgcggtgtccaacctgtaatgacaatccattctcccctatccatcgcttttttcaaagatgccaacatggttgagctacttgaagtcatgagggtatagccgtcaaaaccgtaagttgagatggccttgtccgtagtcttcataatacctgctccggcatcaattcccactatctcagaagaaaaccgatctttattggcagccagttcatcaatggaattaatggcaacatattgaggcacggctagcccgacgcgtgcttctccatatacttctcctaaaaattcgatgctatcaccgtactgatccatataatctttcatcgttatcggtaaccaggcatctagaaagacatctgaattctttccagatatggatacgaaaataggggcaagatcagcattctgtagttcaacctcgtatccttgttcttccagtaccacttttgccaaatggctcatggctattccttccaaccaattggcataggctatttttacttttttcttatctgggtcggaatctgcacaggaagccagcaaaagcagagcagtcagtacgattcctactaatttatatattctcatttttattcctttctgttttctgtctttcttattttagttcttgcaattttaacccttcttattttttcttcctgccattccttgtgtgatacggtctaagatgatagctaaaataactaccgctataccaccttcaaatccaagtccgatcttcatctgggtgatacctttcaatacaatttcccccaaaccaccggcagcaatcattgcagcgattacaaccatagaaagtgacatcattattgtctggtttacaccggtcaggatggtgggcagtgccaaaggaagctgtactttatatagcagttgccaacgggtagctccaaacgaacgagaagcttccactacatttttaggaacctgtcggattcccaatccggtaaggcggactacaggaggcatagcaaagataatggtggcaaacactccaggcactgctcccaatccgaaaaacaaaacggcaggaatcagataaacaaaagcaggcatcgtctgcatcaagtcgagaacaggacggagtattttctctgcacgcggactgtttgccgtccatacccccaaaggtacaccaacaattagagccagacaggtagatgataaaacgagagctagggtttgcattgtagcttcccaaaatcccattccatagatcaataataatcctaatgcagtgaaaattgccgtaccacgccctgctttcatccatgcaagtgcagcaagtatcaaaatggttatataaaaaggtattccgaaaagtatgtgctggaatcctataataaaactaccgatgcctgcattcacggcatcaaagaaagtggaaaaatgtaccatcgtccaattgatggccacctctatatattgtcctatatttatcataaatctattgcgttttgaattatttcgtttatttcttctttatcttttccggtcacttcaatgattaaagatgaaagtgggattgtccccaaaaactcgcgtgtctcatctatcacccataccggtgaattgctctttgtcattaaaggaagcatatcctccaacactgtatcctccaacacagaatgtacttctgtacgcacaactgtttcaatggatttttcctgcctgctacgtaatttaagcaaatcgttcaggcgcacttccccgaccagtttatcgtcggcatctattacaggtaatacggttatattctttgcacgcatcttacgaatcaaaacttcggggccttctttcttcagacgagccaccaacggtttgtcaatcattaaagaagaagcggtaataattttgctcctatccacgttttcaacaaaacgggctacataatcgttagccggttcggtcaggatttcctccgaagtacctacctgcaccacttctccgtctttcataatcgcaatacggtcacctagtttaattgcttcactcaaatcatgagtaataaagacaattgtctttttcatcttcgattgtagggccagtagctcatcctgcatctgtacgcgaatcagaggatcgagagcagagaaagcctcatccattaaaagtacttcgggattattggccaaggcacgtgccaatccgacacgctgttgcattccaccggaaagttcacctaccatctgattctcatatcctttcagtccgacaagcttcatactttccatcgctttcttttcacgctctcccttcttcactccctgaagttcaaggccgaatgcgatattgctcaatacggaacggtgaggcaacagaccgaaattctggaaaaccattgccagctctttccggcgaacctgcaatagttctttttcggatattttagatatatcgactccatttacaaggacttgtccggcagtaggacgtatcaaacgattaatacaacgcagtaatgtcgattttccacttcccgagagccccattatcacaaaaaactccccttcatttattgaaagattggcatctttcactcctaccgtacaaccggtatctttcagaatttccgctttactcttatcttttttcagcatcttgagtgctttctgcttctcatgaccaaagataaggtacaaatcctttatttctattttactcatataatatattggtttagattataatatttgtttttcaactgccgcgttcctcattctcacttacgataaacaagttgaatgttcgcatggttcagtcatgtcacatggtaacatgacgatccaatgagttttttaaatgattaaaaaacagactgagtagtttaaaaggaatagaatttgataagattatcctctcaatgaacagtaaaaaacagtattttcataaataaataacagtctgttcttgcatattgttggcacaaagataagggaaatagattaaaaatgcaaattttattcagaagcagagtaattccaaagatgttttttcaagtctacgcatccattttgtttgaaagaaatcccttctttcagcaagagttgcttttgctctgtccagccaggtacaagacgccccgatgcattgactactcgatggcaaggaacagatataccctccggtacttgtttcaaagcgcgtcctaccatacgggaacattgaggcattcctaataatgtggcaatctctccataagtagaaacctttcctaccggaatatcacaaacaacctgatgcacctcttgacaaaaagacgcagaaaactttgccttgtctactttataatccttcattaaaccttctcttttacttatttttcttcctcaaagctaggtaaaaagacgaatatttgcaaattattaagatacaacaaacaatatatgcaactttacttgctttatatataaattattatgacctttgtggcataaaagtagttttattattaacgagacaagcaacatcattatgaaaaagaagactgttctatttgcttcttgtttgttaggaaccttagctttcagttcctgtgagaagaatctttatgatgaaagcaaacagcctgaaaaggaactccaaatgaaagacttggatatacctgcggatttccaatggaaattaactcaagtaagtgagacaacggtgtcatctacaatccctactcctacaatagtttcattctttttggatgaagcatgcagtgaagaagaaaaactagcaactatccctgtatacgcagaaacttcaagcctaccattaagtattcctacatatgcaaaaacattgtatgctcaatataaaaatggttcaggtgctatgatcaaagcaacaatgccaatcaaccctgatggcagtttctcattatccatcaatgataataacaataccacatctcgggcagttacacgtggacatgacatagaagatgacattgattacgacaaatgggaaggagtaatatatcatcctaagaatggttggggaacaattatgtttgaagatcaatttccatcattgggagattatgacttcaatgactttgtagtaaattacaaggtacaatttgaagtcggaaaacaaaaaggaaatgattataaaagtaagcagattgttatcggcttacgcttaaaagctgttggcggaatattcccatattctccttatttaaaactcaaagaaataaaaaagcacgaagctgaagttgaaatgataaatgctaaaacaagaaagccactcgaggttaaatacgttgataataaaaagaattatcttatcattgattgcagcgaattaatcaaaaaccttccaaaaggtgaaagtcagtattttaatactgaaagaggagctttagtatcaaccaatgatttaccggaaatcattattacaattgatctcaatgttgccaaagaggtagaagaaatattggaggatgataaatttgatttatacttaaaacgtaatgatgatggaacagaaatacacatgaatggcattgagccagttggttacaaatatccattcaaagattctaatttacttcctgtatatgaatccgacggagatgaagaagacgacaactactactttagcaaagaacgtctgatttggggattgagagtaccgggtaatgtagcccacgcagttgaaaaagccaacttcttgaaagcttatcccggattctggaaatgggcaacaagcagcggtaaaaatgaacaaaattggtacggtcaaggtaatgcagataagagtctgttgatctataactaattcttttcctatcccatacctaaatcccggtaaagtattaaatataccttatcgggatttattataatcataccaattgcaatcttattatcctcttctttttaagaagtccgtcggactctctccaaactgttccttataacattttgtaaaataagaaggagaactgaaacctacttcataaccaatctctgccactgtcatatccgatgaggcaagtagagaagccgctttcttcagacgagcaatccgaagcaactcattaggagagtaattagtaagagactttatcttacgataaagttgtacacggctcagtcccatatcttttcctaaatcctccacattcagattagaatcccccagctttgcgtcaagtaaagacttgaatttctccacaaagttcttatccatatcacaaacatcctctttcgccaacgtatgtctgtcgccaaagaactgcttcaagcgacgatgcgaatcaatcaaattacggacacgagccaacaacagttgtgaactaaaaggtttggaaatatatgaatcagcaccaccgtcatatccttgaatccgttgttcatccaaagaacaggcagtcaacagaataacaggaatatgacatgtctgcaactcgctttttaacctacgacagcactcaataccatcaatccccggcatcatcacatcagaaataatcaaatccggaacatatttcatagctttacgaatcccatccgaaccatctacagcctcaataacagtataatcggtatgaagcaaactatatacatatgaacggatatctgcattatcgtcaatgacaagaacggaaggtttggaagaatcataatctttttcaggttcctcttcctcagctacttgagcattgtttaacgcagaagagaccgaagccccaatggaagaagacaatgggctatccaccgaaacggttacctcacaagtctgcatcggtaaatcaaccgtaaagattgttccttgtttttcatcactttctacagaaatagttcctttatgcaattcgacaaaagctttcacaagtgccaagccaatccccgaacctgcatgatgcatatctattctgtaaaaacggtcgaaaatattccgaatgtgttccacagagatcatagaaccggtgttagcaacagtaaaacgaatccaacgcccatcctcttttgtcaaaggagacagacgaacggtcacctttccattttccggagtaaacttgaaagcattagaaagaagattaaaataaatgcgttccaatttttccacgtccgccaatgtatgataatccgtatccgccatcttatcaaaagagaaatgaatatgtttctttcgcgctgctgcaagaaacgactcattccacccctcaaaagaagaaagaatatctacaggaacaggtgtatattccatcataccattctcatactttcgaaaatccaaaatttgattgaccagacgcaaaaggatattcacattccgctgaatcaacatcaacatccgatgctggtctccattcaacgttttatcagccaataaatgctccaccggatcggcaactaatgtcagtggagtacggaaatcatgagaaatattcgtaaagaaaaccaatttagcatgagtcgcttcttccaattgatgagaaagctgtataagctgatccctctgttcttccaatttatcacgttgcccttccagtttgtcacgctgttcctctaactgtttcttctgttcggaaagttctctgttcaagcgattcttggagcgaagagatttatatactactaataacaaacctgccaccaacaaaaggataaccagaccaccatacatgacaacctgttgggtagcaacacgtgacaaataccctccgatacgtccgttcaatgtttcgattttctgatccaattcagatatatgcgtagtctggagtttcatgacatgagcattcgtgtggtctacgacggccgtattcattacggtttctctaggataaggctttttttcaagaatattcatagccaactgcattaccttatcaccatttgtaggataaataaaagtagcattcagcacactgtcaagcacaagttccaatccgtttcctttacccggcaaagcatcaatacctacaaagagcatttctttctccctacctactttcttggcagcccgataagctcccggagctatgcggtcattatgtgcatacaccgcatcgattttcggatgacgacagagcatactatccatctccacttcagccggaccactctcccatgccgcatccgctttatcaatcagctttatatccgggaaattactgatggctgccataaatccctgatgacgctccatcgcaggggtcgccccccccagccctgtaagctccaccacattcccttttccctgcaagcttgatgcaatataatttccaaccgcacggcctatttcataattatcggcaccgatatatgcagtatatttatcagatagaatcttccgatctatcaaaatgacagggattcctttctgataggcttcttccacgacgggagtcatcggagccgcctcgttggctgagataataagtaaatcaactcctttatccataaaataacggacatcttccgcctgcttgcggttatcatctccagccgaccggatttcaaccgccaccccatcgtaaaacatggcttcacgaagaatctcatcattcattttgtgccgccaagaatcatcactacattgagccacaccaatacggaaatgcggcacatcttgatggcaggctaccattccgagaaaacaaaacaagatcactatccaacgtaaatatcccatagtattgtgtatttttttcgtagattatatcttttaccatactatctatttgtcatatatcgggataaagataatggttttctcttaaaaacagaaagtaaaaagcctcaaatctgctttattaacaagcctccttctacccgcaaacagtgtcacaacaaagtcagatttcattaataaaagtataaagagttagacaaacacttaatcaatgttataaaacatctttttttatttggattatttgctagtttcacagaagtccgtatctttgcactgtgtttttcatagtattagatttaaggttaacaaaggttggagcaaggcgttgctcctttttttatacccatacctcttatgtaaggtcataataaaactcccatgagcttcatctcatgggagttttattatatattctatcgtataggcttttataacatcctatctttcagtacctgtggaagttccggcattgcaccgctttgcgtacatacataagcggaagcttcaacagccagtttatgagcttcgggaaccgacttaccattgagaatagaagcacagaacgttgctgtaaaggagtcaccggctcccaccgtatcagctacgggaaccctcggggtctcttggaaggaaacaactcccggagtaaatacgtaacttccattgataccacaagtcagaatcaacatcttcagattatacttagctaacaaaatccagcatttatcctgcaagtcaatacccggatagccaaacatacggctaatggtcactaattcttcgtcatttatcttcaacacgttgcaacgctggcaggactcacgaataacctcttttgaataaaaatcctgtcggagattaatatcaaaaatcttcaattgcccgtctatatcaggcattgtatccaaaaaacgattgatagtagcacggctcacctcattgcgttgtgccaatgatccgaagcaaacagcacgtgtattcaaagccaaacgtttcagttcatctgtaaaaggaatattgtcccatgcaaccccttccttaatttcataacaagggacaccctcatcatccaacgttacctgcaccgtaccggtaggataatccacacgttcaatctgtgttttcagtttcttttcattgaatactctcagaatctcatctcccagctcatcattccccacggcacttactacgcggctgtcaaagccaaactgcgatacatgataggcaaagtttgccggagcaccgccaattttctttccttcgggcaacacatcccaaagtgcttcgcccattcctacaattatattattcatgacttacagattttattgtttccaaagttattaatttattttctaatacggaacgtataaaacaaaagatacattacgcccaccgtcattacggctaccgccccactctgccccattgcatcggaggcaactcccatagccaacggaaacactgttcctccgaaaagtcccataatcatcaagccggaaacctcattctttttcaccggaagataaagtaacgcctgcgagaaaataacagagaatacattggaattaccaaaaccaatcaatgcaatgcaggcataaatcattgtcttttcatgaaaaacaaacaatccggccatcgctatcaacatcatcaccacactaatgccaaagaaagattttgctgacatcttgcgtaaaataaacgatcctaagaagcagccagccgtacggaagataaaataaaggcttgtagcaaaagcagcgtcatccagccccatgccaagacgttccatcagaatctttggagcggtagtatttgtacctacatcaataccgacatggcacatgataccaataaaacaaagcaggataaacggtttgccaagcaaagccagacattgtccgaaagtagacggtttgccttcctctttttcttcttcaatctgagtaatattgagcgagagaatggcaatgatcgctacaatcatataaatagggaataacacgcgccagcctaaatcaaaagtcggaatgacctgcgtcgctccccacatggcgatgtaaggagccagaaaagaagcaatggctttcacaaactgaccgaaagtcaggctacttgccagacggtcgccacgtacgatattggaaagcaacgggttcaaggaagtctgcattaacgcatttcctattcctaataaagaaaaagaaatcaacatcagcatatagctgtcaccaaaaacgggtagcaacagagaagcgaaagtcacaatcaaactaagcaatacggttttcttctgaccaatgcggctcatcagcatacctgtaggtacagagaatatcaaaaaccagaagaatactaatgacggaaagatattcgcctgtgagtccgacagaccaagatccgcctttacgtaattggaggcaatgcctaccaggtcaacaaatcccatggcgaagaagcaaagcatcaccgggactagtttggagagggaagaatttttactgttttccattattttatcttttatacgatgaattctgtttccatagggcaatgtacatcaccctaaaacaaagaagcgggtaaagagcgcatagagtaaggagaatgggcttatttcttcaacttgtaaatcacaaacgaatctactttatacgctcctcctttactgtaaaagtcaatatgagtgtaaggttccgacgggaacacctgattagtcatcacaaaacgtccgccatcgccaaaggcttccacactggatttgtcgacaaacagacggagtttcaattcgtcttttccactctcaatagccgtccaggtcaacattgggaagttctcattgaaacctacatctccgcttttgcggcggtccatcgagaatttcttttctgtcatgttatattgcatatccacttcttcgcctttgtcattgtagagacggaggccgattacatccgcatgttgattttcgatagtcagttctatttcgtatgcaccctcattgtcggcaatcatgtctttgatgatacgtgttccgttcactttgaacgagcgtttcttggagacgtcacgcagtttcagcagttcgggagagggagcagactgaagataagtctcgccatctacagtgaacaggctcaaatcgcgaggaacagagttcgggctacggtattgagaggtaggaacatcgtttgcatattgccagttgctcatccatgcgatagcaatgcgacggttgtcgggagcatcacaccaagtaacagtggcgtaatggtcttttccccagtccatccatttggttttggagggtgattcgtttacaaattcttttccgttgaacgttccgacaaagtattgagtggccgagtcaccgaaagggccgtcaccaagactacaaagcaatacccatttcttttcattcgtaccttccacgggaagttcaaataaatccggacattcccaaacatttccgtgagcaccttgtcccttaccgaaactgctttcaaaagtccagtttttcaaattgggagaagaaaaaaactgcatttcctgccctacggcaagtaccataatccaacgttttgtcccttcataccaaaagactttcggatcgcggaaatcgcgggcttcagataccaacaccggattatccgcatactttgtaaaagtacgtccattgtcggtactgtaagcgatactttgtacctgacgatcaccgttctgtgtatagatagcgatgatagcacctgcaccaaaaccagctgtattattatgatccaccacagccgaaccactgaaaatagtgccaaacgcatccggagttatagcatcagaccgatattcccaattgattaagtctttactgatagcatgtccccaattcatatttccccatttggaaccgtatggattatgctgataaaacaaatgatactctccgtctttatataccattccgttgggatcattcatccatccataaagaggtgagaagtgataaacaggacggaacttttcacgattagttgtatcgaaggtgtcggacaacttcatttctctacagcaagcggtgttatccggtgaaagattgacacgtaccggatcatttgaattcattttgaatttaaatgaaaccaacttaccggaataatcggaaaggtctaccggaacaaaataatctaccttgttaatagccagacggacatcaaagctcttcacttctttgttatcagcaatcatactgatacgtacgtcaggcgatgtatcttctaccggtaataacaagtatttctgagtagtattgacacgcaccaaacaatgtccttctcctaaatcttttattaatagagaaggatctgcagctaaagccagaagcgagatattcataaaaatggaacaaatcagaagagtctgaagttttctcaaaggtaaaaatacattcatgtttatggtattaaggttattacttattattaatagtatcatatttcttggttgttgcaatgcaaagataggcgcaatgcatcggagcgcctatcacatttgtttcaaacgctataaaagatgttactttctcaattaataagtactcaattttatatcagatacagtcacttcaccctcagtacaaaaaatagcccaaggatttttagccaaatcataaatacggttggtgaaagcataccttccatttatatagactacacacacagattcttcagtatagacctctatatgatatacattgtcagcagccggagttatagcacgttctgttatagcacccgcatcattccattcacctgttttctcatttacttctacttctttcaacttcaggaaattatatttatcttcaatgaaaatacgcgccttttctgccttatcactgcaatcgacaaatgaaagtccgaatacggcttcattctcttcagggattgttgcagtcatggttattttgttccggcttctcaaacgggcgaagcggacaaatgaatttgctttcaatgtataagaagaagtgttgaccgttacatcccctaccttcgtcttttcagccaatgtcaccgattgggaatatttggcggaaatcgcttgtggaacatccaaacttaatgttccatctccgttctgaatcaatctatgagcgaccaatgctcctgcccaacttttggtacctgtggttttctgtccttcacgtgtcggacaccatccccaaagataacgatttgtatcatcgcccgctgtttttccagcataaaaactaactccatctaaccatccttcgtggggtacgaaagtagggaactgcccattctctacagctattcccttcaattcttccaaagtctgcgcatagaaatattggacaacggccggttcattttttgttccttgtgaagaataaaccatataccaataacttcccatctgaaaaacatccggacattcatagaaacgcccccaaatattattgaagaacggttccggttttaaatcccaatcatgcaaattggtagaagtaaactcaatgatatatccatccccatttttcagagcagaaactaacatcctataacattgcgcagttgcatcataaaaaacatatggatcgcggaattcatttttatcataccctgcttctattggagccgataaacggaatgaacggtctttagtccagattttacaatctttggaagtagccaacaatattacttcacgaggttcggtagctttatgtcctgtataataagtataataagttttcgtagcctcatcataaacagtacttcctgtcccgatagccggatcgtcttctactgctgttccgcatggtattgcttcgcggaaagagatatagtttgccacatccgtagttgccaattcgtggataggatgatagatagtagaattaccgtcacgatcatcctgaaggtaaagaatacgaaactctttacttaccggatcaaaaaaaggcattggatcacctacataaccaacataaggtttgtaataagtcgtataattgttcgattccgtcgaactaaagaatgttgtcgtttcattcagatttttatctgtgattaccggactgttatcatcgctgcaagcagcaaacgatattgacagacacagtattgaagccattaatatcatagttttcataatttgcttttctttatcagattatactttacttgcttaagtaatcgagtgcattagaggtaagtttctcgatattaccacgatattgattatctgattggttttcatcataccaatcataagctgccatgccaatacatattacctttccactactatttcctcctatctggcgagaagggaattcagcgataggcactgcattgtgattggaaacatcataccccaactctattgcaccagtttgttgtctccatccttctattccccaatacggttcccaatctatacaccattgaaatacccaattaaaaatatgataacctgtatttattaaataaatattagaattatcctcagttactaagccatcaaatatttcatgagagataccctctattgaaaagccccaaggtttttctgtaacagtctgagaatcttcactcctaaattgattattaggatctctaccatccatagaaatagcccaccgatcttttacgatatatcgtaaagctccacgagataataacaaatttccacctgtctgataataattcctaatattattctttgaattccaattaaatccattatcatcatagataggattatcatcatgaatccaaatgacttttatctgttccggatcaagtttcactttcgggttatcatccctcaaatctgaatatgaaatataccttgctcccggcatattatccaacatccattgagcagcggctttttcttcattattagtcagttcatcaatagttgcagctgttccgataaatgccattgaaacaaaagttcttaccttttctaccttcactgtataagtggctgcattcaaatgatttgtaaccgtatattctttaggtgtagtgaaatccaatgtagtgcctgacaacgggcttaccgtagcaccatcaggaacagtaacaactggagacaaagcggtaatatccatgtcttcaagtacatacacaacgatttctttgtttgtttcatcaattctgcctgcatactctcctatcataaatctagtaatctgcggcttatccaattctacggaaatcgtataattcataaatacatttccgtttgtgacttttaccactacgggcattgtaaagttaacaggtttaccactttccaaattcgccgtagccccttcggacaaagtaaataccggaattaaatttgtcacatctgtattatcttccacatgcactttaatgcttctcgcctgattatcctgctcaatgataaagttatcataatcttcgatatggaaagaagtaatccatgtatcaccattcaaagccaacgatgtgtcatcatcatcactacatccagctgcagaaagtaaaagtgcagccagtaacaccatatatattttatctatcaaagtcttcataattcccatttattatttctcccaaccattattttgctgatacaaaccaccactataattgatctgcttctgaggaataggcagatattcattctttcctgctgtaaaatttgcatccgaataataagaacgacgactagcttccgacgcataatattgattcatcacttttgccgcatctccccaacgaactaaatcaaagaagcggcttccttccaatgccagttcaagacgacgttcccatttcaggtctctcatagcaatgtcccgatcagtccattcggccattgtatacggttctactttaaaacttgccccataatcaaaaacaagcgtagtactacgggctgcacggttacgtatctcattgaccaacggcaatgcttccgacaaacgattcaactgaatcaatgcctcggcacgcatcagcactacatctgcataacgcaatacaatacggttcatcgaattagcaacaaacggagaattcactttcttcaggcaagaacaatcggggtccacattctcttttaaagatgaataaagaccataatattcctgttcgttacgtgtccacgtcttatcaaaaatatagttcacattatacttataaggaaatcccggaatcgccaccgtgtggaataaacggggatcgtagttgccttgcacatcataattatctttctcattgtaagtatcgaacatcggcctaccgttttccgtgcggaaagcattcaccaagttttggctaggcttctgaaaatcacaacacccgaagaattgcggagctgtcaactcattaccaaagttcaagttgccatacatcgtattatcatcctgcgaatattggacagcccaaatagattcctttccgttctcatactgcggcagaaaattatatgcaaaatcttcttccagaccaaaacctccggcagtcatgatagcattatccgtatacgtaattacagctttcaaatcatcttcattaatttcgaccacttcattcttttcattctggcgataagctttgtaaagcatcacctttgccagataggccgatgcagcagcctgcgtaggacgccctttttccacctgtgtatcgggaagatgatcatatgcaaacttaaagtcatctgctatcttctgccaaagttggtcgttagtatactgtcggttagaaatcttggtatagtccgaagtaggaatcgtttcatctacataaacgatatgcttgaacatcactttcaacagaaacatataatgaccacgtaagaaacgcatctcaccgatacgttcattcttctgcggataagtatttgcatccataccatccaaagatttcaaagcagcattggcacgtgccacccccgaataaagacgataccagatatcatcaaaagcccaattgtcagtagtcatccccgtagcaatctccagaaaatggaaatgcgaaccgtcttcggagtttgccccgcctttataagcatcatctgcacggacatttccatacggccaaaggctgaaagggctgttcatatcctcaccggacaccatgtgagcgtaagcagcaattaccagattgtccacattatcgggactaatcgtttgtccctcgtcagaagttccctgtaagtctctttccaaaaagtcattgcaactggtagtaccgaccaacgaggctactaacagcaaagaggatatatatatattcttgattttcataattatcgttatttaatgaattaaaaacctatgttgaaaccgaatgtaagattgagaggaatcggataaccgaaattcggattttccggatccataccggtaaagttcttacttttgatggtcagcaaattctgtgcactgaaatagaatcgcaaacgttctatctttattttcttcgagatatctgtcggcaatgtataacctaattgtaaattccgaagtttcagataagaaccgttttctacataataactggaaattctcttttcattattcaagtcttccaaacaaacggcaggaatatccgatcccggattctgcggagtccatgctcccaacagacgggtgccacgattagcattcatatcacctaccgaccagaagtcggtattcttcttcacctcattgtaaacgtccactccctgcacaccttgccaaaacatagtcaaatcaaagttcttatattccagataaatattgagtccatatgtgaaatcaggattcggatttccgatccaagtctggtccttagtatcaataacaccattattatccaaatctttatagcggatacgccctacgccttttccggtctgatcggcatgattgtccacttcttcctgtgacttgaaaatgccgtcggcaatgtaaccggctctcatattaatagaatgaccgataatgttcatcaccccgtcaccaccgaaatctccggtagaagccacttcacccggtacaaacaaaatcttgttccgatacaaaccgaggttcgcgttaatatcatagctaagcccgaaagccgtcttattgcgatagcccaaattaaactcaaagcccttgttttccatcgaaccggcatttctccactgcccgccaccttctccaagaataccgatgtaagacggttttatcaaaatatccgttgtttttttatagtaatattcggcagagccatacaatgtctgattaaacaaactgaaatccataccgacattggtttgtgtagtagtttcccacttgatatcgtcatttccaatctgagtacgcacaaatccggaaggaagcaaactaccgccattacttccggtaatatcataagaagttccataagtaggaggattacctgtaccgtatttagattcgtagatagaatagcgtgcgtaattttcaatatcctgattaccggtttgtccccaagccgcacgaattttcaaatcgtcaatcacatctttagttttttccataaaagcctcctgactaatacgccatcccaaagaaacggaagggaaagtagcatatttattattgctaccaaaacgggaagacccgtcacgacggagagtaaatgaaagtaaatatttatcagcatacgaatagttcagttttccgaagaaagaaactagtgagaaaccacctgctccgccacttgcctgtgactgtcctactcctgcggaaggatacatataatcgggagtcagaatcgcaaatccttcacggtaagcagcaaagtttatgtcgtcttcacgattcaactccatacctgccataacatctccacgatgtttgccaatctccaattcgtaagtggccacagcattccacatccatttggtgaaatgctcctgtttcatctcaaccgcatccttatcactgttcaggaaaccggtgttgtaaggaagcgtaaaattacgttgatacttctgtgcatagtccaatccaaaagtggaacggatattaagtcctttcaccgggttcaggtttacatatgcatcaccaaacaaacgccaataagtatatcggttgttccgattatcataaattatacgagccacattttggcggtcgggcatagtactattgggacctccccaattcgttccatccacagtatgtacgggaatcatgggaagggcaatcatggcgtcactcatgatattccctggagcttggacttccgtcgtacggttcagagtgaaatgctcaccgatagtcaaaatattatctatcaccttataatcactattaatacgtgcagaaatacggtcgaagtttgtatatttaatcaaaccgtcatttttataatatcccagagaaaagaaataattacctctttccgttccattactcaacgaaagattgtattgttgaataaagcctgtacgtgtgatttcatcaaaccagtccgtatcacctgttgctattgtattggcatcatcaataaatttgggaacatagatgttatccaacacaggatagccttcagcattatatccccaatcatattgataaccgatagaattagcattcggattcttaccactgttcacattggcttgccataatgtacgcccatattgctcagtattcatcatatctaatttagactggtacatagatgcggaaaccgaagcgtcgaaattaatcttaatctgtcctttcctaccttgtttagtagtaatgatgataacaccatttgcggcacgcgaaccataaatagaagcagaagccgcatctttcagaacctggatagattcaatatcatttccattcagttcatgcatacctgctttagaaggcacaccatcaatgatataaagagggtcgttgttgttcaatgtaccgataccacgaatacgaacagtagccgtaccacttggattaccatcagcagtaatattcataccgggaacacgcccttggagtgcttttaccggattattttcaccttgtttctgaatttcatcaacttttaccacagataccgcaccggtcaaatcggctttacgctgagtagtataacctgtcaccaccacttcatccaccatttgcgtatcttcttccaataaaacttggatagaggcagccgctttcacagtcacgggcttataaccgatatacgaaatctttaaagtagcattagtaggaacagaaagcgtgaagttaccgtcaaaatcggtaatcgttccattagttgtggatatagtctcaatgacggaagcgccaataatcggctgaccatccgttttggaagtaacgtttcctttcactgttatgttttgcccacagagggctgacatgaaagtaaacaggaaacaaacactgcaaagaagttttttgttcttcataatactgagcattagtttgatgttattaatttaaaagtacgaactttatctttatcgatgatgcaaattacggttgatttatatcaatcgactaaaaaaaatgtttcaaaggctgtaatatatgttgcatagagtactatttgatggattatattgaaaatacaaatggtattccccatctttatacatgagtgcattgacataatttctatggcaacaaagtattcttatatcagaactcaacaaaaatagacgaaggcaaagataggagctatctttgccttcgtctataaactttgtttcaaatgatgtcaaccttattttattgaaaatcgaatgaatc

SEQ ID NO: 11908 - DNA, 10965 bp, Unknown
  gut microbiota DNA sequence
ccttataagcaaatcattatctctatgggcgaaggagcgaaagctgcgctttctgcatttgacgatagagtgagagggattatctgatatattcagatatgaaagacatacaaacaagacaataagaggccgcaaaggtatgaatccatatctttgtggctttttatttttttcttacctttgggggaacttaacatacccccaaaaaatgaagaacatgaaaaagatctttttactcatttccgtcatcttatttatttttccggtacaggctcaacatacattgagactgatgacttataatattaaaaatgcgaatggcatggatgatatttgtagttttcaacgagtagccaatgtgataaataatgcttctcctgatgtcgtggctatacaagaggtggacagtatgacccgtcggagcggacagaaatatgtgctgggtgagatagctgaacgtacacaaatgcatgcttgttttgcacctgctatagagtttgaaggaggtaaatatggaatcggactgttgacaaagcaagttccgctacgtttacaaactatccctttacctggtagagaagaggcccgcaccttgattctggcagaatttgaggattatatctattgttgtactcatatgtcgttgaccgaaaaagaccgtatgaagtcattggaggtcgtgaaatcattcgtcgctccttataaaaagcctctttttctggctggggacatgaatgctgaaccggaatccgactttataaaggagttacagaaaaactttcagatgctctccaatcctaaacaatctacttatccggcttctgatcccaaggagactatagattatattaccgcattgaagtcaaatgctaatggcttcgctcttatatcctctcaagtgttggatgaaccgatggcctccgaccatcgtcctatacttgttgagttgcgtacagctgaaaaggcagataaaatatttcgtactaaaccttatttacagaatcccataggtaatggtatgacagttatgtgggaaactaccgttccggcatattgttgggtggaatatggaacagacactactcaactgaaacgcgctcgtacaattgttgacggacaggtagtctgcaataataagctgcataaaatacatatcaacgatctgataccgggacagaaatattattatcgtgtatgttcacaagaaatgttgctttatcaagcatataaaaagatattcggaaataccgcccggtcggaattcagtgaatttactcttccggcaacaaatgcggattcctttactgctattgtcttcaatgatttgcaccaacatacgaaaactttccgtgctttatgtaaacagatacagcatatcaactatgattttgtagttttcaatggcgattgtgtagacgatcctgtcgatcatgaacaagctacctcttttatctgtgaactgaccgaaggtgtacatagtgaccgtgtaccgactttctttatgcgtggtaatcatgagattcgcaatgcttactctatcggtttacgtgaccattacgactatgtaggaaataaaacatacggttctttcaactggggagatacccgcatcgttatgcttgattgtggagaggataaaccggattcccattgggtctattatgatttgaatgattttacccagttgcgaaatgaacaagtggattttttgaaaaaggaactttccgccaaagaatttaagaaagcgaagaaacgtatcctcctgcatcatatccctctttatggcaatgatgggaagaatctttgtgctgaactatggactaaactgctggaaaaagctccttttgatatctgtctgaatgctcatactcataagtatgcttatcacccgaaaggtgagttggggaatcattttccagttattataggtggaggatacaagatggagggtgctaccgtgatgattcttgagaagaggaaagaagagctcagagtcagggtgttgaatgcaaagggagaaactttgttggatataacggtctgaataatgtatatgatagcttgaatcgtggaattgaatttcaccccaaaagtttagtatctaacttttagggtcataagatgtgttttttttattatgacgcaaagctaaaaggaaaaattaagatagaaaatatggcatcgccgagacgcttgctgagagatgatgggaaaagtatgagagatacaggctggtaggatcatctctcatttgctattctattgatagtgtatgtgttaactgtaatttatgagagatatgagaggtgaaaaataaaaaaacgttctagtatgctgggatttttgttttcttactatgaatgtttaaagtttgctactcttatgaaaatagcaattcctttcaatggtttttcgtgagaaaagctataccttcgaggacttttaatatagatattggaatgttagatttaaagcaacttacagcagatgtgtgtcgtattgcaactgaagctggacattttttgaaagaagaacgtaagaatttccgtcgtgaacgtgttgaagagaaacatgcgcatgattatgtctcttatgtagataaggagtcggaagtacgtgtagtgagagctctttccgctttactacccgaagctggagttataacggaagaagggtcggtcacttaccaggatgaaccttatttttgggtgattgacccgttggacggcactacgaattatatccatgatgaggctccttattgtgtatgcattgctttgcgcaatcgtaccgagcttttattaggagtcgtttatgaagtttgtcgggatgaatgtttttatgcgtggaaaggtggaaaggcctttatgaatggtaaggaaatccatgtatcggatattcgggatgtaaaagatgcgttcgtcattaccgagttgccttataaccatctgcaatataaacaaacggctctccatttgatagatcggctttatggggtagtaggtggtattcgaatgaatggttcggccgccgcagccatttgttatgtggctatggggcgttttgatgcttgggcggaagcttttattggaaagtgggattattcggcggcagctttgattgtgcaggaagcaggaggaaaagttactaatttctatggtgaggaccactttatagaaggacatcatatcattgcaacgaacggataccttcatcctttatttcagaagctattggcggaggtccctccgttagatatgtaggagaaacggtctgcttattaaacccttgctactattatgaaacacacattttttataaaagactggctcaattcattcttatctttattgttccctcattgttgcgtagtttgcggcagaccgctggcaaaaggtgaagaatgtctttgtatcatgtgcaatatcaatctcccgcgtacgaactatcatctccggaaggataatccggtagagcgacttttctggggacaaatacctctagaacgagccacttcttttttcttctaccggaaagggagcgatttccgacagattcttcatcagttgaagtatgggggaaagaaagaggttggaataatcatgggaagatatatggctgccgagctatcggattcgggtttcttcgaaggagttgacgtgataattcctataccgttgcataaaaagaagcaacagattcgtggctataatcaaagcgaatgtatagcacggggtattgcggctgtgacgggtattaccgtatgtgtagaatcggtggttcgccgaaagaatacggagacacagacacgcaaatccgtattcgaacgttgggagaatgtagatggaatttttgaactgaatcatgcggattctctgaccggaaagcatattttgattgtggacgatgtattgactacaggggccacgactatcgcgtgtgcttcacggctggcggaggtcgaaggaacacggactagtgtgttgactttggcgatggcggattgaatggaatatcacaaaaaagtcacccgaaaaggtgacttttgctcttcctcttggacttgaaccaaggaccctctgattaacagtcagatgctctaaccgactgagctaaggaagaatgtttttctcaattgcgatgcaaaagtactaggtttttttgaaatatgcaatatctttgcaaaaaaaatattagaaatggataaaataataggattgggcaacgccctagtcgacgtacttgcaaccctaaaggatgatacgcttttggatgaaatggggctgcccaaaggaagcatgcaacttattgatgatgctaagttacagcagattaacgcaaaattctcgcagatgaaaacgcatctggcaacaggcggatcggcaggaaatactatacttggactggcttgtctgggagctggaactggttttatcggaaaagtaggaaatgatcattatggagatttttttcgtgaaaatcttcggaaaaacaatattgaggataaagtattggtgtctgaactgttgccttccggtgttgcatctacttttatttcaccggatggagaacgtaccttcgggacttatttgggagctgccgcttctttgaaagctgaagagttatctctcgatatgtttaaaggatatgcatatttgttcatagagggatacctggtgcaggaccatgaaatgattcttcatgccattgagttggcgaaagaggcgggtttgcaaatctgtcttgatatggcaagttataatatagttgccggtgatatggactttttctccttgttaataaacaagtatgtagatattgtctttgcaaatgaggaagaggcgaaagcgtttacgggtaaggaaccggaggaggctttggaaatcattgcgaagaaatgcagtattgccatcgtaaaagtgggggcaaatggttcttatattcgcaaagggacagaagaaattaaagtctctgctattccggtaaagaaagtgatggatacgaccggagccggtgattattttgctgccggttttctatatggcctgacgtgtggatattcattggagaagtgtgctaaaataggttctattctatcgggaaatgttatccagacaatcggtacgacgatatcaggagaacgctgggatgaaattaagttaaatattaacaggattctggctgaataaccaagtattgagttacttttacgattcatttatatgaaaagaagtatgaaaaaattgctgaatgggcggatagctgttgttggggtagcggttacggctatcgtagctttctttagtttcaagagtggtgacgaccgcaatttccagatcgccaagaatctggatatatttaatgcgattgtgaaagaattggatatgttttatgtcgatacgattgatccgaataagacgatcagagagggtatcgataatatgcttttcacgttggacccttatacggagtattttccggaggaagatcagagtgagttggagcagatgataaaaggatctttcggtggtatcggttcttacattacttataatacaaaattgaaacgctctatgatttccgaacccttcgagggcacaccggcggctaaggctggattaaaagccggagatattttgatggaaatagatgggaaagaccttgcaggcaagaacaatgcagaagtcagccagatgttacgtggacaggcgggaactagttttaagctgaaagtggaacgcccgaatgtgagggggggacgtacaccgatggagttcaccattgtacgtgaatctattcagaatccggccattccatacgctgcagtgcttgataatcatgtcggatatattaatctgagtactttttccggcaatccttcgaaggagttcaagaaagcattcttggatttgaagaagcaaggagctacctcgttggttatcgatcttcgtggaaatggggggggcttgttggacgaggctgtagagatagcaaattatttcttgccgcgtggaaaggtgattgtaacgactaagggaaaaatcaaacaagccagcaatacttataaaacattacgtgaaccattggacctggatattccggtagcggttttggtaaatagcggaactgcttctgcttctgagattttatcgggttccttacaggacctagatcgcgcgattgttgtcggtaaccgtacttttggaaagggattggttcaggttccgcgttctttgccttatgggggaacaatgaaagtgactacttccaaatactatattccaagcggacgttgtgtgcaggctattgactacaagcatcgtaatgaagatggaagtgttggaaccattccggatagtttgactaaggtgtttcataccgctgcagggcgtgaggtccgcgacgggggtggtgtaatgccggatattgttatcaagcaagagaagttgccgaatattttgttctatctggtacgtgataatttaattttcgattatgctacccaatattgtttaaagcatcctaccattgttgctccggagaagtttgaagtaaccgacgctgattataatgactttaaggcattggtgaagaaagctgatttcaagtatgaccagcaaagcgaaaaaattctgaaaaccttgaaagaggcagccgagtttgaaggatatatggcggatgcttcggaagagttcaaggcgcttgagaagaagttgaatcacgatcttgaccgtgatttggattacttttccggtgatataaagaagatgatcgcttcggaaattattaagcgttattactatcagcgtggtaatattatccagcaactgaaagacgacgatggcttgaaagaagcggtgaagatattgaatgatccggtgaaatataaggaaatgctgagtgcaccggttgctaagaaataataatatattaaatgatttacaatatgtctacagaattattctctactctgccttataaagtggcagatattacgcttgccgacttcggacgcaaggaaatcgatttggcagaaaaagaaatgcccggcctgatggctcttcgcgaaaagtatggagaatccaaaccgttgaaaggcgcccgtattatgggatcgttacacatgactattcagacagccgtgctgattgaaacattggtggctttaggggctgaagtacgttggtgttcttgcaatatatactcgacgcaagaccatgctgctgctgccattgcagcttcgggggtgcctgtatttgcttggaaaggcgagactttggctgattactggtggtgtacattgcaggctttgagctttgccggtggcaaaggtccgaatgtgattgtggatgatggtggtgatgcgacaatgatgattcatgtgggatatgatgcggagaacaatgcggctgtgttggagaaagaagtacacgctgaagacgaaatagaattgaatgctattctgaagcgggttttagcggaagataaaacgcgttggcatcgggttgcagaggaggtacgtggtgtatcggaagagacgacgaccggtgtacaccgtctgtatcagatgcaggaagaaggcaaattgctgttcccggcgtttaatgtcaacgattcggtaacgaaatctaagtttgataatctgtatggttgccgtgaatcattggctgacggcatcaaacgtgcgacggatgtaatgattgccgggaaagttgtggtagtatgtggctatggcgatgtgggtaaaggatgctctcattctatgtgctcctatggagcacgggtgcttgtgaccgaagtagatccgatctgtgctttacaggccgccatggaaggttttgaagtcgtaactatggaagaggcttgtacggaaggtaatatttttgtgactaccacaggaaatatcgatattattcgtattgaccacatggagaaaatgaaggatcaggctatcgtttgcaatatcggtcactttgataatgagatccaggtagatgctttgaaacattatccgggtattaaatgtgtgaatatcaagccgcaggtggatcgttattatttcccggatgggcatagtattattctgttggccgatggacgtcttgtcaatctgggttgtgcaaccggacatccgtcgtttgttatgagcaattcatttacgaaccagactttggctcagattgagctgtttaataataaatatgatatcaatgtatatcgtttgccgaaacatctggatgaagaagtagctcgtctgcaccttgaaaagatcggtgtcaagctgacgaaacttactccggagcaagctgcctatatcggtgtatcggtagacggaccttacaaggctgatcattatagatattgatttaagttgaaaagtatatgaagaaactccttcctgacataattgctatattggcttttgttgttatttcttttgtctacttctttccggcagatattgaagggcgcattctgtttcagcatgactctgctgccggtgccggagccggacgggatgctcaagagtattttgaacgtactggtgaacgtagccgctggacaaactcgattttcggtggtatgcctacctaccagatggctccgagttatgattcgacaaaatctttgtcttgggtggagaagacttatcaactttaccttccggagtatgtagtactgacctttatcatgatgttgggattctatattctcttacgggcatttggaatttcggcttggttggcggggtttggcggtataatatgggctttctcgtcttacttctttattctgataccggcagggcatatctggaagtttgtgacattggcttacattccgcctacgattgcagggattgtcctggcttatcgaaggaagtatctgttgggaggaataattacggctttgtttatagctcttcagattcgttccaatcacatacagatgagctattatttcatgtttgtgattctgtttattataggagcctacttcgaagaagcttataagaagaaagaattgacgcatttcttcaaggctagtgcaattctggcgttggctgctatggtaggcgtttgcattaatctttctaacttgtaccatacgtatgagtatagtaaggagactatgcgtggaaagagcgagttaaagcaggaagggaatgctgccaatcagaccagcagcggattagaccgtgactacattacgaactggagttacggaattggggagaccctgactttattggtacctaatgtaaaaggaggagcgtcatcggataatttgtcacagagtgagactgctatggaaaaggcaaatccgatgtatagtagtatctattcgcaatttccgcaatattttggtgatcagccgtggactgccggtccggtgtatgtaggggcatttgttatgttcctgttcgtccttgggtgtttcatcgtaaaaggtccgcttaaatgggcattattgggagctactattttctccgttttactctcgtggggaaagaatttcatgggactgacggatttctttatagattatgttccgatgtataataagttccgtgctgtatcgtctattttggttattgctgaatttactattccgttattggctatttttgcattgaaggaaatattgggcagactggaaattttgaaattgaaagagaaccgtacaggtgtgatcgtatcgcttgtgctgacagctggtgtctcattgctcctggctgttgctcccagtgttttcttttctagtttcgtaacggcgcaggagatggcggctttgcaacaaggccttccggcggaacaccttactccggttgtgacaaatctgacggagatgcgcaaagcgatcattgcttcggatgcatggcgcagtttctttattatagctgtgggatgtttcttgctgttcttattcttgcagaagaggttgaaagcttctttcacgctggtcggtattgtacttttgtgtttggtggatatgtggtgtgttaataaacgttatttgtatgatgaacagtttgtcccgaaatcaaaacggacagaagcatttgtgaagactcaggcggatgagattatccttcgggatacagctccggattatcgtgtactgaattttgtcggttttccgagcaatacgtttaatgaaaacaatactgcttactggcataagagtgtcggtggctatcatgcagcgaaattgcgtcgctatcaagagatgattgatcatcatatcatgcccgaaatgcaggatacttatcaggctgtggctgctgccggaggtaggatggatagtgtggacgcttccaaattccgcgtattgaatatgctgaatacgaaatactttattttcccagccggagagaaaggacagcctgttcctgttgagaatccgtatgcatatggtaatgcctggtttgtggataaagtgcagtatgtgaataatgcgaatgaggaaattgacgctttgaatgatattcgcccgacggagactgctgtggtggatgcgagatttaaagaacagctaaaaggggtgacggaaggatacaaggattctttgtctactatccggttgacggattacgaacctaaccgattagtttataaagtttctactcctaaagacggagttgtggtattctctgaagtatattatccgggatggcaagcgacgattgatggtcagccggtagatattacccgtgcggattatatcttgcgtgccatgaatgtacctgccggtgaacataccattgaaatgtggtttaatccgcagagcatacacgtcacggaaagtatcgcttatgtcgcgttggctttattgttggtcggagtgatgattcttgtgtggacgaaacgtaataagttcacaggaaaaactgaagcgaaataagtgaatgtttgcttttgaataattaaagtagctgagtttgataggaacgactctcttctg

SEQ ID NO: 11909 - DNA, 12816 bp, Unknown
  gut microbiota DNA sequence
agagagtcgttttgtttttctatgcagtatatccggaatagtccggttttgggtagattattgctcgaaaagggaaaatatgaatataaacaaatagtttgtggatactcttattatgtcataagctgctaaatttgcagccaataatagcatatatattatgagaagactactattcatattttcttttctttccttacttgttgtggacggaaaagcgcaagaggtggagaccctgacattagaggattgccttcgtattggtattgacaataacttgtcgttggaggggaaacgcaaagaaatacagaaaagcaagtatggcgtatctgagaaccggtcgaagttattaccacagataacggtgatagccggttataataacaattttgatccacctgtgtccgttactgacggctcttcttatggtgtcccttataatattacgaaaacattgcagcatactgccaatgcggggttggaaatgcaaatgccgcttttcaaccagacactctatacctctatgtccatagctaaggtgatggaggaaatcagccgcctgtcttatggaaaggctagggaggatatcattatgcaaatcagtaaaatgtattatctcggacaggttacggccgaacagatagtactgataaaagctaatatcactcgtttggaagaattgagggatattacgcaagctttttttgataacggaatgtctatggaagtcgatctgaaaagagtgaatataaatttggaaaatctgaaggtacaatatgacaatgcgcaggctatgatgaaacagcagttgaatatgttgaaatatataatggattatccggctgaaaaggagtttgtattaacaccggtaaataccgatagtattactacagtggctttgaccggtttgtcggaaaatatttatgaacttcaactttcacaatcacaagtgcaactggcagagaaacaaaagaagataattagtaacggttatataccttcacttagcttgacgggtagttggcgatatgctgcttatacggataaaggctaccactggtttcactccggcccatccaaccattggttccgctcttacgggttgggactgacgttgcgtattcctatcttcgacgggctggataagacatataaaatcaagaaggcgatgattgatatcgagaacagtaagttggcatgggaaaatgcccggaagagtctgcaaactcagtatctgaatgccgtgaacgacttgatgaacaatcagcgtaactttaagaagcagaaggataattatttgttggcggaagatgtgtatacggtcacatccgaccgttaccgtgaaggaattgcttctatgactgaagtgttgcaggatgagatgcaaatgagtgaggcgcagaataattatattagcgcgcactataattaccggatcactaacctaatgttgttgaaactgaccggacaaatcgaatcattagtcaaataataatcataaatatggaaacaatggaaaataatattccttccgctactcatcaggagaaagcgaagaagatgaagaaacttcgtcggtggcagatagcagtcagccttttgggagtggctattatcgtttggggagtgattgaagtgatctgtcttttcctgaattatagtcagacggagactagtaacgatgcacagatagaacaatatgtgtcgcctatcaacttgcgtgcatccggctatattgacaaaatctattttaccgagcatcaggaggtacgtaagggagatacgttactggtacttgacgatcgtgaatataagattcgggtaatggaagcggaggctgctttgaaagatgcgcaagccggtgcaacggttatcaatgcgacactcaatacaacacagacaacagcaaccgtttatgacgcgtctatcgcggagattgaggtgcgtttggcgaagttggaaaaagacaggaagcgatatgagaatctggtggaacggaaagcggctactcccattcagttggaacagattgtcacggactatgaagctacacgtaagaagctggaggctgtgaaaagacagaaaaaggcagctctttccggtgtggatgaagtgtcttatcgccgtgtgagtactgaagctgccatccaaagagcaacggctgcactcgaaatggcacgtttgaatctttcttatacagttgtggtggctccatgtgatggaaaactgggacgtcgttctttagaagaggggcaatttattgcagccggacagactattacgtatattctccccaatacgcaaaaatggattgtggctaattataaggagacacagatagaaaatctgagtattggacaagaggtatctgttacggtagatgcgatcagtgataaagaattcaaagggaaggtgacctccatatccggagctaccggatccaaatattcattagtaccaacggataattcagcaggcaactttgtgaagattcagcagcgtattccggtgcgaattgattttaccgatttgtccaaagaggataatgaacgattggctgccggtatgatggtagtggtgaaagctaaactctaattacctaccacctcctcccgcactatatctccttctttaatttttaatttataattttttattaaacccaatgccctcttatcctaaaaactatcctttttacagttggatgcccaagccgttgggtattataattcttttgttcttctttctgccgattcttacggtaggtggggtttattcggtcaatagtaccgaaatgatgagtgggcttggtattatttccgaacatatacagtttgccaactttgtaacttcgataggtatggcggcttttgctcccttcctttatcaattggtatgtgtgcggcgggaaaagatgatgtgtattgtcgggtttgcattcatgtatatattcagctatatctgtgcaaagactgatagtgtttttctgttggcactttgcagtcttttgacaggctttttgcgcatggtgctgatgatggtcaatttgtttacgctcatttggtatgccggtggtatggaagctacccgcaacattactcccggtttggaaccgaaagacgcttccggatggaataagttggatattgaccggtgtgtgagtcaaccggcagtttatctgttttttatgattctgggacagtcaggtacggcgctgacggcctggctgtcctttgaatatgagtggaaatatgtatactattttatgatggggattctgctggtatctattttacttctttttataactatgccgaattataagtttccgggacggtttcctattaattttcgtaaatttggcaatgttacagcgttttgcgtctctttgacgtgcctcacttatgtgttggtctatgggaaagtactcgattggtatgatgatgagtccatccggtgggcgacggctgtcagtattctttttgcgggaatatttctttatatggatgcgaggcgccgctctccttatgtattgttggatgcgtttaaactgcgtaccatacgtatgggagcattactttatttgttgttgatggtgataaactccagtgcaatgtttgtcaatgtgtttgcgggggtcggtatgcatattgataatttacagaatgcggcgttgggtaactggtgcatggtagggtatgctattggtgctgtacttgctatggcgttgggaagtaaaggattgcattttaagtatctatttgctatgggattcttttttctgtctttgtctgccgtattcatgtattttgaagtgcagaccgcaggagtttatgagcgtttgaaatatgcggttattatccgtgccacgggtatgatgattttgtatgcgctgacggctgcctatgctaaccaacgtatgccctttaaatatctttccacatggatctgcattatgcttaccgtgcgtatggttgtggggccgagcattggaggagcactctatacaaatgtattgcaagaacggcaacaacattatgtaacccgttatgcacagaatgtggacctgcttaatccggatgcttccgcttcttttctcggtacggtgcaaggaatgaaatatcaggggaagagtgagacggaagcccgtaatatggccgccatatctaccaaaggccgtattcaggtgcaggctacactttccgctcttaaagaaatggcgggatggacgatctatggtggattaatttgtatgatatttgtgcttgttattccttatcctaaacgaaaattgttaacttagtgccgtttttagtagtactctgttaatatgttgttataatgggaattggacgagatcgtttgctgcagtttgaacgcgatttgctaaacggaaaaaatatatgtagttcaagaggaatatttgtgacttttccctccccgctgcaagcaccttttcgtatgaaggggttgggggtgattgtttgtggacaaggagagtttctgtttttactcaatcagaagaaacatttggctaaggcgggtgaaagtttgtttattcctgaagatggtgaatttcagatcctcgaagaatctagggatttggaaatacagatgttgttttatcagatagatcctattcgggatattatgggtaatctggttgtttccatgtatatgtattctcggttgacatctgaagccccttcttgcgtgtggaataccggtgaggaggaagatattctgaaatatatgtctttgttggatagtgctttgcagcctgaagagaattcatttaagttctatgaacagaagttgcttctgcttgcactgacataccggatttgctctatttataatcgtaaacttgttggtgaaagacgagatgcgggagggcgtaagcgtgaaacctttatccgcttgattcaactgatcgagcagcattatatgcaggagcggggagtcgaattttatgcagataaattatgtctgtcacccaaatatttgtctgctatatctaaaagtatctgtggatatacggtacaggaactcgtttttaaggcgattatacgtaaatgtatctccttgcttaaaaatactcaaaaaaatattcaggaaatatccaatgactttggcttcccaaatgcctcctattttggtactttctttaagaagcaaatggggatgtcgccacaacagtatcggaaaagtctctaaaggattattccttttctccgtaagcaaggtcgcctgcgtcacccaatccgggaacgatataagaatgttcgttgatttcaggatcaatagcggcacaccagataatagtcttgtcttcggggaatatatttttgatatgttcgatggcttgttggctggcgataatggaagctacatgaatctcggctgggtgacctttggtcagcattgcctgataactgagttccatgctactacccgttgccaacatgggatctgtgatgattagtgttttgtcatcaatgcgtggtgaagcaatatattctatgtgtatatcaaatttcagtgtatccttatatttacggtaagcagaaacaaatgcgttctccgctccgtcaaaatagcttaggaagccttgatgaaaaggtagaccggcacgtagaatagtactgataaccaattggtcgtccggagtgctgactggggcaattccgagaggtgtccgaatgttctttaccgagtaggtaaactccttactcatttcataagccatgatttctccgatacgctcaatgttacggcggaaacgcaggcggtcgttctgaacttctacatttctaatttcggagacgtattggtttagaatcgaatttgttttgctaaaatcaactactttcatgatgaataattatttaatgtatcccgcattattttgttttgcaaagtaagcgataatctttcaaattgcaatattcagtttgcagatattgttaggaatttataaaagagattcaattagggaaaaatttctctaatcccttcttgcattccaaagaaagtattacttttgtacccggatttacaagagggtatccaatctcctctgcatttatatatcatagaaagagataataaaacaaaataccaattttaattaattcaaaagaaaatggcaaatttagatttgagcaagtacggtattacaggtgtaacagaaatcctgcacaacccgtcttatgatgttttgttcgctgaagaaacaaaaccgagtctggaaggctttgaaaaaggtcaagtaactgaattaggtgctgttaatgtaatgacaggtatctataccggtcgctctcctaaagataaattcttcgttaagaatgaagcttctgaaaattcagtatggtggacttctgacgaatacaaaaacgacaacaaaccttgtactgaagaagcttgggctgacttgaaggctaaagctgtgaaacagttgtctggcaagcgcttgttcgttgttgatactttctgtggcgctaacgaagctactcgtatgaaagtacgttttatcatggaagtagcttggcaggctcacttcgtgactaatatgtttattcgcccgacagcagaagagcttgctaactacggagaacctgattttgtatgtttcaacgcttctaaggctaaagttgacaactacaaagaactgggcttaaactcagaaactgctacagtattcaacttgaagactaaagaacaagttatcctgaacacttggtacggtggtgaaatgaagaaaggtatgttctctatcatgaactacatgaacccgcttcgtggtatcgcttctatgcactgttctgctaacacagatatggaaggtactagctctgctattttcttcggtctgtcaggtacaggtaagactactttgtctactgacccgaaacgtaaattgattggtgacgatgaacacggatgggataacgaaggtgtattcaactacgaaggtggttgttatgctaaggttatcaacttggataaagacagtgaaccggatatttacaatgctatcaagcgtaacgctttactggaaaacgtaactgttgatgctaatggtaagatcgatttcacggataagagtgtaacggaaaatactcgtgtttcttatcctatttatcacatcgaaaacatcgttaaacctgtatctaaaggtcctcacgctaaacaggttattttcttgtctgctgatgcgttcggtgtattgcctccggtatctatcttgaatcctgaacaggctcaatactacttcttgtctggatttacagctaagttggctggtacagaacgcggtatcactgaacctactccgactttctcagcctgcttcggtgctgctttcttgtcattgcacccgactaaatatgcagaagaactggttaagaaaatggaaatgaccggtgctaaagcatacttggttaacactggctggaatggttccggcaaacgtatctctatcaaagatactcgtggtattatcgatgctatccttgacggttctatcgacaaagctccgactaaggttattccttatttcgattttgttgttcctacagaacttccgggtgttgatccgaaaatccttgatccgcgcgatacttatgaatgtgcttgcaaatgggaagagaaagcaaaagatttggctggacgtttcatcaagaactttgctaagtttacaggtaacgaagctggtaaggctttggttgctgcaggtccgaagctctaattggaaaatcagatataatagaaaagcggttcgaatgtcggaccgcttttttgtttgctcaacatgaaaatatctaaagaaaattgcgttattttgcagaataactattaatcatataaaatatggaagaacaaaataataacggtcaattgcagattgaattgaaggaagaagtggcacagggtacatatgccaatcttgctatcattacccattcaagctcagaatttattcttgattttatacgtgtaatgccgggtatgcctaaggctggagtgcaatctcgtattgttgtagctcctgagcatgcaaaacgcctgttgcgggctttagaagataatatcgctaaatatgaacgggtatttggtccgatacgtatttctgacgaatcttcgattcctcctttagcgagcgtaaaaggcgaagcgtgagactgatataaaaatattaaaaaataaaaaaaggttgtagtgcattgaatattcaaatattattcgtatttttgcagcccaaaatgtatagttacgaaattaatataacaataatataaatcaaaaaacaattaaaatgcctacaattcagcaattagtaagaaaaggacgcgaagtgctggtggagaaaagtaaatctccggccttggattcttgtcctcaaagacgtggcgtttgcgtgagagtatatactactactccgaagaagccgaactctgcaatgcgtaaagtagctcgtgtacgtttgactaaccaaaaagaggttaactcatacattccgggagaaggacacaacttgcaggaacactcaatcgttttggtacgtggcggtcgtgtaaaagaccttccaggtgtacgttatcacattgtacgtggaactcttgatacagcaggtgttgctggtcgtactcaaagacgttctaaatacggcgctaagcgtccgaaaccgggacaagctgcaccggctaagaaaaaataaggattaaaacctaattaaaattaaagtaataacttacgttttagtttgttggagatgctaaaggttgagtaaattctccggtgggagagttgaagaagtcaagaagtagacaaccaagaacaaaaaacattatttttcaaacaaatgagaaaagcaaaaccaaaaaaacgcgttatccttccggatcccgtgtttaatgaccaaaaggtttctaagttcgtaaaccatttgatgtatgatggtaaaaagaatacatcttatgaaatcttttatgccgctctggaaacagtgaaagtgaaacttcctaatgaagaaaaatctgctctcgaaatctggaaaaaggctttggataatgtgactccgcaagtggaagttaagtctcgccgtgtaggtggtgctactttccaagttcctactgaaatccgtccggatcgtaaagaatcaatctcaatgaagaatctgattctgtttgctcgtaaaagaggtggtaaatcaatggctgataagctggctgctgaaatcatggatgccttcaatgaacaaggtggtgcatacaagcgtaaagaagatatgcacagaatggctgaagctaaccgtgcatttgctcattttagattctaatactataagatacaatcattaaaacttaaagtaaaaggaattaagatggctaagcaagatttacatttgactcgtaatatcggtatcatggctcacatcgatgccggaaaaacaacaacttctgaacgtatcctgttctataccggattgactcacaaaattggtgaggtacatgatggtgctgctactatggactggatggagcaggagcaagaacgtggtattactattacatctgcagcaacgactacgcgttggcaatatgcaggtgatacttataaaattaacttgattgacactccgggacacgttgactttactgctgaggtagaacgctcattgcgtatcttggatggtgctgttgctgcttactgtgcagtaggtggtgtagaacctcagtcagaaactgtatggcgtcaggctgacaagtacaatgtacctcgtattgcctacgtaaacaagatggaccgctctggtgcagacttctttgaagtagttcgtcagatgaaggatgtgcttggagctaatccttgtcctattgttgttcctatcggtgctgaagaatctttcaaaggtcttgttgaccttatcaaaatgaaagctatctattggcatgatgaaacaatgggtgctgactatactgtagaagaaattccagcagaccttgttgatgaagcaaacgaatggagagataaaatgctcgaaaaagtagctgaatttgatgatgctttgatggagaaatatttcgatgatccttctactattacagaagaagaagtcttgagagctcttcgtaatgcaacagttcaaatggctgttgttccaatgctttgcggttcttcattcaagaataaaggtgtacagactttgcttgactacgtttgtgctttcttgccttctccattggatactgaaaatgtgataggtacaaatccgaatactggtgcagaagaagatcgtaaaccgagtgatgatgaaaagacatcagctttggcgtttaagattgctactgacccgtatgttggtcgtttgactttcttccgtgtatattcaggtaagatcgaagctggttcttatatttacaactctcgctctggaaagaaagaacgtgtttctcgtctgttccagatgcactcaaacaaacagaatccggttgaagtaatcggtgctggtgatatcggtgcaggtgtaggttttaaagatatccatacaggtgatacattgtgtgacgaaagtgctccgattgtacttgagtctatggacttcccggaaccggttatcggtattgcggttgagcctaaaactcagaaagatatggataaattgtctaatggtttgtctaagcttgctgaggaagatccgacgtttacggtaaaaactgatgagcagacaggtcagactgttatctctggtatgggtgagcttcacttggatatcattatcgaccgtttgaaacgtgagttcaaagtagaatgtaatcaaggtaaaccgcaggttaactacaaagaagcaattacaaaaacagttgatcttcgcgaagtttataagaaacaatccggtggtcgtggtaagtttgctgatatcattgttaagattggtccggttgatgaagacttcaaggaaggtggattgcaatttgttgatgaagtaaagggtggtaatattcctaaggaatttattccgtcggttcagaaaggttttacaactgcgatgaaaaatggtgtattggcgggttatccgttggattcactgaaagtaactttggttgatggttcattccatccggttgactctgaccagttgtctttcgaaatttgtgctatccaagcatataagaatgcatgtgctaaggcaggtccggtgctgatggagcctatcatgaagttggaggttgtaactccggaagaaaatatgggtgatgtcattggtgacttgaacaaacgccgtggccaggttgaaggtatggagtccagccgttcaggtgctcgtatcgtgaaagcaatggttccgttagctgaaatgtttggttatgtaacagcgttgcgtacaatcacttcaggtcgtgcaacttcatctatggtttactctcatcacgctcaggtttctacttctattgctaaggctgtattggaagaagtgaagggacgtgctgatttactctaaaatatctaaggcagcaggctagcgaatgactcttagcctgcggctttattttatttataactatctaaatttaaaattgtaatgagtcagaaaattagaattaaattgaaatcttacgaccacaacttggttgacaaatcagctgagaagattgtaagaaccgtaaaggctacgggtgctattgttagtggtccaattcctcttcctacgcacaagcgtatctttacagtgaaccgctcgactttcgtaaacaaaaagtctcgtgaacagtttgaactctcttcttacaagagattgatcgacatctatagctcaacagctaagacggtagatgctctgatgaagttggagttgccgagtggtgtggaagtagaaattaaagtttgataattaaaaattagtgaaatgccaggattattaggaaaaaaaatcggaatgacatccgttttcagtgccgatggtaaaaatgtaccatgcactgttatcgaagcaggtccttgtgttgttactcaagttaaaactgtagaaaaggatggctatgaagctgttcagttgggtttccaagacaaaaaggaaaagcacacaactaaaccgttgatgggtcactttaaaaaagctggagtaacacctaagagacacttggctgagttcaaagaatttgaaacagaattgaatctgggtgatacagtcactgtagaaatgtttaatgacgctaactttgttgacgttgttggtacttctaaaggtaaaggtttccagggtgtagtaaaaagacatggttttggtggtgtaggtcagactactcacggacagcacaaccgtgctcgtaagccgggttctatcggtgcttgttcttaccctgcaaaggtattcaaaggaatgcgtatgggtggacagcttggtggtgacagagtcactgtacaaaacttgcaggtattaaaagtaatcgcggatcataaccttcttttggttaaaggttctatcccgggttgcaaaggttcaatcgtattaattgagaaataatggaagttaacgtatataacattaaaggtgaagacactgggagaaaggttacgttaaacgaatctatcttcggaattgagcccaacgaccacgctatttatttggacgtaaagcagtttatggctaatcagcgtcagggtactcataagtcaaaagaaagaagtgaaatcagtggttctactcgtaagatcggtcgtcagaaaggtggcggtggagcacgtcgtggtgatatgaattcaccggttcttgttggtggtgctcgcgtattcggcccgaaaccaagagac

SEQ ID NO: 11910 - DNA, 1700 bp, Unknown
  gut microbiota DNA sequence
aatatgagaactaaagaaaggaacaaattatggaagaagtcatatagaaatttatgacaagcacccattaaacaaccgttgtacaactgttatacttccattatcccataaccatttgtacattaacgtgccgatattgttaacttcctacggccgtggtgacttcttcccacagtcgtgacgagttcctaccacagccgtgggaagatcttgtcacggccgtgacgcactaaagataccggtactttagtggaattataccggcatcctaacgtaactataccagtatcccaacataagtataccagctactctccccataaagtcccacttgattaatcttaaaacaaggcatttgacaagaaatcaaggctgacaataaaaatgcatatcttttactttcaacctattatcagcatctattgtcatgcagtataaaattggtattcaaccacttaaatatcatcctgacagattgacaataaaaagagcacaaatcgttaagtattagttaaacaaaataagacgattgttcatttctacatctttgtagaccaattcagttttattcttttaatccttataccatttcgagttccttgttgcatacccctaagagaaaaactgtacaaattgatttaaatcaaaatcatccggtctgaactcaccttgaaagattttgttttacctttgcagccgaaataaaaaagcggcaaaaaataaaggtaaaaaagtaacaggtattaggtagggtttcgtatgaagaagagtcttattgcattggcgttcggcacactgggattgggtattgccgaatttgtaatgatgggaatattgcccgatgtggcaaaagatctaggtatcagtatcccgactgcgggacatttcatttcggcatacgctttgggcgtatgtgttggcgcacctgtattgacattggcccgtaaatacccgttgaaacacattctgttagtactggttaccttgattatgataggtaatatctgcgcggcaatggcccccaattattgggtattgctaattgcccgtttcatctccgggcttcctcatggtgcctatttcggagtaggttctatcgttgcggaaagactggccgataaaggaaaaggttcggaagccgtttcgatcatgattgccggaatgaccattgccaatcttttcggtgtacccttgggaacttctctaagtaccatgctctcctggcgtgtcactttcctgttggtaggaatctggggaatcgttatcctatattatatctggcgctgggttccccacgtagaaggactggaagatacaggtttcaaaggacaattccgtttccttaaaactccggctccgtggctgattcttggcgctacggcactaggtaatggcggtgtattctgctggtatagctacatcaatccgatgcttaccaatgtgtccggcttctccgctgaaagcattacgcccttaatgatccttgctggcttcggtatggtgatgggaaacctgattagcggacgtctctccgaccgttacacccccggaaaagtagggactgccgcacaagcacttatctgtattatgttattgctcatcttcttcctttctccctataaatgggcagcagccctgttgatgtgcctttgtacggcaggattgttcgcagtatccagtccggagcagatattaattat

SEQ ID NO: 11911 - DNA, 5405 bp, Unknown
  gut microbiota DNA sequence
ggcatttgggattacaatggcaatggcatgccaataaaaaagacacttacgggtttactaccgatttgggatttatccgtctttatgcaggcagcctttcgaaagagtttgtgaacttctgggaagttcctaatctgttgatgcaaaagttcccggctgaagagtttacagctacgaccaagctgacatttactgccaagcaggatggagaacaaaccggaattattgtgatgggatgggattatagttatctttctattcgcaaggcgggggatcagtttattctgcaacaggcagtttgtaaggatgcggaacagcaaaatcccgaacagataaaagaattggcaaacattccggtaaaatatctaaagatgccgggagtagcagataatgaatggcaaacagtttatttacaggtaaaggttcggaaaggagccatttgtacatttgcttatagtctggacgggaagaaatatacgacagtgggagagtctttcacagcccgtcaaggcaaatggatcggagccaaagttggagtattttgtgtaactccgaatgagggcaatcgtggatgggcagatgtagactggttcagagtcaattaaaaattaagaattagaaattaaagtagatatatcagattaagatgaaaaagattgtagtaggtctggctgtggtgttaggtttctgtacgtgtgctcatcagccttccggtacattggatgtgaataaggcattggactactgcgcaaagcagacacaacgtacacttacggaactgaaaacagattccggaattgactatacaatgatgccacgcaatatcatggctgacgaacaacattggaattgtcgtaaggcgacgaaggaggagtggtgtgctggtttttggccaggagtactttggtatgattacgaatatacaaaagataagcaagtgttggaagaagcggagaatttcactcactcattgaagtttctttctcatattccagcttacgatcacgatttgggatttcttgtattttgtagctacggaaatggttatcgtctgactaagaatccggcatataaacaggtgatattggacactgccgatacattggctaccttgttcaatccaattgtaggaacaattctttcatggcctcgtgaggtagaaccgcgtaattggcctcacaatacaatcatggacaatatgattaatctggaaatgcttttctgggcagctaagaatggcggtaatccttatttgtatgacattgccgtgtctcatgcggacaaaacgatgaaaagccagttccgtcctgattatacttcttatcatgtggctgtatatgatacaatcacaggcaatctgattaaaggtgttactcaccagggatatgcagatagtacaatgtgggcgcgtggacaagcatgggctatttatggatatactgtggtctatcgtgagacaaaagatcctaaatacttggattttgctcagaaggtaacggatgtttatttggatagactccctgaggataaagttccttattgggattttgatgatccgagtataccgaatgctccccgtgatgcttcggcaggagcggtggttgcttctgctttgctcgaattgtctacctatcttcctaatggaacaggaaaacgttataaggatgcggcaatcgagatgttgacaagtctcagctccgacagttaccagagtggtgaaagtaaaccttctttcttgcttcatagtgtaggacactggccgaatcactcggaaatagacgcttctatcatttatgctgattactattatatcgaagcgttgttgaggttgaaacgtctgcaagaaggatacggagtgcttggataataaggctcttttgaatactggtaagaataataaatgctctgcaagaaagattcattcgttgcagagcatttttactggttaggtttagggctatttattgttttaccttaatgatgtcataattcaaatcactaacggcttcctgtaggctgtcatttaccaatcgaagagttgtatcattcacaattacgaaatacatgggagcttcaccacttttcggggttaatttgactgcagtaacaggttttttgtttaccaccttatgtattgtctgttgctttccattggaagtgaaagtcttgttctgaccttggccttgagcgtccaggtaagtcatatccagtgtgtaagtagtatcaacaccatcagttgcagcattcagggttaacacataatcgatacccggaccgtcggcagcaggaagagtaccggcatagacttctgtcatttcggtaatcggagtcatagcgagggcaagactgtctgcttgtgcctctgcggctttgttggcttttgattggcaagatgccaaagcagctacgacggctgctaacataattacttttttcattgctaagtgctttaagttaatataaatatagtgagctatcgctcggttttactttattcctcttcccgtttgatgacaagtagtttgtctactcgtccccgatccatatccactacttcgaattgcagattcttgtatgtgaagatgtctccggctttcgggatacgaccaatcaggaacattgccagtccgcctaaagttgtgaagtcttcggatttcaggtcttcgtatgataaaattcccatctcttccataaaatcgtcaatgttcattgaagcttctaccaacatcgaaccatcctgccttgtgatgatttcttcttcttccgtttcgtcctcttcaaggatgtctccgaagatactttccgtcaggtcgtgcagtgtgataataccttccgtactaccatactcgttaacaacaactccgaacttgtttttgttcttcttaaatagctctaaaactttatttgcatacaaactttccggaataaagagagggggacgggctatttcacataagttaaacttctgctggttaccgaccatcaggataatatctttcacggacactacaccgataatctcatctttccgctcgtctaccaatagatatttgctgtaatgttcctcttcgatcactttcattaccttttcccgcgtatcatccggatgaaggataatgagatccctgcggtgtgtcatcaactcattggctcgcttgtccgagaagcggaacacatcacgtatcatttccgtttcctctttgtcaatcacaccctgttccgagctttggtgaagaatcatcttaatctcctcctgtgtcatagggcgttcttcacttttcagaccgatgagcttattcaacaaacgggtggatatactgagtaaccagacaaaggggtaggagacttttgtcagcagaatcataatcggactgaataagatggcatatttctccggattactaagagcaatggatttagggaccaattctccgataatgagagaaagataggtaatgactgctaccgtagtaatcatggcaagattacgcgcataagcttcagctcccggaataagggagaatagaggaacgagatcatcggcaatggctactccaccatacgcaccggatacgataccgatcagggtaatacctatctggatggtggataagaacttttccggttcttccaactgtttcagaactccgcgtgcggatttgttacctttagcgacaagtgtttcaagacgtgctttgctggatgataccagcgcaatttcatacatggcaaaaatgccattcagtatgagtaagaaaagaattataagaaattccataaatggattaaaatggttattgcttcgaaattacatgaaatcaagacactatgcaaatctgtgtaatagattaatgattttttaatactagtggattctttttatcggaaaaagaaaaggagatacaaaggttgtaaaaccaacgtatctcctttttccgtccaattcaggaaggatgtctgttattttttagcataagtatccgcctttgctttggctcgctcgattcgcttcattgtatcgggatgtgaagagaacatcttttggagataagaaggtttttctgcaccttctgagagtttcgccagcttggtcagcgaattagccatggcataagggtcgataccattctttacacagaactctacaccataatcgtcggcttcgccttcttgtttttgtgaatattgcgcacctgccaatgcttcggccatagctccgagttcagagtcggtcagtttggcaaccttgtcgctggtagcaccggctgcattctttacagccgaacgaaggtaggcgttcttcatggcgtcttttgaatcggtatgaactacatgaccgatttcgtgacctactacggccatgacttcttcgtcagtcattacatccattagtccggcacagatacgtacactaccgtcaccacaggcaaatgcattgatatctactacttcatatacgccgaagttcagttttagcccgtctacttctttaatatgaccggtcagtttttccaggcgtttgccgtattccgtatccggtttggttaatggattgtgagtgtccatccattccatgtattccttactcatgttggcaatatcggcatcagataatgttacggctgatactacgtctttgccggcttgtaatgctttccctaaattaaactttttgccgaactgtgcagatgctgtcatgcccattcctaagaggataaaggcgatcatagtaatttgtcttttcatacttttaaaggtttttatattaatattcaaatgtaattcctaaggtagggagtaaggtcccacttgactgcttgatacgtttcattctataatgctgactatcggctggagcttccgggttatcgataacaccggtactcatcagtacgtcctgttgttttagtttgcttacggtgatattctgcaaatccagatagaatcccagcatacagtgtttcaggtaaaaagtcttatccacacggatatctacttgggcaaaggcgggaaggcgttccttattatacctcgaatagtcataatatgcctttccttgtgcatcccaggcagataccagagaggatttctcttcatcgtagggggtatagggagcaccaccgatacaactgactttcattccgacactccatagatgcgggagattgtaagttccccgtagattgaagatatatcggttatcccatgcggatgcgatgtattcactttctttattgttacggtattcacttttgaacagggtgaaagaagaagccaggttcaactttttggcaattaaccattttactaagatttctgctccataagaacgcccttgtgcggtggaagttagcagttcattgccgatcactccgtaatcatttcctttgcaggccagtggaatg

SEQ ID NO: 11912 - DNA, 13833 bp, Unknown
  gut microbiota DNA sequence
tatttattttatataagatagatattaatttgataacctgtttacttcttctcgatcagtttgaaccttattcttagtgtttgcctttcttcgtcataatcataactaatgattttgaaggtacccacttcagaagtattggacacatgcaatccgatgcaggcgcaggcatcataatctccaatgcggacaatgcgaagagtttcgcttgcatcggcaggtagtttgcttaaatctacgatgtctttggcctgttcatgtgtcatatactcaacagtcacaggtaggttctgactgattgcctcgttcactttattttcaatagactggatttgttccgctgtcggacatgacgaaagtatatagtcacatttgctctttttcctttcgatgtgggcattgcgagaacgtgggcagccaaaggttttcaccatggtggcattgagtaaatgctctgctgtatgcataggagggtattcctgcttgttgtgatcgttgagttgaatttgttgttccattggatttagttatttgaattgattgtttctattttacgatagatcctatacgtatagatataaaaaaaggagcaacgccttgctccaacctttgttaaccttaaatctaatactatgaaaaacacattgcaaaggtacggacttctgtgatatttgcaaataatccaagaaaaaatgtatgttatataacatagattaagaaaatgcattcctgtcttaacggttattcggaattttactgtctatgtacagagattttttttatctttgcgtccaatatctattactaatacctaatataaatatggataaaagaagaatgtaccaatggttactgttggcaattatttgtttaagcttctcaatgggagagagctatgcacagaaaaaggattttgcaaatttagctcgttattcaaaacaaaatgctgcgcttccgcaagcgacaaaaaaagataaacgggttgtttttatgggaaattccatcactgaaggttgggtaaggactcatccggacttcttcaagacaaatggatatattggtcgcggaatcagtgggcagacttcttatcaattcttgttacgttttcgggaagatgtgattaatctttctcctgctttagtagtgattaatgccggaacaaatgatgttgccgaaaatacacaggcttataatgaagattatacgtttggaaatatcatctccatggtcgaattggctaaagcgaataaaattaaagttattctgacttccgtacttcctgctgctgcattcaagtggagaatggaaattaaagatgctcctcagaagattaaatctttaaatgatcggatagaggcttatgcaaaagcaaataaaattccgtatgtggattattatcaagcattggtggttaatgaaaaccaggccttgaatcctcaatatacaaaagacggagtacatccgaacagtgaaggatatgatatcatggaaccgttgataaagaaagcgattgataaagcactttgaatacgaagataacgtatagacataaaaaaaggagcaacgccttgctccaacctttgttaaccttaaatctaatactatgaaaaacacaatgcaaagatacggacttccggcaactttgcaaattatcagccattgataagtgtttttataactctaattaacggaatggatgacgtgatataggtttgttaagattttctatgcttgacaatcaaatttgtagtagaagagaagtagggaaatctatccccatttctctttcattaagttttccaattttaataattcgtcacggtattgggcagcttcaataaattcaagctttttggctgcttcctgcattagtttgcgcgtacgttcgatactcttttccatttgtgctttactcatatactgtactaccggatctgccgcaatgttcggagttgtcggttcaatataggcttgtttttctttcagcaattcatttgtttccgaattagcgttgccgaatacatccaagtttctcgctttcttgatctgctgtggagtaatgccgtttgcctcattgtatgccaactgtttctctcgtcgacgattggtctcgtcgatggtcagtctcatgctgtccgtaattttatcggcatacatgattacttttccgttcacattgcgcgctgcacgtccggctgtctgcgtcaacgaacgatgggaacgaaggaagccttccttgtctgcatcaaggatagctacaagagatacttccggcaaatcgagaccttcacgtagcagattgaccccgatcagcacatcgtaaattccctgtcggaggtcatccatgatttttacacgttcgagagtatcaacgtcgctatgaatataattacaccttatattattgttgaggagatattcagttagctcctccgccatacgcttggtaagagtagtgacaagaacacgctcttctttctcaatacgcagttgaatttcttccatcagatcatcgatctggttcaagctcgggcgtacttcaataatcgggtccaacagtccggtaggacggattacctgttccactacaatcccttcggattggatgagttcatagtctgccggtgtagcgctgacatagatcacttgcttcgccatttcctgaaattcttcaaatttcaacggtcggttatccatggcggcaggtaggcggaaaccatactccacaagattgattttacgtgccctgtcgcctccgtacattgcacggatctgaggaacactgacatggctttcgtcaatgacaatcagaaaatcgtccggaaagaaatccagcagacaataagggcgggtacctgcagcacgaccgtcgaaatagcgggaataattctcaatgccggagcaatgtcccaattcccgaatcatttccatatcgtatgtgacacgctcgtatagtcttttcgcttcatattctttgccgatagactcaaagaaagcgacctgtttggtcaagtcatcttctatctcatgaatagcgcggagggttgcctccttagtagtcatgaacaaattggcgggataaatcttataagcctcgaagggggcgacagtgactccgctgactgggtctacctcctctatgccatcaatctcgtctccccaaaatgtgacgcgcaacaggttgtccgtatatgccagataaatatccacagtatctcctttgacgcggaaattaccacgattaaggtcgatatcgttgcggacatacagactgtctaccaggcggcggaggaaaacattgcggtcaatcatgcgtccccgttctatttcaatcacatttttataaaagtccgaagggtttcccatcccatagatacaggaaacggaagagaccactactacgtcttttcgtccggagagtagggcggaagttgcggcgagacggagcttgtctatctcgtcattgatggcaagatccttttctatataagtatcgctgctaggcaaataggcttccggctggtaataatcgtagtatgaaacgtaatattccaccgcattattcggaaagaatcccttaaactctccatataattgggcggccagcgtcttattatggctcaaaatcaatgtcggcttattgatattagcgattacattggcaatggtaaatgtttttcccgatcctgtgacccccaataaagtctgtgcgggaactccttgaagtaccccttcagtcagttgtgcgattgcttccggctggtctccggtaggtttataagctgatgttagttcaaaattcatagttaattctaaaattggaacaatattcggcaaaataatcgagattacaaatcatttttccaaataaatcctttactttgcaacaaaataattgaaaattgagaattgaaaattaaaaagtattgcagaagcagataattccctttcattctcgattctctattttttaattttaataatgaaaagcatgatttggaatgagagcattgagtgtatggatcgtgagagtcttcgtaagattcaaagcatacgactcaagaaaattgtagattacgtttatcacaacacacccttctatcggaagaagatgcaggaaatgggagtcactcccgatgatatcaatagcattgatgatattgtgaaactgccgtttaccacgaaacatgatttaagagataattatccgttcgggctttgtgctgtaccgatgagtcagattgtacgtatccatgcttcatccggtacgacggggaaaccgacggttgtcggctatactcgtaaggatttgtcttcatgggcggaatgtatttctcgtgcctttaccgcatacggggcaggccgatcggacatttttcaagtatcatacggatatggacttttcacaggcggactgggggcacatgccggagccgaaaatatcggagcttctgtgattccaatgtctagcggtaacactgaaaagcagataacgttgatgcatgacttcggttcgacagtactttgttgcacgccttcttatgcactgtatctggcagatgcgattaaggattcggggtatccacgtgaggagtttaagctgaaagtcggtgctttcggtgcagaaccttggacggaaaatatgcgccatgagattgaagaaaagctgggcattaaggcatacgatatttatggattgagtgaaattgccggaccgggtgtgggctacgagtgtgaatgccagcatggaacccacttgaatgaagaccattacttccccgaaattattgatccgaatacattacagccgatagaacccggtcaaacaggcgaactggtgtttactcaccttacaaaggaaggtatgccgctgctccgttatcgtacgcgcgaccttaccgctctacattatgacaaatgttcctgtggacgtacattggtacgcatggatcgtatcttgggacgcagtgatgatatgttgattattcgtggtgtcaatgtattcccgacacaaatagaatccgttatttttgaaatggcggaatttgaaccgcattatctgctgatagtgggacgcgagaataataccgatacgatggaacttcaagtagaagtacggccggaattctattctgatgaaatcaataagatgttggctctgaagaagaaattgggtgcgcgtctgcagagtgtactcggattgggagtcaatgtgaagctggtagaaccgcgtagcattgaacgcagtgtgggtaaagcgaaacgggtgattgataacagaaaactttaaaacttaaaattaatactctacgattatggtagcaaaacaactttctatctttttggaaaacaagtcaggtcgtttgacggaagtgactgaagtgctggcgaaagaagatatcaatctttctgctttgtgcatcgctgaaaatgctgatttcggtattttgcgcggaattgtgtccgatccggatagagcatataaagctttgaaggataatcattttgcagtaaatgtgactgatgtggtcgggatcagttgtcctaatgtgccgggagctttggcaactgtattgggatatttgtccgctgaaggggtgtttatcgaatatatgtactcgtttgccaataataatgtggccaatgtagtgattcgtcctagcaatctggataaatgtattgaggtgttgaaagaaaagaaagttgatctgctggcggctagcgatttgtataaactttaattgtctttttctccccatttgtcgatgtttaacgccttttatgtattaaaaaacatagattaattgctaaattccctgcgaataagtaactttgcgcaatattttaaaataggatgaagaaaaatatcattataactttgcttgcggcagctactctcacttcatgtggggagtataataaattgctgaaaagcaccgattacgaatacaagtacgaagccgctaaaaactattttgcaaaaggacagtataaccgttcggctactttgttgaacgaattgattactattcttaaaggaacggataaagcggaagaatctttgtatatgttgggcatgagttattataatcaaaaagattatcagactgcggctcagacttttatcacctattttaatacatatccccgtggaacttttactgaattggcacgtttccatgcaggtaaagcgttatttttggatactccggagccacgtttggatcagtcaagtacttatcaggctatccaacaattacagatgttcatggaatatttcccgaacagtagtaaaaagcaagaggcacaggatatgatttttgctttgcaggataagttggtgttgaaagaactttattcagccaaattatattataacttgggtaattatttgggcaacaactatgagtcttgtgtaatcacggctcaaaatgcactgaaggattatccttatactgattatcgcgaagaactttccatcttgattctgcgtgcaaggtatgagatggctatttatagcgtggaagataagaaaatggatcggtatcgtgagacaatcgatgaatattatgcttttaagaatgagtttccggaaagcaaatatctgaaagaggctgagaaaattttcaatgaatcacagaaagtaattaaagactaaatttaaatagatttatggactacaaaaagacgaatgctcctactacaacggtaacccgtgacatgatggaactctgctccgatacagggaatgtttatgaaacagttgccattattggtaagcgtgctaatcagattagtgtggaaatcaagaacgatctttctaagaaattggcagagtttgcttcttatactgacaacatggaagaagtgtttgaaaatagagagcaaatcgagatttctcgttattatgagaagttgccgaaaccggacctgattgctacgcaagaatacatcgaagggaaaatatactatagaaatccggctaaagagaaggaaaaacttcagtaatttattttctgacgaaagaattgatagtcaagtagtaagtgggatgataatccctgctccttattgcttggctattattgtttaactcaactactatttatactatttatgattcaaagaattcaaacagtttatttactgattgttacaggtttgctgattacagcaatgtgcttgccgatggggtattttactgatacgatgggagagcactcttttaaagctctaggaatagaactaaacggtgcttacgagtctacatggggcttattctgcattttattgcttagtactattgttgccgtagctacaattttcttatataagaatcgtatgttgcagatacgtatgacgattttcaacagcttattgctggtaggctattacattgcttttcttgctttctattttgcattgaaaaatgatgcgaatatgtttcgggtggggtgggctttgtgtttgccgcttgtttccattattctgaatatattggctgttcgtgctatcggacgtgatgaagtgatggtaaaggctgcggatagattaagataaaattttccctatactctctgaataattcgttaataatatgatagataaaaagcatagctttataggagttaaagctatgctttttgctatctaaagctgcgctttagcatctttaaaacgatgctttgcagatgtggaaattctttttgcgtaggagggggtttatttcttcaaatcgaataaataagtgagttttattgaaattgttccatgcgctgcacgggcaaaataatcctttttggttgtcttgtagaaatcggataaggcaaaataataacgtccttccactataaaactaccggcttttttcgttctaagctctacaccaccgcctccggtaatgccataatcaaatttattctgaatcttagtaccatataccgctttttgggtatcattgagtttattcatattgactccttcaatcttctctgattctccaatgagaaatcctatttgcggtccggcatggatgaaaaattgtaagcctctctcattaccaaatgctagatgtgcaaggaaaggaatatcaatgtagctcattttacgagtgtaaatttgagtggggtcttctaccatatctccattttctcctggaatctcaaataattgatcccaacctcgttgtgagaagttcagttcgacctgtgccccgcaaatcatggcaaaatacttttcagaaatataacgggctgtcaatcctccggttattcccatcaggctgttctgtttgatggtaggagtgaaggatacactatttaagttgacacctccgttgacacctacagaaaaattgcttcgtgcctctccgatctgagcagtggcggagagagtgaatcctgttagcagaaggcctgcgatcaaaaatggttttatctttatcattttccgtattattcgaagtcaagttttactaattcaaagtttttagtgaaacgaatgaagaacactttcttattaataaatcctccccaattattcacacgttggaatttgaagccggtttgaataggagtcagattcattttagacagattattttcaagttccgagccataacgtgacaatccttttaagaaaaagaatccggtgtcaaaaccgagcattgcataattgggatacttgctgcttaggtctttactgtaccatttgtggtaagcgttggtaaactgcacggcagctgggaatagtgtgttcgtataaaacgaagaatagaaatacacgtccagctcaaagaagctttccaaatgatctctcgtgtaagtctgccattccggatagccgaacaaatggatgttctgtcctgcattatctctgactaacagcgtcaattgcgggagtactttaataagcaatacattttttcctgaggtaggaataaagatgttctccttatcattgcggagcgctgctttcaacgtttcttttgttgcattctcgttgaccgtttgcatggagatgcccttattctttagctcttgtttcaagccactgataaattcagccttttctttgtcggcactgataggctcgataaagataacatgcgcattgggaaattgacgtgtgaaatgctcgtaaacttctgaatataaataagattgtggtgtgttgatctgataaacagccggattattgaatacctcttcacccttttgagagaaaggaatcactagacgtatatcattcttttttgcgaaatcagacagtggcttgatttgcttctgatgcatcggcccaaaaataacatccatcttcttcatctcattctttgaaagaatcgcattcaaggtagaaacctcttttccactgtcatatacatataaatccaaagaagtacctgtacgtttcagactatccactgccataagaaaaccttcgtagtattccaccatacgtttgtcttcctggaaaggcagtatcaatgcggctttaatggtcgacatcttcttgggagtctccttactttcgcggaaaagttcgctgttacttggagggatagcatatggatcttctttctgggtgggttgcgtggttgttgccaccgggtaggggatacatagaagttgtccttttttcatcccttttttaagttcgggattagcggcaatcagttcctcttcactgattccgtattcgcggcttacgctaaagattgtttctttgcgttttactttatgcatttctttgcatctgggaaccacaggaccttgaatattactttgctcagtcggtttttgggcggtaacgacctgttctttctccttttgcgggataagaattacctgtccgatacggaaattctcagcgctcaatcccggattcgcttcacatatatccttagcagatatattgtacattgttgtcagtttatacagtgtctctccggcttgaattgtatggaatgtttctcctttctggctttcttttcctttgggaattttaatggtttgtccggcataaattttctcgtcacaaccgggattcaaatggataatatccgatgttgtgacattgtacatcttggatatagaatataaactttgtcctttttcgatggtatgcaagaaataggattgattctcctgtgcataactgacggcgtatgaaacgcttataaaaagcagaaataagaatattcggtttatcggtttcatcaaattataactattggtttttgaaatcaaggaacaaaggtacgaataatgccctatatcttcataagatttgagttaagaaaataatattgtgcttttttaggagcatatttcgggcggaaacattaattttgcagcatttatgaaggatatgaatatgcaggaaacagaatatattaatgtgtacggtgcgcgcgtgcacaatttgaaggatattgacgctgagattccccgtaacagtctgactgtcatcaccggattgagcggcagtgggaaatcttctttagctttcgatacgatttttgcagaagggcagcgccgctatattgagaccttttcagcgtatgcccgcaattttctgggtaatttggagcgtccggatgtcgacaaaatcacaggtctgagcccggtgatttccattgagcagaaaacgacgaacaagaatccccgttctacggtgggtacgacgactgagatctatgactacctccgtctgctatatgcccgtgccggagtagcttattcgtatttgtccggtgaggaaatggtgaaatacaccgaagaacagattctggaattgatcctgaaagattataaaggaaagaagatctatttgctcgccccgttggttcgtgcacgtaaaggacattatagggaactgttcgagcaggtgcgaaaaaaaggatatttatatgtccgggtagatggtgaagtgcgtgaagtaacgcatggaatgaagctcgaccgttataagaatcacgatgtggaagtggtgattgataaactggtggtgaccgaaaaagacgaccggcggctgaaacaaagtgtggcgactgctatgcgtcagggagacggcttgatgatgattttagatgcccagtcggaaagtatccgtcattatagtaaacgtcttatgtgtcctgtgacaggactttcttatcgcgaacctgccccgcataacttttcattcaactccccgcagggagcatgcccgaaatgtaaagggctgggcgttgtcaatcagattgatgtggataaggtgattcccgaccgtgaactatccatttatgagggggcaatcgcacctctgggaaaatataaaaatgccatgattttctggcaaatcagtgctttgctggaaaagtacgatgcgtcattaaaaactccggtcaaggaattgccggatgatgccatcgaagaagttctctatggttctgatgaacggattaagatcaaaagctcgttgattggtacttcctctgactattttgttacctatgaaggtgttgtgaagtacatccagatgttgcaagagaaagacgcttccgcaacagcgcagaaatgggcggagcaatttgctaaaaccactgtttgccccgaatgtaagggagcccgtttgaataaggaggcattgcatttccgtatccatgataagaatatcaatgagctggcgaatatggatatcaacgagttgtacgactggttgatgaaggtggatgaatttctttccgacaagcagaaaaagatatcagtggagattttgaaagaaatccgtacacgtttgaagttcctgttagatgtagggttggactatcttgccttaaaccgtagttccgttagtctgtccggaggagaaagccagcgtatccgtttggccactcagatcggttcgcagttggtgaatgtgttgtatattctcgacgagccgagtatcggtctgcatcagcgtgataatttgcgccttatcaattctttgaaagaacttcgggacatcggtaattccgtgatcgtggtagagcatgataaggatatgatgcttgctgccgattatgtcattgatatggggccgaaggccggtcgtcttggtggggaagtggtttttgcaggcactccacaagagatgctgaaaaccagtacaatgacttcgcaatacttgaacggacagatgaagatagaagttccagccaaacgcagaaaaggaaacggaaagtctatcttgttgaaaggagcgaaaggaaataacctgaaaaatgtagatgtggagttcccgttaggcaaattgatttgcgtaacaggagtatcgggaagtggaaaatccaccttgattaatgaaaccttgcaaccgattctttcacagaaattctaccgttctttgcaagatcctttggagtacgattctattgaagggctggaatatatagataaggtggtggacgttgaccagtccccgttgggacgtactcctcgttccaacccggctacttacacaggcgtattttcggacattcgtaatttgttcgttggattgccggaagctaagattcgtggttacaagccgggacgtttctccttcaatgtagcgggcgggcgttgcgaagcgtgttcgggaaacggttataagacgattgaaatgaacttccttccggatgtatatgtgccctgtgaagtatgtcatggcaaacgttacaaccgcgagacgttggaagtccgttttaaggggaaatccattgccgatgtgctggatatgacaatcaatcgtgctgtggaattctttgaaaatgttccgcagattctcaataaaattaaagttctgcaagatgtcggattgggctatattaagttaggtcaatcttctaccactctttccggtggcgagagccagcgtgtgaaactggctacggaactgtcgaagagagatacgggcaaaacactttatattttggatgagccgactaccggacttcattttgaggatatacgggtgctgatgggagtattgaacaaactagtcgataaaggtaatacagttatcgttatcgagcataatctggacgttataaaaatggcggattatatcatcgatatggggccggaaggtggtaaaggcgggggagaactccttagttgcgggacacccgaagaagttgcgaagagttctaaaggatatacacctaggtttcttcgcgaagaattaggactttgattttgcaaagaatggtgaccttgatgatctgaataataaatgccaatttatagaagatgaaaattaataaaacaaatgctgcccgcttgttggataaagcaaagataatatatgagttaatcccatacgaagtagacgagaatgatttaagtgccgtgcatgtggcagccagtttgggtgagaatattgaacaagtattcaagacgcttgttttgcacggtgataagaacggatattttgtatgtgttattccgggagagcacgaagtcgatttgaaattggcggctaaggcttccggcaataagaaatgcgacctgatacctatgaaagagctattgccgcttaccggatatattcgtggcggttgttcccctattggtatgaagaagcattttccgacttatattcatgagacttgccggaaattcccgtatatttatgtaagtgccggcacaagagggcttcaaataaaaatagctccggacgatttgattcgtgaatccggagcggaaacttgtcgtttgtttgaagactagttttacaaattatttgtgcaaaaactcaggaaaaagtatatatttgcaagaaatatttatttaatttctgattatccgtttatgcacctgttatatt

SEQ ID NO: 11913 - DNA, 935 bp, Unknown
  gut microbiota DNA sequence
ttgaatatgatcaaaatgataggttgaaagttgtacaaaactggggacagccctatgaagggaaggctacggaagtagatttatcggagacattggtattggaagctgaacattataatagaggtggcgaacattatggttaccacaaaaatccgtcggaaggggatatacaggtgggcacgggcaatggcattacatatcttaaaagtatgaagtccggagaatggatgcgttattcaattaatgtaaaacagactggatcctatgctattacttgtcggatgcgccagcaacgttcgggaggaaaattccgtattgctataaatggagtgtataagacgaacgaaataaagttgaatggttcgggcagtacatggaacgaagtttttatatatcctgtcgaattacaaaaaggtgaacaatatattgatttgcgtattaaaggtggagaattggatattgattgtatcaagttaggagaaggatgcagccaagtacccggtatcattcaggcggaagatttcgatgaaggaaagtatcaatttagggaaggttcgaaaggtaattttaaaacttaccggagtgatcagggagtagctatcagtgctagtagtaacatcatccacattagtaatacttctggaggagattggattcaatatacatttaaggttttgaggccggtctcgaatgttactgttcgtggggctgcagagaaagatgggaagttcgctttatcttttgatggaggagagctgttgactcctgttccagcaactaccggaaactggaacacttatagtgattttccagtgtcgaatgtacaattgtcggaaggtattcatacgatgaagattcatatacttaatccaatgaatgttgattcattcgattttcaataaaataaggttgacatcatttgaaacaaagtttat

SEQ ID NO: 11914 - DNA, 901 bp, Unknown
  gut microbiota DNA sequence
ggttggtttctgattatttgaatttccttgaatgtccggaaccagatttacccgtgaaggtaaaagatgtttctttggatgtggatacttatagttatacatacgatcaggtgggtacttataccgctacattcctgatgaataattttagttatgcacatgaggattctaaggtttgtgagttgataatcaatgtaacagaataactttaaatactatacagattatgaagtacataaaattgtatatacttttcttcttgatgatctttgccgttacaggttgtacaacggatgatttgaaagatgatgtgaacgacctgaaagatagggtgacgcttattgaggaacaggtgaaattgttgaatgataatttggcggtgatagcttatattcttgacacgcagaataagacaatcagtgaggtgaagaatgtaaccgataatggagaggttacacagaagaaaattgttctgagcgatggtacggaattgacgttgactataggtaaacctggaactataaatgagcctgaagttacagtaggagaagataaaatgtggtatatcaatggagaacctaccggtgtgatagccataggtgagccgggaaaaaatggtgaaggttatcctgagttccgtgtgcaggatggtgattggcaggtacgctttggtgacggtgagtggaagcctgtaactggcggtgaaaatgtggctgacggttctttgggcgatcagttttttgtgaaagccgaagtggtagatgataattttgtggtaacaatgacagatggcatggtacatacacttcctattgttgccgatttagcttgcgctattgataagacaagcataggtttagacgaagagggtttttgggtaatcgagaaagatacaagagta

SEQ ID NO: 11915 - DNA, 389 bp, Unknown
  gut microbiota DNA sequence
gaaatcttcttcatcgtcatattccccctgatactcgtcccggaaatcacgtacaaggtcgtccgcatcttcctcgttcaaatcacggcttttgtagttgcaccacacgaaaaaggcttcctgctcggtgtcgctcaaatcctccaccgcatcacataaggaaaagaagttttcagaaatccagctttcgccgattaagccctccggcacgttctcccaatcctgaaacatatattccgcatcttcctcgtccttgtgaagttcccggcaggcttcgtaaaattcttccttgtccgaatagtccgaaaggtcgagccatgcaccggacaaagaaccgttgttatacttaccgtaagtgcctacataaatttttgcttctgataatacct

SEQ ID NO: 11916 - DNA, 4800 bp, Unknown
  gut microbiota DNA sequence
aggataaattgaattgatagaactcacctttaacaaaaaaatagattatgcgctcattcattattcttctctgtctgataccgactctcctttttgcccgacagagccagctcaagacactgttagaacaagctattaaagggaaaaaggcggaaatagggattgccgttattatcgatggaaaagatacagtcactgtgaataacgacatccaatatccgctgatgagtgttttcaagttccatcaggcagtggctttggccgattatatggataaaaagagattgccgctagggactctgttgtcaattaagaaatcagatttaaaaccaaatacatacagtccgttgcgagatcagtttccacagggaggattcgaaatgagtatcgctgatttattgaaatacaccctgcaacagagcgacaataatgcttgtgatattcttttcaattatcaaggcgggccggattctgtcaaccggtatatacaatcactggggattcgtgattgcgagatcactcatacagagaacgatatgcacgaagacttagacctctgctatagcaactggagcacaccgctggctgctgccaaattactggaaatattccgccgcaaaacattgttcgatgaagcctacaaaaacttcatctatcagacaatggtagaatgccagaccgggcaggaccgtctggttgccccgttactgggcaaaggggtaaccgtaggacataaaacaggaacgggagatttcaatgcgaaaggacagcagataggctgcaatgacattggcttcgttctcctacccaacggacacgcatacagtatagccgttttcgtgaaagactctgcggaaagcagtctgaaaaacagtaagattatcgctgatatttcccgcattgtctataaatatgtaatccggacaacaaagtaatacaacaacgataacaataaagataaagacaaaaattaaaatcagcatgaaactacatcatatcgctatctggacttttcgtctggaagaattaaaagatttctatgtccgctttctaggtggaacgagtaatgaaaaatacatcaatccgaagaaaggattcgagtcctatttcatctctttcggagaaggcccttctctggaattgatgagccggacagacgtacaaaatactccgatagaagagaaccgtcttgggctgacgcatcttgccttcaccttccccagccgagaagaagtgcttcgcttcacggaacaaatgcgctccgagggatacatcatagcaggcgagccacgtacttcgggagatggttatttcgaaagtgtagttcttgatcctgacggtaaccggatagaatgcgtatgccccccgcaggcagacgaaccacaggatgattgttcgtttgaaacggaacgcttactcatccggccttttcgggaaaatgatgcagaaacattcttcgcttgttgccagaatccgaatctgggcaataatgccggatgggctccccataaatcgataaaagaatcgcgcgaaatcctccagaacgtgtttatcggtcaggaggatatctgggctataacactgaaagacacacgacagctcatcggctccatcggcatcgtccccgacccgaagcgggagaacccgcaagtacgtatgctgggatactggctcgacgagcctcactggggaaaaggatatatgacggaagcggtacaagctgtgcttaattatggtttcaacgaacttcagctcagccttatcaccgccaactgttatccgcacaacaagcggtctcagcaagtattggaacgtaacggctttatctgtgaaggtatactgcatcaggcggaacttacctacaacggaaatatatacgatcacctgtgctattatctgcctaatatatgccgacctgttccggaagactacgacgagattctgcaagtatgggaagattccgtacgccatacgcatcacttcctcacggaagagcatatccaattctacaaaccattggtacgcaaccactacttatcggctgtagaactgtatatcatccgcaataccaatggaaagattgtcgcctttatgggactgagcgacgaactcatcgaaatgctgttcgtaagccccggcgaacagggaaaaggatatggcagacgattgctggaatacgccacccggagaaaacagataaataaagtagacgtaaacgagcagaacgacaaagcactcggattttatctccgcatgggattccggatcataggccgagatgaaacagacggtatgggcaagccttatccgattctccatctgcaactaccggaggcagagaacggcaacaaataaaaacaactcattccccccaaaaaacgagagccatatgaacctgcgtgcaagactatctgagcgtgtacacatcgagaatatcagagagatacttcattacatacaagacaacgaacgcctcagagaagaaatctaccggttgatatatgatgaggacagcatcgtctcttaccaggcactgtgggtttgtacccatttctcgaaaccggaagtagaatggctgagcgggaaacaaaatgaattgattgatgcaacgcttacctgcccgcattcaggaaaacgaagaatgctcttgaacctgctatgtcagcaaccgctagccgaccctccacgggtggacttgctggatttctgcatagagcgtatggtatcccggcaggaaccgcccggagtgcagtcactttgcatcaaacttgcttaccagctgacccgtttcatcccggagcttcaacaagaattgcgcacaatgctggaaatcatggaacccgaattactggttcccgctatccgctctgtgcgcaaaaacacgttgaaggcaatcaaggcaaagaagaactaataattcttcatcagttccttaaaataccattgcatcttcccaaaattctccagggatatatactcattttcgttatgtatcgtacgctgctcgtactggttcagacaaataggcaagaaacggtagatgtcatcgctcaccgtctgatatttgtaggaatcggtacccccaatcgtaatataagaggtaacgatagctgcgggatatatttttgccatctcttccttgataatctcgaagcctctaacgttctcaggagagatgcttgaaggctcacgttccgataccacatgaatggcaacatcgtaaccttcacacaacttctttacatgctctatcaccccggcaaccgattcaccgggcaaaatgcggaagtttacagtaacctcagcctccgaagccaatacattggccgcatcactgcctttagccatcgtgatggcggttgtagtgcgtaccagcgcattggaggcgggagatttttccatagtcttcagcagtagcggttcgagcagccattgattggctatcgccatctgcgaaaagaatcccatttcctctcctacattatcgaaaaatgctgctatgggagaaatgatttctgccgggaactggttgtcattcagcttctctatgatttctgcagcatacaccagagaactctttgaaggtggcatcgaagaatgccctcccatcccttttatcgtaaggcgcaaggtcagaaagcctttttctcccactcccaccaatgccaacggttcttgtatggattctattgccgaaccgggagctgcaatgatgcctccttcgtcataaaccgcactgaagcgtagccctttctgtttaaaataatcggcaattttgaaagccccctgacgtccgctcacttcctcgtcttgcccgaaagcaaaccagatgtctctttccggttggaagccttcggctatcaggttatccgctccctccatcagagagaagagcatacatttcatatcaagtgttccacgaccgtatatgcgtccgcctgcaacagctcctgagaagggaggataatcccacttttccgaataagtcctgatgggaggcaacggtttgtcgtcaaaccggaaaaccgtatctgcaacagtcgccgtagacggatcatatccgactactggaaccacatcgtaatgggacaagaataatatcggtttcagatcactgttcttgcctttccaatgaaacaccagcccgtatgtattaatggtatctacatccatcaccctatatacctccggataagaatcggccaggtacttcataaattcatcgaaaggcttgaaatcagtctcttcatacacttcattactgattgtcgggattcgtattcctccgacaaaacgacgtactgattgctccgaaggagctgtgttcaccagttctttatcatccgcattcttgggcactttaccaaatttataagttacggtccgtactatcaaaaccagaataagtataagcaacaggattaataaaactgctaaaatctttttcattttcatatatcaatgctttattataaaacataaatggaacattattgttttgagaatatgcttttgcgagaggaatccgcatcggttgaataccccgtgaaagcagcttataataaacctttaactagaaattaaaattatgtgtacaagagtcgtttattcggaaaagaaacagacttgtcggaaggagctccggtactcaaattatctatcgccaacggtgaaacttatcatggaaatgcaacgaaagagtttaaaccggcacagccgttcagatttatgggagtaaaaggataaaattatccccggaaacgatccatctgaagcacatcccaaaagtttttgtatcta

SEQ ID NO: 11917 - DNA, 13917 bp, Unknown
  gut microbiota DNA sequence
ttcttatacaattaccaacatcagtgtacggagcagttgacttccaaagcattgccgcttttgtttatctctcaatttaaaacggtaaacaaacaggaagcagagaaaataaaaacaaatgtacaggaggctatccgtcagatttatgcccggcaacttcccaatggcggttttgtctattggccggggaatgccgtcgcagacgaatggatcagttcatataccggaatgttcctgacattggcacaagaaaagggatatgccgtccattcaaacgtattgaataagtggaaacacttccaacgtgcagcagcccagaactggcgtatgccacaggatgcaaacagctggcaactatggcagtcggagctgatgcaagccttccgcctatacacgctggcattggccggtatgccggagtacggagctatgaacagaatgaaggaacagcaaggattatctattcaagccaaatggagattggcagccgcctacgcattgacaggaaaaatgaaaccagccgaggaattggcatataagacagcaaccagtgtcactccctattcttcaatgaactttatttacggttcgtccgaccgggatgaagcaatgattctggaaacattaatcttgatgaaccgggaacgggatgcacttcaacaagcaaagaaagtctcgcagaatctgtcactagaggactatttcagtactcagtctaccgcatttgccctcatggcaatgggacgcttggcagaaaagttatcaggcacacttgatttcacatggagatggaacggcaagcaacaacctgccgtgaaatctgccaaagcggtatttgacaaagagattcctacttcaccgaaatccggaacagtctctgtaaagaatcaaggcaagggagcattgggagtagacattatcacgcgcacacaattgctgaacgatacgttgcccgccatctcagacaatcttcggatggatataagatatgcaactctgaacggcacgcccatatccgcagaagaaattaaacaaggaactgactttaccgctgtcgtttccatatccaatattagcggaacatcggattataccaatctggcattgacacatattataccatccggatgggaaatatataatgaacgaatggcgactgccggtacagctatcaattactcctatcaggatatccgcgacgatcgtgtattgacctatttcaatttgtaccgtggtgagacaaaggtatttactatcagattgcaagcggcatacaccggtaacttcattcttccggctgttcagtgcgaagccatgtatgatacaaccgtgcaggcacgaagcaaagcaggaagaacaacggtgagtcgctaatacgaattctgttggtaagaacaaacgcaattcatgaaagttaagatatccgaggtattcagaaatttatccatcaccaagagagtaatacttggcagtattactctcttggtgatgggatatatgttttgtcttccccgacaactctttcatgtcccctactcgactgtcgtcactgctaggaacgaagaactgttgggggcacgtatcgcttccgacgggcagtggcgtttccctccgaggaatacgacaccggagaaaataaaacactgccttatcacttttgaggacaaacatttctatcatcattggggtgttaatccacttgccatcggaagagccgtttatcaaaacatcaagaacaaacgtattgtaagcggaggaagcacactgaccatgcaaactatccggcttgcacgaaacaagcccagaactttcggagagaaaataatcgaaatgatctgggctacacgtttggaattcagggcttctaaagaagaaatcctatccatgtacatatctcatgcccctttcggaggaaatgtggtaggactggatgcggccgcctggcgttatttcggtcattcagccgaagagttgtcatgggcggaatcggccatgcttgccgtattacccaatgctccagccatgattcacctatccaaaggacgggagacattacttgccaaacgtaaccgggtccttaaactgctccatgagaaagaaatcatagattcgtctacttatgagttggctgtcagcgagcctcttcccgaagagccacatcttcttccgcaaacagctccccacttagtcagccgtttctacaaagaaagaaatggacagtactcacattccaccattgaccgggggattcaaatgcatatagaaaacatcgctgaacgttggagcaatgaatttaaccgaagcgatatccgcaatctagccattttagtaatcgacctccctgccaatcaagtgatagcctattgcgggaatgtacatttcgaccatcggcaaggaggtaatcaggtggatgtaattcaagctcccagaagcacaggaagtattttgaaaccttttttatattatgcgatgttgcaggagggggcattattgccacatacgctacttcctgacatccccattaacataaacggattcagtccgcagaatttcagcaggcagtatgagggggctgtgcccgcttcggaagcactttcccgttcactgaatattccagctgtgacaatgttacaaaaatatggtgttcccaaatttcataatttcctgcaacagactggattcaaaacaatcacccgtccatcgtcccactacggtttatccctgattctgggaggagcagaagccactttatgggatgtaacaaatgcgtacgcacaaatgggacgaagcctgattccgaatcagcatagtgatgcagtccctcaaaaagaagccgacatcttaatgggagaagagaacaaaaacgaagcgatacaacaaaaattcacttgggacaagggtgcagtgtggcaaactttcgacgcgctaaaagaagtcaaccgccccgaagagatcgattggaagtccatcccttccatgcagaccatcgcctggaaaacaggaacgagttatggattccgggatgcttgggcggtaggcgtcactcctcgttacgcagtcggcgtatgggtaggaaacgcaaccggtgaaggaaaaccgggattagtgggcgcacaaacggcaggtcccgtattattcgatgtattcaactatcttccctcttcatcgtggtttgaacgtccgaccggtgtttttattgatgcagaggtatgccgtcagtccggtcatttgaaaggacgcttctgcgaggagacggacacagtgcttatacttccctccggactgcgaacggaatcctgcccatatcatcacttcattactttatctgccgacgagaaatatcgtatttatgagaattgtgccaatacggagcctactttccaaaggtcatggttcgcactgcctcctgtgtgggaatggtattataaacagcatcatccggaatacaagcctcttcctccgttcaaatcaggttgcggagaagatagtttccaacccatgcaattcatttatcctccgatgaatgcacgaatcaagctaccgaaacaattggatggtaacaaaggattcatcactgtcgaactggctcacaacaatcccgaagcaatcgttttctggcatctcgatgatatatatatgatgcaaacacaggattttcataaaatatccttgcaacctgaaccgggaaaacactctctgacagccgttgatggggaagggaatacggtttccaccacttttttcataaaatgaattataaatcataagaaatgactcaacaaaatacgcagtaaaaccgtttatagcaaaaaagtaaagcgaatgaaatacggagtcaacaaacaaatcttactcattacagccggcgcagtatggattacagccggtatcaatatattacgaataggaatcattacatggttaaacaactcccaagactggatgttcaaaatcggagaagcaactgtagttttcctgttattcttcgtactcatctttaaaagactttattataaacacacccggcgaattgacgagaaaaagaaaacccgtaactgccctttttctttttttgatgtaaagagttggatcattatgatattcatgatctctctaggcattaccatccggagtttccatctattacccgacagttttatttccgttttctacaccggactatctatcgctctgattctgaccggaatacttttcatacgatattggtggctaaaacgtaaggtaaattggggctgattctatgtaccaagaatatataaacttatactaatttttattgcttcgttccataacgctaagaatttcgatcattttgttatatctttgcaaaccaaaataatatagagcattaaagaacttaatatgaaaaaagccccctccccttttgtatccctgataccaattatcgtacttatactattattattcggtactatccatactttcggtagtgatgctttaagtggaggaagtcaagtatcattactcaccactaccgctatttgtattcttatcggtatggcattctacaaaattccttggaaagattatgagattgccatcacaaacaatgtggccggagtggcaacggctattatcattctattgattatcggtgcattaagtggaatgtggatgatcagcggagtagtacctactttgatttattatggaatgcaaatcatacatcccagtttcttcttagcatccacctgtatcatttgtgtacttatttccgttatgaccggtagttcgtggactaccattgctaccattggaatcgcactgatgggtatcggcagggcacaaggatttgaagagggatggattgcaggagccattatttccggagcttattttggagataaggtctcgcctctatcggaaacaaccatattagcagcttccgtaactgatactccactattccggcatatccgatacatgatgataacgacagttccttccctcataatcactttgattatttttactgtggcaggattctcacacgatgccagcaatacacaacatatcaccgaagtggcaactgctttgaatgaaaagttccacattactccctggctcttgattgtacctattgcaacaggcatattaatcgcccgtaagattccttccatcattaccctgttcttatcgacactgctggcaggagtcttcgctttgattttccagccggagttattacaggaggtttccggaatggcaacttccggcttcgattcattgttcaaaggattaatgataacgatatatggaagtacaagtctgcacacagacaatgccgttctgtcagatttgattgccacacgcggcatgtccggaatgctgaatacgatttggctcattctgtgtgccatgtgttttggtggagcaatgacggccagcggtatgttgggtagtatcacttcaatctttgttcgatttatgaaaaagacggtcagtgtggtaggaggtacggtttgctcaggcttgtttcttaatctggcaacagccgaccaatatatcagtatcattctgacggggaatatgtttcgtgacatatatgccaagaaaggatatgaaagttgcttactaagccgcacgacggaagatgcagtaaccgttacatccgtactgatcccatggaacagttgcgggatgactcaggccaccattttaagtgtgcccacacttgtatatcttccctattgctttttcaacattatcagccctttaatgagtattgccgtcgcagctatcggatacaaaattgcacgacgttcgtgaacaatccggcatactctttgtttttgcaataaacggacaacgtattaaacctaaacaaaaaaaagttatgaaaaagtttattgcattattagcattagtattagtaagtgcaagcacgatgatgtatgcacaggaaagtaacgcagcaacccgccgcgcagaacgaaaagttcaaagagacgcagaaagagcgaaactccgcgccgaagaacaagtacaggacatggcagcctatcaacaagctgtacaggctttaaagaacaagcaatttgtattggaagccaatcaagtaatcttccgcaatggaatgagtgctttcgtgacttcaaacaccaacttcgtcttgatgaatggcaacagagccactgtgcagactgctttcaatacagcttatccaggccctaacgggatcggtggtgtcactgtagatggtaattcttctgatatgaaaatgaacattgacaagaaaggaaatgtgaactgttcattcagcgttcaaggtattggtatttccgctcaggtctttatcaacatgagcagtggaaataatacagcttcggttacaatcagcccgaacttcaataacaacaatctgacattgaacggaaatatcgttccgcttgaccaatccaacattttcaaaggacgttcctggtaatctgaattcaagaatctaattaaaactccgctacaaatcgcacaaaatatgtacatttgtagcggagtttttatttagctattcctattatgagagaatttatcattgcagacaatcaagatatcagcaaagcgggaatgatgttcctactgaccaagcaaaaagatgtatccgcgcttttagaagctgataataaagcagagctgattcagttgctgcgattgtatccgcaagcagtggttattcttgattacacactattcaattttgccggggcagatgaactgatcgttctgcaggaaaggtttaaaaaggccgattggattctattctccgatgagctaagtctcaacttccttcgacaaatattatttagcagcatggcttttggagtagtaatgaaagataattccaaagaagaaattatcactgctattcaatgcgctatccgcaaacaaagatatatctgcaatcatgtcagcaacctattgctttcgggaactggctctccgtctgttacctcatccacagacaatcatttgctaacgcaaacagaaaagaatattctaaaagaaatcgcactgggcaaaacgacaaaagagattgcagcagagaaaaaccttagttttcatacgattaacagccaccgtaaaaatatcttccgcaagttaggcgtaaataatgtgcatgaagccaccaaatatgccatgcgggcgggaattgttgatttagcggaatactatatctgatgtgttttcaagagccttatccgccttatcatagatataaagaaggtttaacaccgcatcttgttgggaattccatcgttgtcataatcaaacctcctttatttataattctacgaaacaaaagtaatgaaaataatcttgtttattcaatcttcgccactcaaaaaaaatatttaacagataatctctccacttcccacacaaatccgcgcttctttatcataaatcactccaaactgtcccggagcaatgccttgtaacttttcagaagataggatatgaaactgattatctcccttcataatgagcttccctttagtaaattcaggagtatgacgaattttaaaggttatatccacttccttatcctgacccttccaaatattatccgttataaaatgaaaatcacgcatttggaattcattcccatattgggtctctacaccgtagccgcgagatacgtaaatgatattttcctgaatatcctttttaacaacaaaccaaggacctccactcaaaccaagccccttccgttgcccgatagtatgaaaccaataaccatgatgtgtacctagtttctttccggtttccaattctacaatcactccttcccgctcgccaagaaaacgacggacaaaatcattatagtttatctttcccaaaaagcaaatgccttgactgtcttttcttttggcactgggtaatccagccgcatctgcaatttcacgcacctcatgtttcgtcaatcctccaatgggaaacattagtttggaaatttgcagataatcaatctgtgcaagaaaatccgtctggtcttttacgggatcttttgccgtacccagccacacttttccatcacgctgtatcgtagtagcataatgaccggtagccgtaaaatcaaactctttcccgatgcgttgttcaaagcaaccaaactttatcagtttattgcacatcacatccggattcggtgtcaatccctgccggatcttaccaatggcgtaagtcgctacattttcccagtattccttatgaaaatcaactatttcaagagataaaccgtactttcgggcagtagcagccgataattcaatatcttcctctgccgaacaatccatatactccgctccttccataccgatctttatataaaaaagagtcggtttgtagccctgctcacaaagcaagtgaacaaccaccgaactatcaacacctcccgataacaatgcagctatattcatgaaattaccgtttattaatcacttattctattttactaatgcctattgataattttggaagcacaaagataacgcaggattctctaacagccaatcacacattaaaggcatttttataccataaatgtggtagataagcaaagtatttcctacatttgcaacgtgaaaagctttttatgatgacgaaattaagaaagataatccttatacccgccctgaccatcgtatctctcagtggcttcttctcctgtggtgttgaccgctggccggagtatgcccaccaaacagcattggatacatggatattagacatcatgcaacagaactatctatggtatcaggagctaccttcctatgatgatgtaaatttatttgtagaacctgcctctttcctgtctaaagtgaaatcgaagcaggatagttattcatttgtagactctgttatggcaaccccattgcccacatatggatttgattattcattagttagaaatccggatattgacactgcctacaacgctttgattacttacgttattccaggttcccctgccgcacaggcgggtttagaacgcggtgattggatcatgaaagtagacacttcctacattagtaagaaatatgagacatatttattgcaaggaactaaagccgtaaaactgactttgggcgagtggaaagaggtggaaatagaagatgaagaagacggaaatgagggaggtgacggggaagatgaaggaccgatgatggaatatagagttgttccaatagatgaccccgttgaaatgcctgcagcacagatagtagaagacaatcccgtacataaatatgagattattgagtcgccggtcaaaaagataagggtaggctatctcatgtacaatagcttcacagccggtacaaaagccgaaccggaaaaatacaacaatgaattacgcagtgtctcgcaaaagtttaaggaagcaggcgtacaagctgttattcttgaccttcgttacaatgagggaggttcaatggattgtgttcagttgttaggtactattctgacctcagccgaccgtttaggagagccaatggcttatcttgaatataatgataaaaatacggataaagacgccactattctgttcggtacagatagggagattaatttaaacttacacagtttaatcgccattaccagcggaacgacaatgggagcaccggaaatgctcattagaagtctttttttagaggatacatatcccattgctactgtaggcagttcgacgaagggacaaaatgtagcaacagaacagtttattaatgaagaatttctatggtcggtcaacccggtagtatgtacagtttacaattcccaacacgatacttatggtgccatttctccagctaccgatttaaaagtcagtgaaaccacaatagctgggagtacaaattacagtgaattcctaccattcggtacattcgacaaggatggtaaaagtgaaagattgctgaagatcgccataggagtattggacggtacatatccgcctaaagatgacgaaactccagaagaaagtacaacacagactcgcttcaaggtcgaaaagagtgtaagcagtccagccagccgacgttttagcagtaaagggctaaggctttaataacatttaaaatgaaaaaagtagttctactatttatcaccactattctacttttcagttgttccgacgatgatgagaaagagaagacgtggaatgagattaatatacctgttccgacaatgtctaaaatggtaatgaccgaagttgaagagacatatatgaccacctccactgctatcaacactataaagaatgagtatgcatatacggataataagctcacatcctataccaatacacagtcaatcagcattggtgaggaaattgtacaggaactttctcatcaggtaactttacaatatgagaacaaccttgtcaccatgatagatagtgaagataacaaatggatatatacattgaatgaacaaggttatgcaactcaatgtacatacacgaccatttcccaagtacgccaatataattttacatatacagacggatacttaactcaactgcatgaaaatattacatctataaatggtacactacagcccgaaaacgcttcccataccctgtcgcttgtttatcaatacggagagctgatcagtgttacttccccgtcactgacaaatgaatctttcactgattacggagaaaataaaataatgtatgaagccggagaaacaatcaattactattgcctgccctgtttggatttattagaaacttatccgctttcattccaccaatgcgccctatttgccggaatcttaggcaagccgacacaacatctggtagcccgctccactcctgaaaacaataataatgaatatactacttattcttatacattcgacaacgaaggaaaacctacgagcatttatagccgcacacattattccaataagatcaatactcagaacatatcaattgccattgaataaggagccccattgggctcctaaaaagataactgtgacaaagaagcggcacaatcatggcactaatataatgcaccaatcatatcaatacaatttatttcttgaaaaacttatcgaagaaaagtatctgatagtcaatagagttattccaatattgtccgttatgcgctcccggacgggtaataaaatcatggtcaatctttttctccaacaaacgatggtgtaaattctgattcaccttcaggaagaaatcgctctcaccacaatcgattataatggctaaatctccattttcaagaccatcgatcagattgataacagtatgattatcccacacttctttatttgaatcataatctcctaactgcttggacatttcccaattcttcgggaaaggacggatatccattccaccacttgtcgttccagcaccgccaaatatatctttatgacggatcgcattccacattgctccatgtccacccatactcaatccggtaatggcacgtcctttccgatcagcaatcgttttataatgctcgtcaatatacttaaccaactccgatgaaatgaacgtctcgtaacgatatgacggattgagcggactatcccagtaccagctatttttcccatcaggacaaacaaaaatcattcccttttcatccgctatttgtggaagattcggttttattccaatccatgttttggcatttcctccgtagccgtgtagcagataaagaacggggcaagctagcgcttttttccccaatgctacatctggagttactaccaccaccttcacatccttattcatggaaggacttttaatcaataaggtatctactttggcagcaaaagagagagctgcccaaccaagaaaaagagtaattaacagaagttttttcattgtgtattattttattttaatatataattcttccgtgtcttctgaacaatgtgtgccttcatcgcatcattgccagtaatcaaatttacattttcatcaaagaatctgtctaataggtctcacaaaaatagaacttataaacgagaaataaaacaatttaattatttttgcaccactaaactctaattgtatgaagcgacttcttacctttttctttttttgcagttttctgcttctcctgattcaagctcaacctgtgcatcagataaaaggaacagtaatagacaaaaacagccgtcaaccattagagtttatcaatgtaacggtcatcggactgaataaaggtggcgtaaccaatgcagaaggacactttacaatagagcaggtacctcccggtatctatcgtttacaagcaacagctatcggctacaaaagtgtcactacgcctgaatatatcttgtccaccaggaatttaaatatctcgatagagatggaagagaacctgacggagctcgaaggcattactgtcactgcttccccttttcggcgtgatttggaaagccctgtcagcctgcgtatcataggactacaagaaatagaaaagagtccgggagccaaccgggacatctcacgaatcgtacagtcttatcccggagttgccttttcaccaataggctaccgcaacgacttgattgtacgtggcggttccccttctgaaaaccgtttttatctggacggaatagaaattcccaacatcaaccatttcagcacgcaaggagcttccggtggtcccgtaggcatcctcaatgccgacttgatacgtgaagtcaatttttataccggtgcttttcctacagataaagggaatgcactcagttctgtcctagatttcaaattacgtgacggagatatggaacgcaactcgctgaaagcaacacttggagcttctgaagtctcccttgcttccaacgggcatatcggggaaaaaacttcttatctggtatccgtacgccaatcctatctgcaattcctttttgatatgcttgacctccctttcttgccgaccttcacagacgtacagttcaaattgaaaaccaggttcgacaaacaaaatgaactgactattttaggattgggaggaatcgacaatatgcgcttgaacacaaaagcggatagtgaagacaacgaatacattctcagctacctgcctaagatcaagcaggagacgtttacattgggctctgtttaccgacactacgcaggagcacatgtacaatcaatagtcgtcagccacagttatctgaacaaccgtaacacgaaataccgccagaatgacgaaagtgttccggacaatctaatgcttcgcctccgttctaccgaacaagaaacgaagttccgtttcgagaacaaatcctctatccgaaactggaaaatcaatcttggagtgaacttagattatagccaatactctaatacaacctttcaaaagatatacacgaatcaggcacaaatattcgactatcacacctatctggatattttacgatggggaattttcggtactgtcaattattcttcaatggatgaacgtttcactgcttctttagggttacgggccgatgccaataactattcatcggcaatgaaatccctctccgaccaattatcaccccgtatatcactttcttaccaattaaccgatcactggtttgtaagcggcaatgccggactttattatcagcttcctccatatacggcgcttggatttaaaaacaatcatggagcatacgccaacaaatacaacctccgctatatgaaagtcagtcaggaaagtttgggagtcagttggcggaaaggagatacttttgaagtttccattgaaggattctacaaagattatgataagattccgctctccgttgtagacggcattccactggcctgcaaaggaaatgattacggagtgataggcaatgaactgctaacttccaccgcacaagggcgttcttatggagcagaaatct

SEQ ID NO: 11918 - DNA, 4092 bp, Unknown
  gut microbiota DNA sequence
gttcatctctcctctgggattatcatttgtatctaaagtagcccctcctcatttgcaaggattgatgcaaggttgctggttggctgcgacagctgtgggtaactcactgttgtttatcggtggtattctttatacaactgttcctatttgggcttgttggttggtatttgtaggagcaacaggtgcttccatgattgtaatgctttcaatggtaaaatggctggagcgtgtagcgaaataaaatcttgccattaactaaataaacaaaatgccccggaacaagtatcataaatgttccggggcatttttgtatatcaaatatccagtcccataatataatcattcatataatacccgttaccaatcgggaaatcaccttctcgcaactttctcattcccatgtgctcgtaaaactgcaaagccttattattacgatttacattgagctccatcaaacaaggttccgggtgtatttctttgatacacttgattgcttccttgaataaaaaactgccgcaatgcgtgccctgaaaacgtgggaggacatatatcttctgaagatggaatacatctttctcctgttgttgaatggaaacgtatccgcatggttcattctccttataagcaatggagtacacatgtccttcttcctccatttgtttacgcacattggaaggagcatacatccagtccatcatataatccagttgttcgggagataaaatttccttgtaggtggcggggaatacctcctttgccatcttatgaataagctcgcaatcggctactgttgcttttcgaattgtaaacatatctattatttaatgggcacaaatatagccattatttctttttataataaggtggagagtctctaatgttttaattattattaatttatagtactttgtaatgcaaggtactaaagtaatgcatatatttgtgtatctaaaagaagtgaataatgaaagtagacaatgtaaaatcacagatgaggaaaggtatgcttgaatattgcatcatgcttttgctacacaaggaaccctcttatgcttctgatatcattcaaaaattgaaagaagcccaactgatcgtggtggaaggcaccttgtatccattgcttacccgtctgaaaaatgacgacctgttaagttatgaatgggtagaatctacccaaggacctccccgcaaatactataaattgaccgaacagggagaagtctttttgggagaacttgaaatttcctggaaagaactcaatgaaacagtgaatcatattgccaatagataatccgaaaaagaagaaataaaaatgaaaaagacattgaccataaatttaggaggaattgtctatcatatagatgatgatgcctaccgattgttagacaattatctgtctaacctcaaacattactttcgtaaacaggagggtgcggaagagatcgtaaacgatattgaaatgcgtattgccgaactgtttgccgagaaagtaactgaagggaaacaggtcatcacagtttcggatgtagaagaaattatcgcccgtgtcggcaaaccggaagactttggaattgctgatgaggatatggactcacagaaaagaacggaacaaacatcgtccgctaatcaaggcagtacgcaaaccgctgctcaacgccgttggtttcgtgatccggataataaattgttgggaggcgtagcggcaggattggcagcttacttcggttgggatatcacattagtgcgtatattgatgattatcctggtatttgtaccttattgcccgatgattatactttatattatcggatggatcgttattccggaagcccgtactgctgcggaaaaattgagtatgcgtggagaagcagtgaccattgagaatattggcaaaacagtgacagacggtttcgaacgcgtagcggacggagtcaacaactatatgaattccggcaaacctcgtacctttcttcaaaagataggcgatgtatttgtttccattgctgctgttctctttaaaatatttctggtagctcttgttattctttgctgccctgtcttgttcgtactggccgttgtactggtagtattggtgtttgcagcaattgccgtggtagttagcggaggagcactgctttacgagatgctgcctgccatcgactggatgccggttgcttccgtatctccaatgatgacactgctaggtacgattgccggagttgctctcatcggtattccgttaggagctttcttgtatactatcttgcggcaattattccattggtcaccgatgggaacaggcttgaaatggtcgctattgattctatggatattgggtgcagtcataatgattattaatttttcagctcttggctggcaactgcctttgtacggcttgcactgctcttaacgaagtctcattctattaaaaaaaggataatatttattcttttataagtaaatgtaccccgatagtgtgtccggggtacattttttgtttactctaattcatcgtaaatcgagaaatttttagtaagtttgtaaatacgtattcaggaaataaaaatgggtgaacatatatgttttaggagaaacgaacgtttagcgacagtcaacccttattggagaggaaatccgatggtgcgcgggcgtttttttaatcggcagcatcgcttccgtccggggatggggagtgtactgaaatggcgtctttcgcccaatcctcaacgcaaagagaagaagacggtgaaatgggacccgaaagtttgttacctccgttcattggatgcggtggtaggagattctctgatatggctcggacataattctttctttctgcaattagcaggtaaacgaatcatgttcgatcctgtgttcggcagtattccttttgtgaagagacagagcgagtttcctgctaatcctgacatatttacagggattgattatctacttgtcagccatgaccatttcgatcatctggacaagaagagtatagcacgcctattgaagaataacccgcaaatgaaactcttttgtggattgggaaccggtgaactgattcagggatggtttcctgaaatgaaggtgattgaagccggatggtatcaacaaatggaagatgagggattgaagattgcttttctaccggcacaacactggagcaaacgttccgtacgcgatggcggccagcgattgtggggagccttcatgctgcaaggagatggaatctccctttattacagtggtgacacaggttattccagccactttcgtgaaatccccgatctgttcggagcacctgattacgctttgttgggtatcggggcatataaacctcgctggtttatgcgtcccaatcatatatcgcctcacgagtctttgactgctgccgaagaaatgcatgcaggacttactatccccatgcattatggcacattcgatttgtctgacgagcctttgcatgatcccccgaaagtctttgcaacagaggcaaagaaacggaagatctctgtggaaattccttatttgggagagatcgtgaaattgaagaaacagaaataagaatacttagatacgaataaagagatgaagaaattagaagtaaaagacctgaaagaaaactttttcgaagcaatcggaaaagagtggatgctcgtaacggcgggaacaaaagagaagtttaacaccatgacagcaagttggggtggcattggctggttgtggaataaaccggttgctttcgtctttatccgtcccgaacggtatacatacgagtttttagaggagaacgatcacctgacactttctttcttaggagaagaaaataagaagattcacgctgtttgtggttccaagtcgggacgtaatatagataaagtaaaagaaaccggattgaaacctgtatttacagaaaaaggtaatgtcctgttcgagcaggcacgtttgagcctggaatgtaagaaactttatgctgacgctatcaaaccggaatgttttctggataaggaatcattggaaaagtggtacggtggtgctcatggcggtttccataagatgtatattgtagaaattgaaaatatttattcggag

SEQ ID NO: 11919 - DNA, 11462 bp, Unknown
  gut microbiota DNA sequence
atacgtttcgttctgtgccccatagaaagcgatctctccagaatccatccgtccaatgtacggcgccgattccggtattcaccatcttcgcaaaacggctctgactcatatccgtcaatccattgctttgcgcaagtgctcccgtaacggaggcggaagctaaaagaagtaacagttttatctgtttcattaatatggataatttaaaatttacacaatatctttataaaaagacgcaattatccgtattttgtactcaataaaacaaaaaaacgaagcccctatttcggtacgccctgcaagtccaaatacaggcatatagccatttatttcactgaaaaataataaaaagtgccacccctcgttttgcgtgaatgacacttttcgtgattttgtatattaaatctaccataaaccgagccccatcgttttagaacattccaactccaataatccttttttcgcatcgagaccacctccgtaccccgtaagtttatgattgctgccgattacccgatggcagggaacaaagatagagataggattggtggcattggccgatgcaactgcacgcacagccttcgggttatggatgcggcgggcaagctcgccataagatatggtcgttccatagggtattttcatcagttcttcccatacagtgcactgaaattcagagccggtaaagacaacaggaatgtcgaatatcttacggtgtccggcaaagtattcttcgagttccccgattgcccgttcgatgatgtcggaagtcccctcttcgtacttcgcattcagatgtcgctgtatgcggcggtctatcgtacctcgccgtttctccaccgcccagtcgcaaatacacagcttatctccgtaagaaccgacaagcatctcgcccacaggcgattgatatcgtgtaatctttatagtttccatattgttcttttcttcttcaaatttaaaaaatattgctcacattctttacttcccttgtgatgtacttcttacttggagtaacggtttgtgctaacatttccgttcgcaacggaaatgattaatgattttactgacaaatataggaaagtatatttcaaatgacaagaaaatacagaggatatgacagtctcctttcaaactattatcaagtaatttgtttatggaaaaaacgatcgttccaagtgccacgcaatggacatcagcaacggatatgaataaccggattatctatttccgaacgatgtacaacagtacgatccgcagcattgatttgcgctctattgatttttccaaagtgcattatcgggctgttccaatggataccgtcaggcagcagccgattgaaaagataaaaataatgtccgagtaattatattcttttagcgacttattgggtacaaaaagtccgttcaaccgtccttttataaaagtataaaagacgttagatgataatgaataaaaagagattgatcggatatgtgctcgtcatgctgtctgtaacttctattcatgcacaagaaacgaacgcttctacgcaagaatataagttatggtatgaccgtcccgcacaggtatggacggaagccctgcctttgggcaatggccgtttgggagctatggtatatggaataccgggtacagaacaaatacaactaaacgaagaaactatctgggcaggacgccctaacaacaacgccaatccgaacgcacttgagtatattcccaaagtgcgtgaactggtctttgcaggaaaatatctcgaagcgcaaactcttgctaccgagaaggtgatggctaagacaaactcgggaatgccttatcaaagtttcggggacttgcgaatcgcttttcccggacatacccgttattcggactactatcgggagctaagtctggattccgcccgcgccatcgtgcgatatgaggtagacggagtacaataccaacgcgaaacgattacctcatttaccgatcaagtggtaatggtcagactgacagccagccgtccgggacaaataacctttaatgcccaactgacctctcctcatcaggatgtaatgatttcctctgaggaaggaaattgcgttacgctttccggtgtctcttcctggcatgaaggtctcaaagggaaagtggaatttcaaggacggttgactgcacggaatagaggtggaaaaatagcatgtgcagatggaattctatcggtagaaggagctgatgaagctatcatttacgtgtcaatagccaccaatttcaataattatctggatatcacaggaaatcagatagaacggactaaagactatctttccaaagcaatgaaacatccatttccggaagccaagaaaaatcatactgatttctatcgccgatacttgaccagagtatctttgaacttaggtaaaaaccgatatgaaaacatcacaaccgataaacgtgtagaaaacttcaaagatacaaatgatgctcatttggtagctacttacttccagttcgggcgttacctattgatttgttcttcacaacctggcggacaacccgctaacttgcaaggtatctggaatgataaattatttccttcttgggacagcaaatacacttgcaacatcaacttggagatgaactattggccgtctgaagttaccaatcttagcgagctgaacgagcctcttttccggctgataaaggaggtcagcgagacaggcaaggaaacggctaaaatcatgtatggagcgaatggctgggtactccatcacaacacagatatctggcgcgtcacaggagcaattgacaaagctccttcgggcatgtggcctagtggtggagcgtggctctgccgtcatttatgggaacgttatttatataccggagataccgattttctgcgttccatctatcctatactgaaagagtccggccgtttcttcgatgaaatcatggtaaaggaaccgatacacaactggttggtggtttgtcctagcaattcaccggagaatgtacattcgggcaataacggaaaggcaacgacagccgccggatgtacgatggataatcagttgattttcgatctttggacggctattatttcagcttccgaaattctggataccgacaaagatttcgcaactcatctaaagcaacgcttgaaagaaatgcctcctatgcaaataggtcattggggacaattgcaagaatggatgttcgattgggatgatccgaaggacgtacatcgtcatgtctcccatctttacggattgttccccagcaatcagatttccccataccgcacaccggaattgtttgatgcggcacgcacctcgctcatccatcgcggggatccgtctaccggctggagtatgggatggaaagtttgtctttgggcgcgtctgcttgatggtgaccatgcttataagctgataacagatcagttgactcttgtacgcaacgaaaagaaaaaaggtggtacttatcctaatttgttcgatgcacatccaccctttcagattgacgggaacttcggttgtacggcaggaatcgtagaaatgctgatgcagagttatgacggattcatctatttacttcccgcccttcctactttgtggaaggaaggttcggtgaaaggtattatcgcacgtggtggttttgagcttgacttgagttggaaagacggaaaagtaaatcatctgatagtaaaatcccacaaaggaggaaactgtcgtctccgctcactcaacccgctaaaaggtaaaggactgaaacctgccaaaggcgagaacccgaatcctctctttgccgtccccgctattaccaaaccattgattaacgggaaagcaaaattgaataaaatagagctgacggaaacctatttgtatgacctgcccacaaaagcgggaaaagaatatatcctgatcggaaaataaaaactcaactatatgaatcaaaatttatttaaggcgattattgcctgcggaattgtctgctttattgcttgtacgactaccaagaaagcagaaaccgaaaagtggagtgaacgcatggcacgttccgaaatgaaacgtttcccagagccctggatgattgaaaaagctaaaaaaccacgatggggatatacgcatggccttgtggtaaaatcaatgctcgaagcatggaaacatacgggcgacagtacatattacgagtatgccaagatttatgcggatagtctgattgacactgacggacgtataaagaccatgaaatatctttctttcaatatcgacaatgtaaatggcggtaagattttgttcgacctctacgcaaagacgggagatgaacgttacaaaacggctatggatacgcttcgtaagcagatgaccgaacagccgcgtaccagcgaaggaggcttctggcacaaattgaaatatacccatcagatgtggttggacggtatctttatggcttctccctatctggtacaatatggtgcgactttccaggaaccggctttgtttgacgaagcggtgaagcaaatacttttgattgcccgtaaaacgtatgatccggctaccggtctttactatcacggatgggatgaaagccgtgaacagaaatgggcaaatcccgaaaccgggtgttctccgaatttctggagccgcagtatcggatggtatggtgctgcgatagtggatgttctggattatctgccacaagaaacagcaggacgggacagcgtcatacagattcttcaaaggctggccgaagcgattgtaaaatatcaggaccctcaatccggcacatggtatcaagtgacagatcaaggtgcacgtaaaggtaattacctagagtcttcggcaaccgctttgtttgtttatacgctcgccaaagccattaacaaaggatatatcggaaatgaatatatcgaaccagtaagaaaagctttcaacggcatgaccggaaatttcacccttttggaggaagacggaagttatactatcaccaattgttgtgccgtggccggactgggcggagactctaaaagataccgtgacggttcatttgagtattatatcagcgaaccgattatcgagaatgatccgaagtcagtaggagcatttatcctggctgcaattgaatttgaaaaaatgattgagaaataatctgtggtgaactggaataaacaaaaacgataaaaaaacaatgaaaaaattcaagattcttccttttttactgctactgctgagcttgagtacttcagtggcggcacaaaagaaaacacagaaaacgtatattccctggagcaacggtaaacttgttgtctccgaagaggggcgttatctgaaacacgaaaacggtactcctttcttctggttgggggaaacaggatggttgctcccagagcgtctgaatcgtgacgaagccgaatattatctggaacagtgcaaacatcgcggatacaatgtaattcaagttcagaccttgaataatgtgccatccatgaatatctacggacaatattccatgatagatggatataacttcaagaacatcgaccggaaaggtgtatatggttattgggatcacatggattatatcattcgtacggctgcaaaaaaaggactgtatatcggtatggtttgtatctggggaagtcccgtgaatcgtggagaaatgactgtcgaacaggcgaaagcatacggaaagttcctggcggaacgttataaggacgaaccgaatatcatttggtttatcggtggagacattcgcggtgatgtgaaaacagccgaatgggaggcattggcaacttctatcaaagcaatcgacaagaatcacctgatgaccttccatccgcgtggcagaacaacctcagcaacttggttcaacaacgcttcctggctggacttcaatatgtttcaaagcggacaccgtcgttacggacaacgttttggtgacggcgactatcctatcgaagagaatacggaagaagacaactggcgtttcgttgagcgcagtatggctatgaaacccatgaaaccggttatcgatggagaacctatctatgaagaaattcctcacggcctgcatgacgagaacgagttgttatggaaagattacgatgtacgccgctatgcttattggtctgtattcgccggttctttcgggcatacgtatgggcataattccattatgcagtttatcaaaccgggtgtgggtggtgcatacggagccaagaagccttggtatgaagcattgaatgatcccggttataatcaaatgaaatatttgaaaaacctgatgctgactttcccgttcttcgaacgtataccggatcagtctgtcatcgcaggtaagaacggagaacgttacgaccgtgccatcgctacacgcggtaatgattatctgatggtgtataattataccggacgtccgatggaagttgatttcagcaagattagcggggcaaagaagaatgcctggtggtatacgacaaaggacggtaagctggaatatatcggtgaatttaataacggtgtgcataccttccagcacgatagcggttattgcagtggaaacgatcatattctgattgtggtggacagcaataaaaactacctcggtaagacatggacggaacttcccgatgcccaactgaaatatatcagcgataaatgatgaataagagaatatttatagtagcattctttgcgtttctgtttttagcaggttcagtctatgcagccataggcataaccgaactgcgaacggagcaattaaggaatccgctaggtattgacgtgcgccagccccgattgggttggcgcatcgaatcggatgaacagaatgtgatgcaaacagcgtatcacattcttgttgcttcttctgccgacttgctggcgcaagaaaagggagatatttgggattcaggaaagatagagtccgacgcttcccaatggattgcttatcaaggtaaaccgctaaagcgtaatgcccgctattattggaaagtgaaggtctatactaatagaggggaagcggactggagtgctccggccttttggagtatgggattgctgaatgaagcggactggcaaggccagtggattggattggaccgtaccactcccggtgacagtgaaacccaatggagccgcttggcagcccgttatctccgcaaagaatttgcgttgagcaaagaggtgaaacgtgcaacggtacacattgctggaatgggactttatgaattatttattaacggacagcgtattggcgatcaagtgttggcccccgctcctaccgactatcggaaaacaattctgtacaacacttacgatgtgacgccacaacttcgaaaagagaatgctattggtgtgacattgggcaacggacgtttctatacgatgcgccagaattacaaaccgtacaagataccgacattcggctatcccaaactccgcctgaatctgattgtggaatatatggatggcagtaaagaaacgattgctacaaacacttcatggaaactgacaaccgaaggtgctatccgtagcaataacgaatatgacggcgaagaatatgatgcccgcaaggaattgggcaactggacacaaagcggttatgacgacaaaagctggatagcggcacaaagagtcagtattccttcaggaacattgcgtgcccaaataatgccgggtatgaaagtaatggatacattaaaacctgtttccatccaaaaacttggtgataagtacatccttgattttggtcagaatatggctggttggatgcggttccgcattaaaggacaagccggtgacagtattcgtctccgtttcgcagaaaccttgcaggccaatggggaactctatactcggaatctacgtgacgcccgttccacagatacgtatatcgtaagcggacgcgaagtgaaggacactacgtgggcacctcgtttcgtgtatcatggcttccgttatgtggaggtcagcaattatccggatgcgcaacttggagacttcgtagctgaagtcgtggaagacgagatgacgcatacaggatctttcagttgctctgacgagacattgaataagattgtccgtaatgcgttttggggaatccggagtaattataaaggtatgccggtagactgtccgcaacggaatgaacgtcagccttggttgggcgaccgcaccatgggatgttggggagagagtatgcttttcgataattacgcaatgtataccaaatggacacgtgatatccgcgaagcacaacgtgaagacggttgtattcccgatgtcgctccggcctattggaactattactcggacaatgtgacttggcccgcggcgttgcctatggcttgtgatatgctttttaccaatttcggagataaacgtccgatagaggagaattatccggctatcaaaaaatgggtggctcatatccgtgaatactatatgacaaaggaatatatcataactaaagataaatatggtgactggtgtgttcctcccgaatctttggaactgattcacagtaaggatccttcccgcaagactgacggtgcgctgatcgccactgcctattatttgaaagtgttgcaactgatgcatcgttttgccagcctgcaaggactgaaagccgatgcagaagaatgggaagaactggaacatcgtatgaaagacgcattcaatgcccgcttcttgcatataaaagagggaacatcccatgtgccgggacatacattatatccggacagtatctactatggtaataatacggtcactgccaatattctgccacttgctttcgggttagtgccaaagaattacatccatgaggttgccaaaaatgccgtaacttccattattaccaccaataagggacatatcagcaccggagtcattggtgtgcaatggctgttgcgtgaattaagccgtcgtggttatgccgatgtggcttacttgctggctaccaacaaaacgtatccttcgtgggggtatatggttggaaaaggtgctaccaccatttgggaattatggaatggtgatacggcaaatccagaaatgaacagtggcaaccatgtcatgcttttaggagatttattgccttggtgtttcaataatctggcaggtatccgtgcagaccgttggaagtccggttacaaacatattattttccagccgacttttgagattcaagagttaagcaatgtagatgcatcttatatgagtatctatggaaaaataaccagccgatggaagaaaacgcccatgcatctggaatgggatattgaattgcctgccaatacaacaggcgaagtacatttgccagatggtcgaaaagagaagatcggttcgggaaaacatcattttagtatagatataccgactaagaacacagccattctaagtgatgaatttctgtacgaaaaggccgctttccccgaatgtcacggagctactattgtagagatgaagaacggagatcttgtcgcctctttctttggaggaacgaaagaacgcaatcccgattgttgtatttgggtatgccgtaagccgaaaggcgccaaagagtggagtgctcccaaacttgctgccgatggtgtgtttttactcaaagatccgcaagctatattagcgggaatcgactccacctgtacaccggtaaaagatgcaaaagggaaactcatcgcacgtcggaaagcgtgttggaatccggtactgtttcaagttccgggcggagatttgattctcttctacaaaataggtctgaaagtgagtgactggacaggatggttggttcgttcgcgtgacggaggaaagacctggagcaagcgtgaacctcttcctaaaggttttctaggtcctatcaagaataagccggaatatatcgacggtcgtatcatctgtccttccagtacggaagggagtaagggctggcgtgttcatttcgagatttctgatgataaaggaaaaacctggaaaatggtaggacctttggaagcagaactgtccgtaccgactcagaaccgtaaaaaaggaggaataaatacggatgatcaggaaggcggggaagccatcaaaggggaaggcgctaaacctatttatgcgatacaacctagtattttaaagcataaggacggaaaattgcagatactctgccgtacgcgcaatgcacagattgcaacagcctggagcagtgacaatggtgatacgtggagcaaagtaacgctgctggatgttccgaataataattccggtacagacgctgtgacaatgaaagatggcaggcatgtgcttatttataataatttctctacattgcccggaactccgaaagggcctcgtacaccgctttgtgtagctatatcggaggatggaatcagctggaagcctgttctcacattggaggatagcccgatcagtcaatattcttatcctagcattattgaaggtaaagatggaaagctgcatgccatttacacttggcgtcgtcaacggataaaatatgccgagatagatccgctgaagttctaaaaatcgaatagtcattttacataaatcgaccgctcattcctattcgaatgagcggtcgattctttgtttttatccgttttatgttttacatttgcaataaataaaaagaacgatggcagacaactatatagaaaaacagcaagagctatatgaagccagaaaggctgcttggaaacaagcacagaaatatggtaagaagaaatctacaaccgttcatccggtcaaatcggcttcgtgtactccaatggcctcaaaaccagagacctcctccaaaagagtatttataacaggaggagcggaaggtataggcaaggcaatagtagaagctttttgcctgtccggcgatcaagtcgctttttgtgatataaacgaaacagcgggacaagagactgcaaaagcaaccggatctatattccataaagtcgatgtcagcgataaggatgcacttgaaagttgtatacaacgtattctttccgaatggaatgatattgatattattgtcaacaacgtcggtatcagtcaattttcgtctatcaccgaaacaagcgtagaggatttcgacaaaatactttctatcaacctacgtcctgtatttatcacctcccgcctgcttgccatacgtcgtaaagaacagtcctctcctaacccatacggtcggattatcaatatctgctccacacgttacttgatgagtgaaccaggaagtgaaggttacgcagcttctaaaggcggtatctattctttaactcatgcactggctttatcgttatccgaatggaatatcaccgtcaactctattgctccgggatggatacaaactcatgattatgaccaactccaaccggaagatcattcacaacatccttcgcgacgggtaggcaaaccggaagatattgcccgtatgtgtttgtttctctgtgaagaaaacaatgatttcatcaatggagaaaatat

SEQ ID NO: 11920 - DNA, 491 bp, Unknown
  gut microbiota DNA sequence
attgaatgaacgatgtctggagtgttctatctgcgcaatgttcttcaattcgtcattgactgtttcgagcagggctctttttctgagcaaaatcttgtcggcaatactcatcagtgaattcttcatattgtttttaactctagtgacaagctgtatgccattaagaaaaaggttctcaaacagagcctgaccaatatattctttgtctgcgcatagttttcctttgatgttttctagaaacttaccttgcttcaacggttcccggtcatccacgtttccaggcgtgaacatgaaattgaggatctctcctttgtcattgattatcagatgcaacttgaatccgaagaaccatcctattgaacatcttccacgctcggcaagcccttcaaatgtcttattataccttaatcatatatttttcctgttgaaatgtaaattccttgcaaaaatcatcggccatacaataaatctctgtaactttagactctgga

SEQ ID NO: 11921 - DNA, 665 bp, Unknown
  gut microbiota DNA sequence
taatcttccgctacatcttccattacctgaactgccgaaaaccatttgtgcgcctgtggataagcagccttaccgacaaggcaatccgtgaggggctggataacttgcagccgggagagcgttacgataacctttacctctctgccaagtcccgcagcgaagcggactggctgatagggataaacgccacccaagcgttgagcgttgccgccgggcagggggtgttctcgctgggcagggtgcagacacccacgctcgtgatgatatgcagccgctatttggagaacaagaatttcgtacccgccaagttttggcaactcaaagcggcgaccgccagcgggggaataaattttaccgcccaatcgaccgccaagtgggaacagcagcccgaagccatagccgccctgcaacgggtaaaggatgccgggcaacttgtggttaaatccgttgagaggaaagaagcctgccaagaaccgccgcttttgtacgaccttaccacgctgcaaaaggaagcgaacacgaagctgaacttctcggctgacaagacactttccatagcgcaaagcctgtatgaaaagaaagtgatgtcctatccccgaaccggaagccgctatattccggaggacgttttcgatgaaatgccggaacgtgtcgccctgctgggg

SEQ ID NO: 11922 - DNA, 20889 bp, Unknown
  gut microbiota DNA sequence
ttcacttgctattaccgccacaaatataatcaatttatacggaaccccaattccggacggtcttttaaataggtaattaattcacggcccaccgaaagcttgaccggacgggaaattaagtcgaccgccatacggtttacatcaatatcatccgtcaccctaaaatagagttccgtatttcccggatgttcttttgtcaatgttgcaagttctgtgattaaagcggagttcaacacggacaacgggataataatggttatcttctgcaccaactcttcttttacatccggcagcagttccatagaagtaatcttcacttccagttcatcctgccgccattgcttgggttgacaacgagctttgataaacaaaaaagtaccctcattgaggtatccttgataagtcacccagtcatttccccagaatggaatctcggtagagccggaataatcttctatcttggcgataccataaggatttccgttcttgctgattccacgacggacactggtcacaatacctcccatcgttatttcgcgaccagcaagggctgctttatcttccaaatctgccatacgtgtgttgcagacgtgttccaatacaatggagaattcatccaacggatgagctgaaaggtagataccaaccaaatcacgctcacggttcaaacggtcgagatcactccaacgctctactccctgaggaatctcaggagttgccacatcaattacgttttcgccaccaaacagagaattgactgcagcagctttatcagcctgataacggttgccataacgcatcaaagtttccaggaaaacttctcctttagagttgacagcaaagtactgttcacgtttcagttccggaaaactgtcaaagccaccggccaacgcgaggcattccatgttcttcttattgcaggcattcagattgacacgttgcacaaagtcgaaaattccggtaaaaggaccgttcttttcacgttcctccatgatactctgcacggcagcctcgcctactccttttacggctccaagcccgaaacggatattaccgtcacgatttacagtaaacttcaagttactctcattgacatccggtcccaaggtctgaatacccatcgccttacattcatccatcagcttcgtgatatccgtaatgttcgacaaacttcggctcattacagccgccatatattcggaaggataattcgctttcagataggcagtctgataagccacccatgaataacaagtagcatgagacttgttaaaagcatacgacgcaaacttttcccagtccgtccaaatcttttcgagaactttcgggtcgtgtccgttcttacgtccaccctcgataaatttaggcttcatgtgatccagcttgtcacgcagcttcttacccattgccttacgaagagcatcagactcaccgcgtgtaaagtccgccaacaaacgtgacaaaagcatcacctgttcctgataaaccgtaatcccgtatgtatccttcaagtacttttccattaccggaatatcatactcaatcggcttacgtccatgtttacgatcgataaaatcggggatataatccatcggtcccggacggtagagagcgttcatggcaatcaaatcttcgaatgtagaaggctgcaactcacgcaaatacttctgcataccggcagattcaaactggaatgtaccgatcgtacgaccgtcactgtataatttataagtagccggatcgttaatatcaatctgatccacatccacttcaatggcacggctcagacggatattttcaacggcttctttaatgatagacaatgtcttcaagccaagaaagtccatcttaatcagtccggtatcttcaatcaccgaaccttcatactgggtgacaagcattttctcacccgtttctttatcatcggcagtgctgacaggcacccaatcggtaatatcatcacggcagataatcgtaccgcaagcatgcacacccgtaccacgtacattaccttcaagcattttggcatatttcagcgtatcgcgcaccaacggatccgatgaagcttcggcagcttgtaattcgggcacgtatgcaatcgcattcggcaagttcagtttcttatccggaattttatccggcaccagtttagccaagcggtcggattccgaaagaggaagtttctgcacacgggcaacgtccttgatagccaactttgtagccatcgtaccataggtaatgatgtgcgccaccttttcctgaccatatttattcgtcacccagcgaagtacctcaccacgaccgtcatcatcaaagtccacatcaatatcaggcaaagagatacggtccggattcagaaaacgttcaaacagcaaatcatattggatagggtcgattttcgtaattcccagacagtacgccacagccgaaccggccgccgatccacgtcccggacctacggatacacccaactccttgcgggcagcattgataaagtcttgcacaatcaagaagtatccggggaaacccatagtcttcatgatatatagctcaaaattcatgcgttccttcacttcttccgacaaaggctcgccatatatccgtttcgcaccatcgaaagccaacttagccagatagtctccttcgagcttgatacgatagagtttatcataaccacccagacgttttattttagccttcgcatcctcttcactcaacaccacattgccatgctcatcttgcgtaaactcatcgaacaagtctttctccgtaaatttcgctctgtattcttcttctgttccaaagtcctcaggaatagcgaaagtaggcataataggggcatgatcgatggaataatattctactttatcgagaatttccaatgtattgctcaaagcttcgggtacgtccgcaaagagttcattcatctcttcacgtgttttcatccactcttgtttggtataaagcatacgggtagggtcatccaaatccttgccggtactcaaacagatcagacggtcgtgcgcttccgcattttcctcgtccacaaaatgaacgtcgttcgtacaaatcaattttatgttgtacttttgggcatactccatcaggtatttattcacttttacctgcattggataacactcgtgattggcacggggaacggtcgctttatggcgttgcatctctagataaaagtcatctccgaataagttcttataccactgtatggcttcctccgcttccgcaaactgatcattggtaatccgtttcggtatctctccaccgaggcaagccgaacagacaatcagaccttcatgatacttttccaattcgctgcggtcggtacgcggacgcatatagtatccgcgcgtccatgcgtgcgatactaatttaataaggttatggtatcccttttcatttttagccaatacaatcaggtggtaaccgctctggtcgagtttaccttctcttaaatccattgtacggcgtgccacatacatctcacaaccgatgatgggtttgaacagtttgctttccgcttctacaattttggctttacaatcggcaatctcagcttctttgtcctcacactctatggttccggcttctatacccgcaattcgttttttcaggtctttgacctctcctttgggaccgctattctttttattaacgtagttcgtaaattctttaataccgaacatatttccatgatcggtcacggcaatacccttcattccattcttcatcgctttgtcgaccagacgagccacgctagcctgaccgtccaaaagagaatattgggtatggacatgtaaatgaacgaaatcctgcataatgataagtagttaatttgaaggcataaaattactatctcccgagagataaacaaaaataatcctcaaaaagttatcaacattcacatttctatgcctaattacttgctgattttttaaattaagtatatttttgcaggcaatatcattaaacagcattcatgggccgactaaagaaattaaagaaaatacgtattcaccgcgaaggaacacatatattatgggctagcttcttgctactactattgattaatgtcgctctttattggggaatcgattgtaagataccattctatgtggtagcagtagcaagtataacagtttatctgttgatggtgaatttctttcgttgtccgatccgtctcttcggacaggacactgaaaaaatagtcgtagcacctgccgacggaaaaatcgttgttatcgaagaggttgatgaaaacgagtattttcatgaccggagattaatgatctccatctttatgagtattgtcaacgtacatgccaattggtatccggtggacggtactattaaaaaggtggcacatcacaatggaaacttcatgaaagcctggctgccgaaagccagtacggagaacgagcgttctacggtggtaatcgaaactccggaaggagtggaagtgcttacccgccaaatcgccggagctgtggcacgccgtatcgtcacctatgcagaggtaggcgaagaatgttatattgacgaacatatgggattcatcaagttcggttcccgcgtggacgtatatttacccatcggcacggaagtctgtgtcactatgggacaattaacaaccggtaaccaaacagttatcgccaaactcaaataatcctgtcacaatgacgaacgttattaaaaaaaatattccgaataccgtaacctgcctgaaccttttctccggttgtattgcttgtgtcatggcttttgaagcccgttatgaactagcattactattcattattctaagctccgtattcgattttttcgacggaatgttggcacgtgcgcttaatgcacactccatcattggaaaagatttggattcattggcggatgatgtcagcttcggttttgctccctcagcgattgtattctctctgttcaaagagatgtactatccggcaagcatggaatttatcgctccttacctgccgtacgctgcattcttaatctctgtattctctgctttgcggctggcaaagttcaataacgatacccggcagaccacttctttcatcggtcttcctgttcctgccaatgctctgttttgggcttctttagtagcaggcgcacatgacatactgatttccgaaagctgtcatcctgtctatctttttatagttgtttgtctgttttcatggttattggtagcagaaatccccatgttctctttgaaattcaagaatctgtcatggaatgacaacaaaatcagttttacatttttgattgtatgcattcctttccttgtatttcttggaatcagcagctttgcagccatcgttgtatggtatattttactttcactttttacaagaaaaagtaaataaacaatctcttggcacgtttgttgtactatgagttttatcagagttacaatataaaaatcatagcccaatgcatatacttttatttatacttctctttatcatcaccattatcgtatttggtctttcagttgtcggactcatactcaaagccatcttcggaataggccaccgtttttcgtcttcatcacgaccgagacaaaacgaatccggacgtagcgcggaccagcaaagctacagtcagggaacacatcgtccgacggatcatgaagaggaaatattctccgacgacgttccaagaaaaaagcataaaaagatattcacccaggatgaaggagaatatgtagacttcgaggaaattaaagaataacgataaactctacacagctcggttattaatcaccactccatcaatcgctatctacgttttgccgcaaagaagtttttcataagggcggcacattcgtctgccagcagtcctttgacaaccactgttttgggatgcagcgccgaaacggcatatttctgatagccacgtttttcatcttcggcaccgaatacgagtttacccgtttgtgcccaggcaatggctcccgcacacatcacgcaaggttcaaccgtgacatacaatgtacattcattcagatacttaccaccaaggacattggcggcagcagtaatggcctgcatctcggcatgagccgttacgtcattcaatgtttctgtgagattgtgggcacgtgcaataatccgttctttacaaacaacgaccgcccctacaggcacttcaccccgttcggcagctttaccggcttctatcaaagcctgtttcataaagtaagtatcgtccagcatccccctctagtttttaatctacatttttttaagattatcccctatcgtctcatatcgtgctcaccaaaaagggtgggataatcttcttccatattcttatggataaacatgagaatcgtttcacgaagccagcgtgacttattggttatcttgtatttctcaagataacgatcaacaatcagctgttcttcgtcgctcaacaaaatgctcatacgtcgttcacgtttcgtacactcgacgtgcattttcaggcactttttacttctttttctcatatcttctgcaaaattacttttacttctgtaaatacaaagaataaaagcagtaaatttgcaaaaaaagatggctaaacataatgaattaggaaaagccggagaaaatgccgcagtaacctatctggagcaacaaggttacattattcgtgaccggaactggagaaaaggacattttgaactggatattgtggctacccaaaagcaggaattaattgtagtggaggtaaagacccgcagcaatactcaatttgccgaaccggaggacgctgttgacatccctaaaataaaacgtaccgtacgcgctacggatacctatatgagactatttcaaatcgatgtacctgtacgattcgatatcattacggtagtgggcgaagacggaaacttcaagatcgagcatatcaaagaggcgttttatcctcctttattttaaaattcaagacatagaagatacaaaattattataaattgattaattatgaatgttgaaacagccagagaatacagcctcagcaaaaaagccgctacggaagatatgcctttcggtgatgatttcctgacaatcagagtcatgggaaaaatgtttttatgtattagtttcaatacgcctgacaggattacgatgaaatgtgatccagactacgccatcgaattgcgggaccattacaatggcgtggaaggtgcttggcattttaacaagaaatactggaaccaagtattccttgaccgcgacctagatgataaactgataaaacaattgatcgaccattcctatgatgaagtcctcaagaagttcccccaaaaactacgtgcaaaatatgacgccctcccctgaaatattccccgttccattgattcatatcagtgaaacgaattcgaccaataactacctgcaaactctttgtgcccggcaaaaagtaggggagttgacgaccgtagttgccgactttcaaacatccggacgagggcaacgtgggaattcttgggaatcagaaccgctcaagaacctcctttttagttttgtgcttttccctgttttttgggaagcgcgctgccagtttcttatttcgcagattatatctttggctattaaggaagagttaagtacttatactgaggacatttctatcaaatggccgaacgatatttattggaaagagaaaaagatttgtggaatattaatcgaaaacgatttgatgggacggaacatctgtcaaagcattgcaggaatcggaatcaatattaaccaggaagaattctacagtccggctcccaatcctgtttcactatatcaaatcactggaaaacgccatgatgtctttaagatattaaagaatatcatgatccgtgttcagtcttattatgccaaacttcaaaaaggagatataacacagataaccaaccaatatgaaaaatcacttttcagaaaagaaggaatgcaccgatataaagatattgacggtgaatttctggcacgaattatttgtgttgagccggaaggtaggttaatcttagaagacgaaaaacaggtccgaagggcttatatgtttaaggaagtggaatatttattgagataaaaatcttttatatatgagaactacattatttgctttgttatttttcataattagttgtgaagactcagaaaacagtcctaccccatctattaaagaaagcgatactgataaccaagaagagtcttatcaacttcctgtaatcttccacatcttttacgatgggagcgattcagaccaaactgtgacaactaaaagaataaaagaaattattgatgcttgcaataagtattatgacaattcgaataacaaaagtgtagatattcatttgaaattcatccttgctacccacaacaatgagggaaaagtactttctgaggctggaatagagcgtataaaagtaaacaacgcagaattggactgtgacaattttatggatgacaagtctaatattcaatatctatgggataccgaccaatacatcaatattatgttatatcggttcacaaacaaaaatatattaggaatctcttaccttccatatacagtcaagccggacaaattagaaggactaaatcaacttaatttcttaccaacacactccactctgacatatcctcactgtatatctatcaacaaattatatattaacgggaaagccaatatagaaggacaaatctataatccttcagatgttattgccacccttgcccatgaatttggacactatctaggtttatatcatactttcaatgaaacgaaagactcggcaggaaatataattaccaatctatgtgaggacactgactattgtacagatacccctccttacaacagagatgaatataaagattttttagacaactatatccctaaaaatggaatcaagatcacattcaatgatttaccatatcttatggaaaggaaaaactgtatggataatacccaatctaccccaaacaacatcatggactatgaatactcatacgttaatcgctttaccaatgaacaaaaaaatagaatccggtatgtgctggcacacagtccgttgattccaggaaaaaaggttaccagaagtataacaaagacatcggcaccacaagaatttcccatgcgaacaatcaaataaaactgtattatagaaaaagaggtgaaccattttcagcgattcacctctttttctattctcaatatcttatccaatgtcttttgagcctctgttgacggaaattgtgaaataacttttctcaacgaattccgggccttctgataaccggtcgaaaagacttttgataatccatcccgataacgcgcatattgcatcttagtaggcgatgcaagttttttaaaatcagtatccaaccgtttcttctccttttcagccatcagataatagtaattacctaagaatatattagcagccagattatccgcatccaactgcaaaaccttttcatacatacgcagagcctccttttcctgcccacggcacacttgtatctcagcacatgcctccagataatctacattatcaggagtcttttgaagcaattccttgtaaaacagataagccttgtcataattccgattcttcctataagcagaagccagttctacagctaattttgaactaatatcactactcttatcaatgctcgtccaatagaacatctcggtacggtctatatccaaaccgattgtttggcggaaatagctcacagcctgtccatgctgccctgattcaatggcagcagacactttctgcaacatttcatcgaccgactgcgcattcagcaccagtggcaatgaaaacaatgataaaaagaagatagttaaggctctcataatcccacttttgttatttagttcgtgacacacaaagatacaataaaaaaaataaaagatgtacctttgcggacgaaaagaacaatcaatttgataaaagtgtttttatacaatgacagataaaaaacaggtcactgaaaacagacgaatattacagattgccatcccatcaatcatatcgaatatcaccgttccattattgggactcatcgatgtcaccattgtaggccatctcggttctccggcctatatcggggccatcgccgtaggaggaatgctgttcaatatcatctactggattttcggattccttcgcatggggaccagtggaatgacttcacaagcttacggacagcacgaccttaacgaaatcacccgactattgctacgttccgtcggagtaggattactcatcgctttctgtctgctgctgcttcagtatcccattctgcacttggcatttacatttataaagaccacatcggaggtagaacaactggcaaccacttacttctacatctgtatttggggagctcccgccaccttagggctttatggatttgcaggctggttcatcggtatgcagaactcacgttttccgatgtatatcgccattacccagaatatagttaatattgttgccagcctatgttttgtttacctattggatatgaaagtggcaggcgtagccgcaggaactcttattgcccaatatgcaggcttcttcatggctctttggctctatatgcattactaccatacgctccacaaacgaatcgtctggaaagaaataatacaaagacaagccatgtatcgcttctttcaagttaaccgcgacatattcttccgtacactctgtcttgtcatggtcactatgtttttcacctctgccggagcagcacaaggagaagtcgttttagccgtcaacactttgcttatgcaattattcaccttattctcctatgtcatggatggctttgcttatgccggtgaggcgttggctggacgttatatcggcgcaaaaaatcaaacaggcctccgcagtaccgtacatcatctcttttattggggattgggcctttcgtttctattcaccctcttatattcagttggcgggaaaagctttctaggcctgttaaccaatgatatttcagtaatcgccgcttccgactcctacttttattgggcacttatcattccattagccggtttttccgcctttctttgggatggtatctttatcggcgctaccgccacccgccaaatgctttactccatgttggtagcttccgccagctttttcggaatatattacggattccattccttgttgggaaatcatgccttatggttggctttccttgtttatctttcactaagaggaatcgtgcaaacttttttagggagacaaatcatgcgaaaagtaatcgttccctgatgaggagtatccgataaattatctctatatttgcggaaaacattaaaagtaaaagatatggcaaagtataaaagaattctactaaaattaagcggagagagcctgatgggcgaaaagcaatacggcattgacgaaaaaagattggcagaatatgcggaacaaatcaaagaaatccacgaacaagggatacaaatcggcattgtcatcggaggcggaaatatttttcgtggcctaagcggagctagtaaaggtttcgaccgtgtgaaaggcgatcaaatgggaatgttggctactgtcatcaacagtcttgccctcagttcggcacttgttgccaccgaggtgaaagcccgtgtattgacagcagtacggatggaacctatcggtgaattttacagcaaatggaaagccatcgaatgtatggaaaacggtgaagtggttatcatgtccgcaggaacgggaaatcccttcttcaccacagataccggttcttcactgagaggaattgaaatcgaagcagacgttatgctgaaagggactcgtgtagacggtatctatacagctgatcccgaaaaagatcctaccgcaaccaagtttgacgacatcacttatgatgaagttctgaaacgtggtctgaaagttatggatttaactgctacttgtatgtgcaaggaaaataatttgcctatcgttgtatttgatatggatacggtaggcaacttaaagaaggtaatcagcggagaagaaataggtacattagtacacaactaatctcccgatcgaataaaattaatcgtctgacagttgattctttttcgtctgactactgtcagacgaaagttcaacagtagtcagacgcaagtttaactattgtcagacgattaattttatgcataaacaagattagttccctctttacttagaaatagtttttagcatacgaaagattaaattatactatcaaccgcctaaacgcttgtttatcattgacgaactgcgtacttttgcacgccataaaaaaaggactaagaacaatgaataacaagaccaaaggttttatctatggagccattgccgctgccagctacggtatgaatcctctttttgcacttccgctctatgcagccggaatgagtgtcgataccgttttattctaccgttatttctttgccgcaatcgtgctgggtattctgatgaaaatgcagcgtcaatcctttgtgcttcacaaggcagacgtcttgcccttagtcattatgggattgctgttctctttctcatcgttgctcctgtttatgagctataattacatggatgccggaatcgcttcaaccatcctgtttgtttatccggtaatggtagctgttattatgggggtgttcttcaaggaaaaaatatccgcaattacagttttctctattctgctggcactttcgggtattgctttgctctatcaaggagatggtgataaaccgctatccacgttggggatcatcttcgtactgctgtcttcactttcatatgctatatacatagtaggtgtgaaccgctcaacattgaaaaacctgccaaccaccaaacttacattttacgccatcctgttcggactatcggtttacatcgtccgtctgaacttctgtatggagctgcaggttataccatccacctggttatgggcagatacattggctttggctattctgccaaccgccatttcattggtctgcaccgccttagctatccattatataggctctacaccaaccgccattctaggtgctttggaacctgtgacagccttatttttcggtgttatgctgttccatgagaaactaactcctcgcttaatggttggtattttaatgattatcaccgccgtgaccttgattatcatcggcaaatcactcataaaaaagatggggatgctgttgcagatgaacaaaaaataatatacttttgctacttaatcaatcaaatagcaactttaattatcaaaaaatatggtagacgtaaagacttgccttgacaatgcacaagaaaaaatggatatggctgttatgtatctggaagaagcactggcacatatccgcgccggaaaagcgagtacccgactgttggacggtatccgtgtagactcttacggaagtatggttcctatcagcaatgtagcagccgtaactactcccgatgcacgtagtatcaccatcaaaccgtgggataagagtatgttccgtgtcatcgaaaaagcgattatcgactccgacctcggtatcatgcctgaaaataacggcgaagtgatccgtatcggtattccccctctgacggaagaacgtcgtaagcaattggcaaaacagtgtaaaggcgaaggcgaaactgcaaaagtcagcgtacgcaacgcccgccgagacggtatcgatgcacttaagaaagctgtaaaagacggattggcagaggatgagcaaaagaatgcggaagcgaaactgcaaaagatccacgataagtatatcaaacaaattgatgatatgcttgctgaaaaagataaagaaattatgactgtataagttgagcatggagagttgagagttgaaagttactatgtagtataccaacaacgcgttcagctctcaattctcaactctcaattctcaacttatgaaaggattagtaatcaaaaacacaggtagctggtatcaggtaaagagtgatgacggacagtttatcgaatgtaaaatcaaaggtaatttccgactcaaaggaatccgaagtaccaacccggtagcggtaggcgaccgtgtccagattatccttaaccaagaaggcactgcctttatcaacgaaatagaagatagaaaaaactacattatccgtcgttcttccaatctttccaaacaatctcacatccttgccgccaacctcgatcaatgtatgttggtggttactgtcaattatcccgaaacttcaacaatctttattgaccgttttctcgcatctgcagaagcctatcgggttcctgtcaatttggtatttaacaaaatagatgcctacgatgaagatgagttccgatatttggacgcactaatcaatctatacacacatatcggttatccctgcttcaaagtttccgccaaaaacggtcatggagtagaagcaatcagaaaggcactggaaggtaagattacactgttctccggacattcgggagtaggaaaatccacccttatcaatgccatactgccgggaatagaaacaaaaacgggtgaaatctcttcatatcacaacaaaggaatgcatactaccactttctccgaaatgttccctgtggacggagacggatatatcatcgatactcccggtatcaaaggattcggtacattcgatatggaagaagaagaaatcggacattactttcccgaaatattcaaagtctccgcagaatgtaaatacggcaactgcacacaccgtcacgaaccgggatgtgctgtgcgcaaagcggtagaggaacatttaatcagcgaatcacgctatacttcctacctaaatatgctggaagataaagaggaaggaaaatacagggcagcttactagatcaaagagaataataaactgaaaaacatacaatagctttattagctacataaacaattttaaaaccatgaaaaaaggctgcatcatttttcttatcttaaatgtactgacaacgtctgcattattcgtcggtggattcattctaaattccgaagaacaagaatccgacaaacaaagttcaacagaatcctcaccatccaaagatagtttatcacccaaagataatttatcatacttaaaagatgaaacacactttgttgcccaagaaaaacaaaaaggaaaacttaagacagatgtcacctattatttagcagagaaaggatatacactttcaaaaaatacagaaataacggttatttgccaaacagacgaacaaaacacgttaatggaagataaggatggaaatcgctttaccataccaagtagaagcgtggaaacacagcgtccccttaaaatgattaatcctaattatcattattatatgggtggtacttggctccacactttcgatccttataaacgccccattacagaaatcatatccaaatggggagactatacattatgcaataagcaagaaggctcttacacatttccatatctaactcatgtttcaggaatcagtagaggacactctgtcactctgctcacagatgaaaaaggaattgtcaccggaagccgatgttccaatgagagttcgaaccttttcggttttttgttcttctactctgatattctttcactaaatgtatatgagccacaaggcacattactaatagaaccaggaaccgatactgacaacagtggatctatcatcgaaggaatttatatgtatgtgttatatacaataccagcagcaatactattgttcgtaattctttggggtatgatgattgtccggattgtccctaacaatattatcaacttcacacttcgcgcaggaacatttcttattatatatgttctttccatcatcttcttagaacactatcatagtgtgtggctgattcttttcccatgttatatgggagtgggatatatgctaattagaggattaaaaaattacttaaatttagaagcgcgctgcacacgctgccatgccatcaacagtattaaccgccataaggaagaaaccggacgggaaagaactataagaaaatgtaacattcatttccatttagaagccaatggagatattacacatagcgcctatgtatataacgaaacaaccgtacattatcatcacaaagatgtgtgtgaaaagtgtaaatatacacaggaatacaacagtgacacagtattaaaaaaaagcatagaagaatgcccgcattgtggtagcacagacatcagtaaagaaatggatatcgacaacattaaatataaaggagggaaaataacctttgactatgcatatcaagagtactgtaccctatgcaacgaatcgatatgggaaggaaatggatcgtattatttcaatgccccaaaacctgcaaatacaccaaagagacgcactccagtttctaacgcaactcctcagtctcaagataatacttttagacacggatatgaatgtcgttactttgatagtggactttctaatcaaatgggcacaggaatatgtatcaaaacagggtgtgaccaaaatggagataaatgtaacaaagaaggaggttactgcccatggtttgaattacgaaattaaacatatttagacctaataaggtattgcaaaaaattatcagtcagaggatgtctgagaataaactatccccagaaagtcggacatcctctaattaataaaagagggaagattacttctattttatcattattcaattaaaccttttctatcaaaaacaatctaacctactgaagatacaatgtaatatgctatatactatactaaaccatgaataagaagactaaatgggggatcatcatccttgttggtaccggaattatcggtggaggaatttattcacaattacccaaaaagaacgacgaactaacagcagccgacaaaataatgagcggcaaatctaaaaaagggagacaagttttaaatgtaaacgccaaaattataaaaccgcaatccctgacagacgaatttacaactaccggtgtattgctacccgatgaagaagtagatttatcttttgaaacttccggaaagattgttgaaatcaattttgaagaaggaacatcggtgaaaaaaggacagttgcttgccaaagtaaacgaccgacagttacaggcacaactacaacgcctcgtctcacagttgaaactggcagaagaccgtgtattccgtcaagacgcattgctgaagcgagatgctgtcagtaaagaagcgtatgaacaagtaaaaacagatttggcaaccttgaatgccgatatcgaaattataaaagcaaatattgaactgaccgaactgcgcgctccgttcgacggagttatcggacttcgccaagtcagtatcggtacttatgcttcaccgacaacagtggttgccaaactaaccaaaatcgctccgctaaaagtcgaattttccgtaccggaacgttacgccaagcaaataaagaaaggaacaaacctgaatttcagtgttgaaggtaatctggacgctttcggtgcgcaggtatatgccgttgaatcagctattgaccctaatctgcaccaatttacagcacgtgcactctatccgaatgtgaagcatattttactacccggccgctatgcgagtgtattattgaagaaagacgagattgaaaacgcaatcgctatccccacagaagcaattgtcccggaaatgggtaaagataaggtctatttatataaatcgggaaaagccgaaccggtggatatcataaccggtattcgtaccgcatccgaagtacaagtaataagggggttgcacatgggagataccatcatcacctcaggaacactgcaactccgtaccggacttgccgtaacgcttgacaaaattgattaatacctgcgccctatgaacatatccgaattaagcatacgccgcccggtattagccaccgtactaaccatcattatcttacttttcggatttatcggatacaactatctgggtgtccgtgaatatccgtcagtggataatccgatcatctctgtcagttgctcttatccgggagcaaatgccgacgttatcgagaaccagattaccgagccgttggaacagaatattaacggtattccgggtatccgctctttatccagtgtcagccaacaaggacagagccgtatcactgtagaatttgaattgtccgtcgatctggaaaccgctgcaaacgacgtgcgtgataaggtatcacgtgcacaacggtatttaccgcgtgactgtgaccctcctaccgtatcgaaagctgatgcggatgcacaacctatcttaatggttgctttacagagcgacaaacgctcgctattggagttaagcgaaatcgcagacctgacagtcaaggagcagttgcagaccatctccgatgtaagtagcgtttctatctggggagagaaacgttattccatgcgcctttggctggatccggtaaaaatggcgggctatggtatcagccctattgacgtaaaaaatgcggtagacaatgagaacgtggaacttccgtcaggtagtatcgagggaaatactaccgaactgacaatccgaacacttggattgatgcatacagctgatgaatttaacgatttgattatcaaggaatcggataaccgcatcgtacgtttcagtgacataggtcgggctgaattaggtcctgccgacatcaaaagttacatgaagatgaatggcgtaccaatggtaggtgtcgtagtcattccgcaaccgggtgccaaccatatcgaaattgccgacgcagtatatcagcgtatggagcaaatgaaaaaggatttgccggaagatgtacattataattacggattcgacaacactaaatttatccgtgcatctatcaatgaagtaaagtccaccgtatatgaagctttcgtactcgttatcatcattatcttcctcttcctgcgcgattggcgtgttacgttggtaccttgtattgtgattcccgtctcccttatcggtgcattcttcgtcatgtacctggctggtttctccatcaacgtactttctatgcttgccatcgtattgtctgtgggattggtggtggatgacgctatcgtaatgacggaaaacatctatatccggatagaaaaaggaatgagcccgaaagaggcgggaatagaaggagctaaagaaattttctttgctgtcatctcgacaaccattacactggttgccgtattcttccccatcgtctttatggatggtatgaccggacgattattccgtgaattcagtattgtgatttccggttcggttatcatttcttcatttgccgcactgactttcacgcctatgctggcaaccaaattactgataaaacgggagaaacagagttggttctatgcgaaaacagaacctttctttgagggtatgaaccgcctgtatagccgttcattggctgctttccttcgcaaacgctggattgcccttcctttcacggtcatcactatatgtctcatcggaattctgtggaatatagtaccggccgaaatggctcctttggaggaccgttcacaaatcagcatcaacactcgtggtgcagaaggtgtgacttatgaatatatccgggattacacagaagatatcaaccaacttgtcgattccattcttcctgacgccgaagccgtgactgcacgtgtttccagtggtagcggtaacgtgcgtattactttgaaagatatgcaggaccgtaactacacccagatggaagtagccgaaaaaatatcgaaagcggtacagaaaaagacgatggcacgttcgtttgtgcagcaacagtcttctttcggcggtcgtcgcggaagtatgccggttcaatacgttcttcaagctaccaatctggaaaaactggaagaggtattgcccaaattcatggcaaaagtgtatgaaaacccggtctttcagatggcagacgttgacttgaagttcagtaaaccggaagcccgtattcaaatcaaccgtgataaagccagcattatgggagtaagtactaaaaacattgcccaaactttgcagtatggattaagcggacaacgtatggggtatttctatatgaatggaaaacaatacgagatcttgggagaaatcaaccggcaacagcgaaataagccggccgatctgaaagcgatctatatccgcagcaataatggagacatgatacagctagacaacctgatcgaattggaagatggtattgctcctcctaaattgtaccgttacaatcgttttgtgtcggctaccatttctgcaggcttagccgatggaaaaacaatcggtcaaggtttggacgaaatggacaagatagcaaaagaaacattggatgatactttccgtacagctctgtccggagactcaaaggaataccgtgaaagttcttccagtctgatgtttgcctttatcctggctattctcctaatttacctgattctggcagcacagttcgaaagtttcaaagacccgttggttatcatgctgacagtgccgctggctattgccggagctttggtcttcatgtatttcggagatattacgatgaatattttcagtcagatcggtattatcatgctgatcggtctggtggcgaagaacggtattcttattgtagaatttgccaatcagaaacaggaagccggagaggataaaatgagtgccatcaaagatgctgcccttcaacgcctccgtccgattctgatgacaagtgcctctacggttttgggacttatcccgctggcatttgccaccggagaaggttgtaaccagcgtattgccatgggtacggcggtagtgggtggtatggtcgtatccactctgcttacaatgtacattg

SEQ ID NO: 11923 - DNA, 225 bp, Unknown
  gut microbiota DNA sequence
gtcattgtcaagcatacagtggatgcgttcatatgggtacagcacgtcaatggctttcggcacgttgacagtagagttgagtatgacataatcctgtctgtcaaggtcgggcatggtcggacagttcttcatccggagcgtgaggaaagaaagataatccataaaaccctcgaataccaaacatttctctctcggctctccctgctgccgtatatgggtgatgtc

SEQ ID NO: 11924 - DNA, 5407 bp, Unknown
  gut microbiota DNA sequence
ctttgtaaatgaaaagcataccgcctattttattgagtatcagctatatcgtgctattcctcgattgccgcctgcgccgctgccaatcttgcaataggcactcggaacggcgaacaacttacgtagttcaatcctactctgtggcagaacttcacagaagaaggttcaccaccatgttcaccacaaataccgcatttcaaatccggacggatggcacggcctttttccgttgccatacgaaccaactgtcctaccccattctggtcgagaacctggaacgggtctactttcaaaatcttcttttccaaatatacagggaggaaagaagcaatatcatcacgagagtaaccgaaagtcatctgcgtcaagtcatttgtaccgaatgagaagaattccgcagaagaagcaatacggtcggcagtcaaggctgcacgaggtatttcgatcatagtaccaactttgaaatcaatgctgtctcccatttcctcaaacaatttcttagcttcggcacggatcaccttttcctgttctttgaattcatacagaataccggtcaacggaaccataatttccggatgagtctccactccttctttcttcaattccaaagcagcacccaagatagcgcgtgtctgcatctgtgtaatctccggatatgtatttcccaaacgacagccacggtgtcccaacatcggattgtgttcacacaatgattccacacgctgttggatatattgcaggctcactcccatagtatctgccatttcccgctgtcctttcagatcgtgaggaacgaactcatgcaaaggaggatcgagcagacgtacagtcacaggacaacccgccattgccttaaagatacctttaaagtcggcttgttgatatggaagaatcttagccaatgctttacgacggccttctgcattttcagccagaatcatttcacgcatagccttaatcttctcaccctcaaagaacatatgttccgtacggcaaagaccaatacctaccgcaccgaaattacgggctaccgtcgcatcatgaggcgtatccgcattggtacgtacctgaagacgagtatatttatcggcaagcgccatcagttcggcgaagtcaccggagagttcggcagccttcgtttccaccttaccattatatactatacctgtacttccgttcaatgagatataatctccttctttcaataccacaccgtcaatttctacagtacgagctttataatcgatattcaaagcacctgcacccgacacacagcatttgcccataccacgtgcaaccacagcagcatgagaagtcataccaccgcgagctgtaagaataccttcggcaactgccataccggccaggtcctcaggagaagtctcgatacgaaccatcactacacgcttaccggcagcacgccattcggctgcatcatcagcaaagaatacaatctgaccggcagcagcacccggagaagcaggaagaccgcgagtcagaattttagctttcttcaaagcgtccttatcgaatacagggtgaagcaactcatccaacttattcggttccacacgcatcaaggcagtcttttcgtcaatcatgccttgacggagcaaatccatagcaatcttcaccatagcagcacccgtacgctttccgttacgtgtctggaggaaccaaagtttaccttcttgtacggtgaactccatatcctgcatatccttatagtgattttccagtttggtttgaagcgcatccagttctttatagatttcgggcatggcttcttccatagaaggatatttggcagcgcgttcctcttcactgactcctgccagttgagcccaacgctgagaacctatcttagtaatctgttgcggagtacggataccggctaccacatcctcgccctgcgcgttaatcaggtactcaccattgaaaaggtcttcgcctgtggcagcgtcacgggagaaacaaacacctgttgccgaagtttcacccatattaccgaataccatagcctgtacactgactgccgttccccattcgtcaggaattccttccatcttacgataaagaatagcacgttcattcatccatgagttgaatacggcacagatagctccccaaagctgttcgtaagctgatttcgggaaatcctgtccggtctgtccttttacggcggccttgaatcgttttaccaattccttcaagtcttccacttccagctcattatccagtttcacacctttctgatgtttcacttcttcgatgatttcttcaaacgggtccacatcttccttattcaccggcttcatgcccaataccacgtcaccgtacatctgtacaaaacgacggtaagaatcccatgcaaaacgcgcatttcctgttttgcggatcaatccttccactacttcgtcattcagtcccagattcagaatcgtatccatcatgcccggcatggaagcacgcgcaccggaacgaacagaaaccaacaacggattctcaacgtcaccgaattttgatttcatcaaagtttctatattggcgattgctctttctacttcacttttcaaaagagatacgactttatcttttcctaattcgtaatattctgtacaaacatctgtggtgattgtaaatcccggaggaacagggacaccgataagattcatttcggcaaggttggcgcctttaccacctaacaagtttctcatgtcagccttcccttctgcctgaccatttccaaaggtataaactctttttttatccataatattgtgtttaaagttacattatgacttttttctgttcgcaaatctaaggatatttcgcaaaccagaaaactttttgcgaaaaaactttctatcaaaatgcaatttcgacattacaatctggaatatttccgtagacacagaagatttccaaaaaaaatacctacttttgcaaagtaattattagattggtgtaaaagtggcaagaaagaaaaaagagcttcccctattggagaaggtaacaatcatggatgtggctgccgaagggaaagccatcgcaaaagtaaatgacctggtaatttttgtaccatacgtagtaccgggcgatgtagtagaccttcagatcaagcgtaaaaagaacaaatatgccgaagcagaagcggtgaagtttcatgaactgtcgcccaaccgcgctgttcctttctgccaacattacggtgtatgcggcggttgcaaatggcaagtgctcccctattcggaacaaatcagatataaacagaaacaagtagaagataacctgaaacgtatcggaaagatcgagcttcccgagatttctcctattcttggttcggcaaagaccgaattctatcggaataaattggaatttacattctcaaacaaacgctggctgactagtgaggaagtccgtcaagacgtgaagtatgaccagatgaatgcagtaggtttccacattccgggagcattcgataaagtgctggccattgagaaatgctggttgcaagatgatatttccaaccgcatccgtaatgcgatacgcgactatgcatacgaacatgattattcctttatcaatctgcgcacacaggaaggtatgttgcgtaacatgattgtccgcacgtcttcaaccggtgagctgatggtaattgtgatttgtaaaattacggaagagcatgagatggagttgttcaagcagttattgcagtttgtcgccgactcattcccggagatcacctccttgctatacattattaataataaatgcaacgacactatcaatgatctggatgtacacgtattcaaaggcaaggaccacatctttgaagaaatggaaggattgcgcttcaaagtaggtccgaaatctttctatcagacaaattcggaacaagcgtacaacctatataaggtggcccgtgaatttgccggtctgaccggaaatgagctggtatatgacctttatacgggaacaggaacaattgcgaatttcgtatcacgccaggcacgtcaagtaataggtatcgaatatgtgccggaagccatcgaggatgcaaaagtcaatgcagaaatcaatgatatcaagaacgcattattctatgcaggtgatatgaaagacatgctgactcaggacttcatcaatcagcacggacgtccggatgtgattattacagatcctccccgtgccggtatgcatcaggatgtgatcgacgttatcctgtttgccgaacccaaacggattgtttacgtaagttgtaatcctgctactcaagcacgcgatttgcaactgctcgataagaaatataaggtgaaagccgttcaaccggtagatatgttccctcatactcatcatgtggaaaatgtagtgttattggaactccgataaagaattcggttcaccacagattacacggattaacacagattttttattgttggattttataatccgtgttaatccgtgtaatctgtggtgagtattaaatcaaaagaaaaaagatatggaaaaaagaccgagaagaactcccgctgaaaaggcacgtgctcaatataccaactatgcagtcaaggaaccgatggaacttatggagtttctagctgccaaaatgccggatgcaagtcgtaccaaactgaaatcattactcagtaaaagggtcgtattcgttgataatgtaatcactacgcagttcaacttcccgttacagccgggtatgaaggtgcagatcagcaaagaaaaaggaaagaaagagtttaataacagactgctgaaaattgtatatgaggacgcttacattattgtggtcgagaagatgcaaggacttctatccgtcaatacagaacgtcagaaagaacgtaccgcatatacaatactgaatgagtatgtacaacgttccggacgccagttccgcgtgtatatcgttcatcgtctggatagggatacttccggcttaatgatgttcgctaaagatgaaaagacgcaacgtacactacgcgacaattggcatgatatagtgaccgatcgccgatatgtagctgtagtagagggaagtatggaaaaggattatggaactgtagaatcgtttcttacagacagaactctctatgtcagttcaagtcaacaagatgatggcggtgcgttatccatcactcactatcgcactatcaagcgtgccaatgggtattctttgatagaattggacttagagacaggccgtaagaatcaaatccgtgtacatatgcaggatctggggcatccgattatcggagacggaagatatggtggtgaaaatactcctaaccctatcggtcgaatggcacttcacgctttcaagctgtgcttctatcatcccataacaggagatttgatggagtttgagactccttatccggcagacttcaag

SEQ ID NO: 11925 - DNA, 2080 bp, Unknown
  gut microbiota DNA sequence
cttgcttctgtgaataaagaaggttatccccgtcctgtgccgatgagcaaaatcctggcagaaggaatttccactatctggatgtctaccggagcagattcattaaaaacaattgatttcttatcgaatccgaaagcaggattatgctttcaggataaaggagacagcgtagcgttaacggggaaagtggaagttgtgactgacgaaaagatgaagcaggaactttggcaggactggtttatcgatcattttcccggtggtcccactgatcccggctatgtcttgttgaaatttgaatcgaatcacgcaacttattggattgaaggaacatttatccataagaaactcgactaattctactcggaaagatagtgaaatagtgaatttaacgaggctgttcgagaacagcctcgtaattcatttagaattcaaatttttccaatttcatttcagccaatttctgaatgatacctacatattgagcgaaatggggagatttttcgtgtgctgccaatacttcggcattctgccaagtttcgcaaatcatgaaaacgtcaggacgcgtgctgctttcgaaagtatcataagcaatgcatccttcttcttttaaagaacaggcagtcagttcttttgccgcttttattgcttcttcgcggttggattcgtttacacgaacaaaaacatttaatctgatcatagtcttttttattaaatagttagaatttactttatcacgttcttgtgaataaatcacgggcaaagataacatttttgtgtatttcctaattgtttgttcttcaaaatttactactctttgtctgacgccaaagacaataataacatattccaagcctttatccccatgagataaggaaattcttgtgtctgagtgattctgacattaacttccggcagtacacaattgccgattcgaatattaaacagatgcacagtgagactgtcgtttactgtattctcctttagttgccttatggtttcttctccgcctatttcttcggttgtcagtactcccgcttcatgccatgctaatacaccttgcggagagacagtgaattcactatcttcatctgatagttgaaaacaggttttactaccgttcactatgacagatacaagttttcctttatcagtaatttccataggaagttcgagcgtcttatcttttccctgaaaggtatatacagggtgtttattcgattcaatagcccggatttccgacataactttcgctgtttttattttctctcgatgttctcttatacgtccgttacgagatttgcatctgaagagtatcagcagacatagaagtaaaatgaatatgagtacagagactaagtaatctttgcatttttctcggagtctatttagagaggaagaagattttctcattgttgttgcttttaaatcacccgatgttgcagcaccagatatgaaaggcttatttcccataagcctcaactgttaattcaagcaaagataagtaatatctctattactaaccatgtttttgcttaaaacttaatggttgtatctcataaagttatatctttgtatgcgatgaattaatcgtctgacagttgttgtactttcgtctgacaattgttatcttttcgtcttacagttgtcatacgaaaaagatacagttgtcagacgattaattttatatagactgatgattaaagtttaatgaatagagattaaatctatgcagtagaagtaataaatgtatgaactaataaaaaatatgcttatgagtgcccaatatgatttgtatgaaacgccggatcctgctaataccggtgaacaaaagccactacacgcccgtatcgttccaagcggaacctactcgaaaaaagagtttctggaacgtgtgtcccgttcttcccagacttttaattataatgttatagatgcggtggtaggagtggtgatagacgaactggctgaggctctatcagaaggatataccatcgaacttggcgagcttggttattttagcatctctttgaaatgtacgcataaagtaatgactaaacgtgagattcgtgccgaatcaatc

SEQ ID NO: 11926 - DNA, 2189 bp, Unknown
  gut microbiota DNA sequence
atatggagttgcttcacccgtccggacggcactttaccgcaaacaacggaagaagccgaagtttttcaggcacatgcttaccggcttgccattaaatgttatcagcctcaacttcccttcaacattctattaaaagagccgaaactggaacaattctcacgtcttagctatgatccggacttgatttatcgtcccgctcccgtacctttctatctttcacagcccatcggtatgcccggcgagatgacttatcatgagaaatcgagcactgaagcatctccgctgaatcgagcactgccggggtatgacacggaagatacggtagcattgctttatgaagcgacattgcggaaaacattcgaagaaatggaaacggactggcatcgaaacgatcatgatttgcaaatattaatagtcccgcttgccgagaactgctactactcaggcattccggaagaggaggcaaccagacgcaccatcatccgttacaacaaaagaaagaatccaatgctggtacgtgaaatgataagaaacgtatataaggaatgtaagggagtgccgaaaagcaactgtctgaccaaagagcaacgccttagcctgcaaatggatgaatttatgaaccgccgttatgagttccgttacaatacgcagatcggagaggtggaataccgggagcgtttctcgttccggttctatttccatcccatcgacaaacgggcacaaaacagcattatgctggacgcccaatctgaaggaatcggagtatgggacagggacatagaccgttacttgcactccaaccgtgtgcctatctataatccgctagaggagtttctgtttcacctgccacattgggatgggaaagaccgtatccatgcgttagccaacagggttccctgcaataatccgcattgggaattactttttcatcgctggttcttgaatatggtttcgcattggagaggagtaaataaaatgtatgccaatagtacatcgcctatattagtgggagcacaaggaactcataaatctactttttgccgtgaaatgattccgcctgcactccgggcttactatacggacagtattgatttcagccagaaacgggatgcggaactgtatctgaatcgttttgcgctcatcaacattgatgagttcgatcagattacgctgacccaacaggggtttctgaaacatattctccaaaaaccggtggtcaaccttcgaaaaccacatggccgctcggtgcttgagttacaacggtatgcttcatttatcggtacaagcaatcagaaggatctgttgaccgacccttcggggagccgtcgcttcatctgtattgaagtgacaggaaacatcgacactacacagccgatagattatgagcagctttacgcgcaagccatgcacgaaatttctcatggtgagcgttactggtttaatagtgaagacgagcagattatgaccgagaacaaccgggagtttgagcaaacaccggctatgctccaactgttttatcaatactttagggctccacaagcgggagaggaaggtgaattctttactccggtagaaatactgaattacttgaagaagaaaagcggtatttcattgtccgacaacaaagtatatcatttcgggagaatgcttcaaaagtgcggaattacctcgaaacatacttataaaggtactgtctatcaggtagtaaagatattataagatacaaaagcaaggctgacaataaaagttgatatcttttattgtcagcctgttttcagtggctattgtcagacagtagctacctgatattcatccgtttagatattatattgacaatttgacaataaaacaggtgcaaatcactgtgagatctaaatttgatatttttgtttcatagatgaatagagagtatctcctattttatctccactttcgtctgcaatctgatgtcatcagaagcagcaccgatcattacttggaaagttcccggttctaccacccttttcaaattccgatcgacaagtgcaaaatcctcttcggacaaaataaacttcacttcctgttcttctccacacttcaaaaagaggcgtgcaaaatgtttcaattgcttcaacggttgcactactgaagcatattcatctctcaaataaagttgaacaacttcttcaccatcgtactttccggtgtta

SEQ ID NO: 11927 - DNA, 429 bp, Unknown
  gut microbiota DNA sequence
tgcgagatagatttcaacaacccgcccgccaaagcgcaagagattatttcggcgggtgacgttccgctggggacacaaggcaacctgttcggcatcaccgggggcgagggaacgggaaagagcaattatgtagccgcaatcgtggcgggctgcatctgcccggctggtgcggaagtagatacgctgggaatacagataaccgccaacggcaggcacaaggcggtcttgctctatgacacagaacagtcggaagtgcaactgttcaagaatgtaagcaacctgctgacacgagccaaacagccggacaaacccgatgaactgaaagcgttctgcctgacgggtatgtcacgcaaagaacgcctgaacgccattgtgcagagcatggataagttctactaccagtacggcggcatccagttggtcgtcatt

SEQ ID NO: 11928 - DNA, 1334 bp, Unknown
  gut microbiota DNA sequence
agaaagaggaacatttactgaatatccctaaatctagtgattgcaatataaaatacaagcccggctctttattcgctcaatccgatagctttttcagtttcttgaaatgcttgattacagccagataatcacgatcggaacaagcatcgaatttattccaaagatcccccaatataacggcaccgccaaagccgaagtccttaatctcaagcagattctcctcattgataccgcctaatgccattactttcgagtcgatgattttagctttttgtgcttcacgtaattcttcggcggtatacgtcgaataatagttcactttagagatactgtcgtaaataggactcatgaaaacgtagtcataaaaatgttttctgtttttcacttcctccacagaatggcatgaacaactgatatgcctgtcataatcatgtggctccttgggattgcgggcattcagatgaatccccatcaaattgaactcctctttcatatagaaatgctcgtgcgtgacaatacggcgatgatatttctccggaataagagtcagtaaccgttcagagtacatggccggagtttccggttttctaagatgtagaatatccaatccctcttcaaaaagagcagtgataatcttgtcttcttcaacgaagaaagtgggtgtggtgactacaattaatttcatttccctttgttaaaattggattctttagcaaagttactaattaactatatcagaaaccaacctttatagtgaaaatttgttagattgcaatgtccgcaggtcaattgtccatagttcaccggctaaaacgtcaccgaaaccacagattatctttagaacttctgttgcttcaatacttcctacaacggcgggcgtaattcccattactcctttagagggaggtgacattcgtttcatttcttcttcgtcaggataaagatcacgataacttttctttcggtttccgtaattgaaaaccgagacttgtccttcaaatccgcagatagcgccatatacatacggctttccctgcttgatgcagatatcgttaatcagataacgggtatcgaaattatcacagccgtccaccactatatcatattcttggataatacggtctgcgttttccgcagtcagtcgggcagagtagtgtcttgtctcaatctcactgttgagcgaggtcaaacgttgggaggcacatacggctttcggctttcccagctcctcttcggaataaaggacctgtcgttgcagattgctgatacttactgaatcatcgtctaccagaccaagacagcctacgcctgcacccgccagataaagagcgatg

SEQ ID NO: 11929 - DNA, 359 bp, Unknown
  gut microbiota DNA sequence
tatttggtatttgcgcatctatcaaggcggcaggtattgcacgtttccccatgccatagaactgttgaacaagaaatacgctgatgtattcacgattttgcgcagttatcccgaactggaaaattacctttccccgttcgtggacgcttgggaaagttcggcagttgaacagttgcaggggcagattgccagtgcaaaaatcccgctttcaaggatgatttcacccgccctttactgggtaatgacgggcgatgatttttcacttgacatcaacaacccgaaagagcctaaaatactggttgtcggcaacaatcctgaccgccaaaatatctactcggcagcactgggattatataatt

SEQ ID NO: 11930 - DNA, 1889 bp, Unknown
  gut microbiota DNA sequence
caatgagcgcagtctgtcggcaatgatcgtttcgatggagactgttgtttccgacagttgtcttgtcacgctgctgatggtgcttcgggttcccttctccgcatattcgaggaaacgttttagtccggctactccaatagaagaagtccggttcaggtcgatcatctccgaccttagggtggaatagataatcatctcataccgggcacgggaaacggctacattcaatcttctttcgccgcctgcccggttcagtggtccgaaattcatgctgacgcgcccttctgcatccgggccatagcccacagagaagagaataacatcgcgttcgtctccctgcacattctccaggttcttgataaataacggttcgtcgcattccagcgcaagagtttccagttcggggtaaaagataaaaaggtcggataataagtcttctatcaaggcttgttggacaatgctgaaagtgactacaccgatacttttctttcttaattcctcgcttctcaatcttctggctatttcgtccactactgcttgagcttccgcccggttctggcgcgacttgcctttatcatagtaaccgttgatgttgactattctgactttcgattcaatgttgtccggtgaggggaaagtcatcagtttgttattgtaatattcggagttactgaaagcgatgaggctctcatgtttgcttcggtagtgccataataaatatttggaagggatagacagggcgagacagtcgtcaaggatactctccaaatcttccatttcaatgttgtcttcatcaatggtgttgaccgagaagaaactggtagggggcatttgtttcggatcgcctacgataatgacgtttttaccccgtgcaatggcgcccaccgcttcataagtaggcatctgtgaggcttcatcaaagataatcaaatcaaatttatcagcgtccgtatcgatgaattgagcgacggaaagaggactcatcagcatacacgggcacatgcgcgacaacaaagtgggaatctgatcgaacagcttgcggatagatatgccgcgggcattgttgcggatattcttttgaaggatacccacttcggaactttggatggcttcgtgagtgaaagacggaatgttggaggccaaccgggcaaataattctctttgcgtcgtttcttcgaatttggcggatatttgtttgtatttagcaatgatatcattgaatatcttaccgttgaataattccaaagtcggctctttggcgatgatataccggatagccgcctgatagaaacttttgtggaaactgtctgtaagttggccggtaggaatattcttttccttatattccgtcgcgataaatcctattcccaggctatgcagggtttggtaggcttgtagccactgataccagtctttgagcttgtcgaggttctctttccaggttcgggcttttgacaaggcaatcgttatccagtcggctgaatcggtataaagttcttcgatcgagatacccaacatgccggacaatttcttttcggtggctgtgagtgtatctgcgagctgatacagttcattgaaagaatgagcatgaatatctctgaatgtttgaattccttctgtgagttgtacggacaaattctgcttgatttgcgaaactttggcaatgtcttttgcgtagttcaacaaatgcgagtggagggaagtcatgtcgtcgattatctgctcaatggtgttccaatcctcgttcttgccgggacgtccgaatagggaggggagttgcccggtgtatttctggacggcttcagcttcttcctgataccggataatgcggtggagcagaggtttgatatcttctgtttcaatcgtttttaaagtatatatgttgattg

SEQ ID NO: 11931 - DNA, 3472 bp, Unknown
  gut microbiota DNA sequence
ggacagtgcctatttgtgacgagagttttttattagtatacatttaaacaaatgattataaaatgtccaatatactaaattataattgttcaatttcttcgatcgcaagtcctgtatatttaataatactgttaacaggcactccgtcattcttcatttgacgagcgatattatactgttcttcttttcttccttcttttcttccttcttttataccttcttttatacctttttcaatcccttttcttgtcccctcctctaaagcaatccggcacctttcttcagccgcccgacgttcgtcttcttccacaatctgactcacactatagcggtctaccgctttatcataagcgatacgattctcctccgacagatttgctactgccgccaattttgccaaatgttcaaacacctggtctttcaatgcatcaggcattctgctccaattactcatgttcttcaatgcataaattaatttatcatataaagtattacaatccgccaattcttttgtaaaataggggaactgcaaatagatttggcgaaaatggggatttaccacagctcccgaatccttatccgagacaaccgtatccgtacggaacttttcctccaatcccgcttccttgaaattcattaagaaaacaccataaacagtagaaagttgataacgttttccataaggaacaaattcttctttcaccaacattccattttcatcccgattctcgggtatcggaatatgtttgggaagaggattttctatctgacggctcacggcacggcaaacataataaagtgtacggtccagaaaatggctatgccaacgattctgcatttccacaattataaattcaccactatcagtacgacaatatagatcataaataattcccttgtcatgaatattatccgcacgatcctccttatccagaaaaacaaggtcctcaatatgatgctctccggcaagcaattcattcagtagaattataagaagctccttactggcaggctgaccgaaaattatcttaaacccctatatctgtaaaaggattgacgtatctagacatattacataacttttgtatatgacaaaaatagcacatatatttggatatccatacattgggagactttatttttccgaaatacctcctgtttgtatataaacctacatcgattaaaattaaaaagaagcctaaaagtccctttatctaacttttaggcttcacactattgtttaaatatctttattataactattcagcagtattatcaggacaacgcactccttctacaaacctaagatttccccaaccagcaaaagtagcattgtatccattaccagtaagatcggttacaaccttagcattatcctcagcaggttcattgaatctccaataagcaaccaacccatcagttaaaggatccacccaacatacgttattcttcaaatcagcagctgaacgggcgacagcccatacacgtgcctcgctgacatacccattcatataacggtcatcagcagctgattgtccaatatagaatgcggcatttgcatcctgcccgtaagcgtaggttaaatcaacagtacctcgtgtatccggaagttctccttgtaattctccattaacataaataaactttttaccttgtgaaccatcataaacacaagctaagtgcacccacttatcattaggcaaaacatctctggaatcgatagctggacttccaccactcaattgcagtttccaaccctctgtattactgcctgccgtacgcaaacagaagttctcttccaatcccataacagagaagcaccattttctacttgtaggtgtcatcttcttaaaacgtacccgagcttcaaacgttacatttggcaatgccgcggtattatattttgattctttcctaaaatcaaccttaaaatattccgcagtattagacaaatcagccgcttgtgttatgataacttgattaataacgatgtatatagtacgcgagccttctatgacagaaagattcttatcagacactcccgcaatacttaccggaagcacataagtcgtaccctctttcaatagttcgcgactgataatacttaaacgtacaccttctgaagaaatgctttttccattttcaattatcaagcttgtattttccaacttataagatttttcaggaagtaattcataattcttcttatactccttattaaacgattctaccaattccggagtagacttcatcattacttccacattattccccattgcattagatgaagcaaccttaataccaatcactgccggtaaatcatcaatcgtcaaattagcaaccggagataatttatctgctcctacaatatacactccttcataatattcctgacttttctggcaagacatcattaaaaaggagaacagagccaatagtgcatattttatattctgtttcattttttcaaatattaatgttcattcattattctgatagcctcacgtgtccatttgtaattaggattagagcggtagtcattttccatgtgatatgtaccacaacctcctttacgagtagccaatttaccttcatacataggaagaaaacgtgccataccttccagtgacggtactgtacctccctctcttaaagtatgcgaaacccctccattcacatattttccaccttcaaatgtctctgcaaagatatactgttctggtttccaaccattctgagcagcattatcaaagcgcctctgtaaatcagaatacgatgaagaattatatgactgcacaacaccataattaaagtactcagccagtccttgtttcaaatgataaggcacaccatcgataatcaacaagttacgagttccggattttggcccaatatacttacccaatgcttttacaaaaatttccatattgtccatatagtcaggccacatatatgaaggtccaaccaaaggaccattgaacggaactcccgggaattcttgatatccaggctcataatcaaggtcaataccttgataaccatacttatacattgtatcaactaatgccttggcatattcttctattccctccgaggttgcaatttcatgattctctccagacataaattcatcaggaattttgtgagcgaagatcgtatatgtcacccgagttcctttcacatcctgcacataacgcaaatcttctatttgagccggacttaaattcttataatcaccccatatagaaataatatccacactatcaggtacactgctcaagaagtttatcatatcagcagagttagctgtccatccgccaaaccagccaaaaaagacttcatgatcattcctagctttatatgctctcaaattttcccaatattcttcagacatattatcaggaactactatatccaaagcttctatatccgtattgcacgatataatccccgtgccaatcatcacagaaac

SEQ ID NO: 11932 - DNA, 6080 bp, Unknown
  gut microbiota DNA sequence
atcccaccataaacgagttgctccggtatccggaccgttcaatagttttatagccttttctacttcatccttattccccagatattcagaataagggaaaggaacacggcggatctgtatagaagtactaataacaccgccactttcgttattgacaatctcatatattttaggatatcctgtacgacggaattcgctccatgcttcctgtcctaatggatacattgcaatccatttctgggtaataatctgttctaactgtttttttgtactgttcgtattccaaacaaccgtaatatcagatggcgcaggcgcggaagggctagccttaaatccaggatatcttgccgggactttagtactgaccagataattttccacatttttgactccatgctgttcaaaagaagcacgtattccggatttataaagagcctccggagtacctttcatatcccattgctttaaggctccttccgcccgtaaaaagaaaacttcagccgcagtcatccagatgtaaggtgttccttgttgtatattaggtttagacaacccctcgtcacctttaaaaatatctccattcttatgtccattacgcaaccctcgataattgccattagaagacaacgcaaaaaacacagctctacgaggatcctcaaaaccattcaaataagcatccatagtggcacccattacatcctcttcgtaaccttcggcactactaatactgtgaataggattgttataggtaaacgaaaggttagaattggactgcattgtcggattgttgtcattactttcaatcaccccatacggatgagcaactgctgcttcagctattttctgagcatcctcataaacagcacttatacgcatcgccaaacgtaatttcagagaatttgcaaaacgaatccaattcgggatattactattaaaaatcaggtcaaatttaacaagggctttagaactcggattagcctgatcaaatttaaccaagatatcaatggcatgatcaagttccttaaagaatgattcatagatagcctgttgtgaatcataagggacgggatttgtcaatccaaatttcaagtagggtaatggaccatacatatccgtagctttatgcatagcttccacctttacaatttcaccaacagcaaaaagaacagatgtagaatccactttctgacgcagaatattccaagaagacaaaaattccacaaacgcacttttaaaaggagcatccttccattcatcagaaatagcgtaagtagtaccatttgctccccctccccagttctgcgttcctgcaaaatatccagaatacatattaccaaaaaggtcctccgagcgctgaaacaagttaacatcttcaggaactaccctacgctgcatcgtcgtgagataactaccccataaattatctttgtctaattcttcttcctgaattttatcaggatccagattaatcgtatcagacatacagcttcctaacaaaaaacaggaaataagcatcaggaaacaaatatgtgagatgttatagattttgtttttcattttcttctttttaaaaaattaaaatcaaaagttaacttttacaccaaaaccgaaactacgcaaactaggaggcataaaataatcgaaaccttgataataagtccctgtattagccgtaagttccggatcgaatggggctttattgtagaacatcaacaggttatgtcccgtcaaagaaagagaaatatttaacttttctccaaaccattttgatggaagcatatatgataatgacatttcacgtaaacgaacattggttgcactatatacataatgtgccagcaaaccggtcttacctgaagcaacagttccataatactgttccgcatccagttttcctttattcaccactacacctttattatcacgtgcatctgctgtttgctgagacactccaaactgatccatcagagcctgtgtagccgagataacttcaccgccaacacgtgcgtcaatcaagaaatcaagttccagccccttccaagaaaagctgtttctaaaacctaaattatattttggagccgcagaacctactttgatgaaagtattttcttctgccgacacgcccccattagtaataagaatgtttccatgcaagtcctgtttcagtttagtcgcataaatgtcagacatactaccaccttttttcaaaatcattctatatgaatcagcagtggccacagaaaactctgtcggtgactttacggtcatacccgtagtgcggtcggttacatattcaggaagtaattctttaatctcattacggttcattgaataaatcaagtttgaattccactgtacaggtcccagatcttgattaaaaccaacactcaattcaataccccagttatttaccttaccggcattttcataagcaaaagcataccctgtactaggcggtagctcatatttaaacaattggttataagtgtttgaattataatatgttgctgcgatattcaatttattttggaacaaacgcaggtccataccgaactcgaatgccttggtcatctccggttttaaatgactggcaggcgtaaaattggcacttgttgcattaccattctccaatgctaccgtagcataaggaaggtatgcgcttggaggattaccaacttgtgcatatgatccacgaatcttccagaaagaaatgatcttttccggcaaaggaagtatttctgacaatatgactgaaagaccagctgaaggataacatacatattctttagatgtacctaccaatgtagaaaaccagtctatacgtcctgtgacatctgcataaagaaagttccgataaccgatttcagctttaccatagatggactgtgtctgggtatgtaattcggatttgttataattactttccgtagaaggtatattactcgggtgaaagaaattaggcacccctactaaattgccttcaaacgtatccgatttatatttctcatcataaaagctccctcctaaatttaccaacagatgataattttcaccgaacttcttatctacattcactaagaaatcaagataagttgaagtattcttatcttcttgattcatataatttccttgagattttgcgaataacccatctgtagatgcatacagtttacgttcgaaatcagtataagcattatcaatacgggcacgtccgataatattaagccaattggttatattccatttcattgacaatgaaatgatataacgatctctgtcggtattgaacatattacggttgataatccaatacggattttgcatacccaatccctgattaccataaggccaatattgagtcttgaaatttctgtcggcatcatatctttcataaacagcatatttatttatatcgtcacttggtggaaacaaataaattggtaccaaaggattataatacataccctgcccattactgttctgattattctgtttaatatagaataatcccatatccatactcaaaacattcttcacaatatcccaagaattacggaatgtaaagttgtaacggttgtatttattattgtcaataataccctctgagtttacagctccaaaagatatatgagtctgattagtttccgttccggtcgatacggcaatagaattcatcgtattgaaacctgtctggaagaagtccaatgggttatatgtagaaggtttctccaatttatctccccaactcttgaattcaccttccttacgtccgtatgtattctgaaattccggagtaacgaaaggtcttgagaaactagtgctgttagagtaacttattctaggctttccaattgcaccttttttggttgtaatcaatatcacaccgttagctcctctgttaccatacaaagccgctgcagaagctccagtcaaaactgacatactttctatatcttccggattgatattagatataccgtcaccatcagctacttcaacagactcataaaaattatcggattgtttggtccttaacccctgcattggaataccatccaaaacatataatgcattattttcaccaaacaaagatttcgttccacgcatgacaacacgggaagatccaccggttcccgatgaactctgattgatagtcacacctgcaatcttaccggaaagactatttacaaagttagcatctttcacttttgtaataccggctgcttttatttcctgcacattgtacgtcaaagccttagcttctctcttgatacccaatgcggttactaccacctcgtccagagcttgcgcatcttcactcaacacaatatccaacggggtcgcattttttaccgttaccgactgagctgcataaccaacatacgagaattcaagaatatctccaacggaaacattcaaagaaaatctcccgtccaaatcagtcaccgtaccgttagaagtacctttcaccaatacactgacaccaattaacggctctcccaaggcatcttttaccgtaccttttatctgaatagccttagcagtctggttaactttatttgatttagacaatattatttgtttatcaatcacagtatacgatatatccgtccctttgaatatatcatccagaatatcagtaatttttccggatttacttcttacagacacaatacgactcttttgaatcgtctcatcattatagaggaatacgtagtcagaagtctcctcgattttgttcagtacctgttctacagatacattactcatagaaatggcaatacgcattcgttgggcgtagctattttcagcagaaagctgtaataccactaggaaaagtagtgtaagactgatcctcataattaaaggaagttttagatttaaagcatatttagaacataatgcaataaatgaatgattttttttcatacatttgcggctaactaaagtttattactaaatgaactatggtttgattccggttagtgtttgcaagaccccataccgtgaatctgttttctgaggaagacagttgttggcagcaactttcttccttttttcatctttaatgcgtgtatctcataggctattctatttttaaaggttactactaatacaaatccactataatttttttctttgtaaacgtattatcagcttgttgctgagattcttcaattttccatttcatttttgcagatttagccaaataatccaatatctgcgacaaagtctcatcccggaaagtagcccgatatctatattctttttcacacctattattatattgaatatccacattgaaatgtcgttccaatctcttgaagatttcctctaacggcgtatttctaaaaactaactttccatctttccaagctatctttccataaacatctactttattctttaccgatttctgactctgtttatcgtaaagcaattgttctccgggagtcaaaactattgtttcccgattgggggttatcacatttactttacctttctccaacactgtttctacataatcgtcattttcataagcgtttacattgaattttgtaccataaacatagacactcaatccattccgggtatttacataaaaaggacgttcttgatctgcctgtatctcaaaataggcctcccctttcagttctacactccgattatcttttttgaagaccgtaggataacgtaaagtcgtaccagcattcagccacaccacagaaccatccggaagctcataacgtatcaccgaaccggtagcagccgtaatttcggcatactttacttcttcttccgctccagcaaaatataaatatcccagaaccaaagatgtcattaaaagaggaatagccaataatgccgcatatcgcatcaactgactataaacagtcttttttctttctaccttatttatatcaaatatcgctttatgataggccgccaatgtatcgatggactccatttctctaatatcatctcccaatgcctgtgctttgcgaaacaatgattccggattcatattttctttcaaaatctttatctgttaattgcaattatatttatagaggagttct

SEQ ID NO: 11933 - DNA, 512 bp, Unknown
  gut microbiota DNA sequence
agtgccatttggtcgtcagcggtgggtgtggcgttctgttgttgcagcctatcggtcagttccgctacctgccgcttcaagtcctctttttcctcgtccaccgccggagtttcatagaacgtgcttaactggcggttgatgtcccggtaagcgtatgccgaagaagcaccgccgcccctttggggcttcgcatcctcttccggcatcaggtcgatttccgcttgcggttcttccgcttcatcgttcccggtgaaaccgaagtcctgcaaggactgtatcttctcctgctgcctgcggcttatcatcgcctgttcgtaagccttttgcttgtcggctataatcccgtcctctgcgggcaggggtatgtcggcgttgaagccgcccacgctttccacgttcacgtcctctttgccggagggtgcgaatatcaggtacatgcacccggcaaaggcaaggaacatcagcgggaagactatcattttcctgcgctgctgcacctgctgcggggtaag

SEQ ID NO: 11934 - DNA, 608 bp, Unknown
  gut microbiota DNA sequence
cccggcgaagcatcgccatgtcctttacctgaacgaccgggagaacgcccgtttcctctcgcagtgggagcagtcgggcgtcacgagcaagtcccggttcatcgctgcccgactattcggcgagccgttccgggtggtgaaagtggataagtcggcggtcgagtattgcgcccggctgaccgaattttacgcccagttcagagccgtggcggtcaattataaccaagttgtaaaggcgttgcatagcaatttttcggagaaaaaggcactggcttttctctataaactggaaaaggcgaccactgaattatctatgttaaaccgtcaggttatcgacctgacaaacgagtgcaaggaactatggttgccaaaataagcactggcggcaatatgttcggcgcactggcgtacaaccaaaacaaggtggacagcgaggaagcaaaggtgcttttttccaacaaaatgctgttgagcgaggacgggaatttctctatcggcgagtgtatgcgcagctttgaaatgcagatgcccgtccagctttccaccaagaagccgatacttcatatttccataaacccgcacccggaagacgtgctgaccgaccagca

SEQ ID NO: 11935 - DNA, 1285 bp, Unknown
  gut microbiota DNA sequence
atgtcccatgttcatgcaggtcgtttcaactaaagtaatgtcgtatattccttcggctgtccgtttggttaacagggaaacatcgtcaatggtaggatccggaaaagtctccggcactagccaggctcccgcaaaagcatgcccttgagtgatgataatgagtgcattcagaccgattgcttccaggcaggaagcatagagcaaggccatatccagacaggttcccagtttttgtgccattacggagtcggctagccgtacacgttgcccatattcctcgaagctggcggggatggtgctgtatataatctgttgttccgtgatagccgtgtagatggcggccatctgtttccttacccggtccggagtgcggctttgatattcgtcgagggacggattatcagtccattgtcccaggatggaagcggctctcttgatgattggcacaatggctgtatgattgggggtgatgaaagcggccagcatttcgggcaatacattgagccctccccattggtcgtatgccagaatgtcgatagggtaggtttggcagaatacggattctgcttcggaagtaatttcaattttcagattgccggataaacgttcggtcagctgtgtgaaatagttggcggataaagtgagattgaatgacgacaggcatatcgattcattgggcggaatctgtgccacagctatcggagcggcgtttccgaaagtcggttctgtcgtgatttgtacctgaatgtccttcagcggggcaggcgttgtattctcaatagaaagctgatgaatgattgatgcaccgttttgttgtatcgcaaaattaataagcggtaaatagtcgcattgcaccttgactttgtccaatctctcgttcatggcaaaaactgtataaattaaagattgcaatattacaaaaaatacggatataattctcttttcttctgccattcttttgtcaatcaagaaaatattcctacctttgcgcccgatttatagataatataatgtcttatttaattaaagtattaaacaatttatttattaatggaaaacttaaagaacgtagctcctattgaagacttcaactgggatgcttatgaaaatggcgaaacagtaaccaacgttagccacgatgaactggaaaaagcttacgacggtacgcttaacaaagtgaacgaccgtgaggttgttgacggaaccgtaatcgcaatgaacaagcgtgaagtagttgtgaacatcggttacaaatcagacggtatcatccctttgaatgaattcc

SEQ ID NO: 11936 - DNA, 5631 bp, Unknown
  gut microbiota DNA sequence
accccccttcaaagagttaagggaggtgacttgaaatcaccccctttgataaaccagggtggtgtttcaccccagtggtataaccaattataacaatcattgatatgaccatcacacttcgacaaaaagaccttgaaaacgacaacaagagcctgtatcttgacatctatgagaatggcaagcgcaagtttgagttcctttccctctacctaatccctgagattaaccaagagacaaaggaacgcaacgaggctaccttgaaacgtgcgcaggagattcgtgccgagcgcgtccttcatcccgagaccattcccgagaaaggtcacttgatggttgtacccgacattcccaacgatgactcacccgaagtcattgactggatccagacttacatggagtggatggacggcaatcccgaatattccaagaggactgtcgagcagactcaataccttcaagaacgcatgaaggagtttctgaaagccaaacgcagaccgcacatcactctgatgaagttcgataagacatggttcaaggcattctttctttggctgaagaatgactatgtacctcagaagtatgtgagagtcaaggcaaagccgttgagtaatgccagtttgcggaacatgcagcaacgcattgtcgcagtattcaacaaggcagtcaagactggcaagttgaaggcaaaccccttctatcagttggagaaggaagacacaatctccaagccaaagtctggtcacaagctgtaccttacacccgatgaactcaaactcttcatggcatccgaagagactaacggagtcagggaaacccagttggcatttggcttcgcttgccttacaggactacgcatcagcgacataagggctttgcgatggtcaaacatcatgaggaacgaggtaacgaacacacttgtaatcgtccagaagaagaccaaggaactcaatgccgtcccaatctgctcaaccgcagaagcatggatgccacccaagaaggatgacaaggttttccaccttcctgcccatgccaatgtggatgcagctctcaaacgaatagccaagaaggtaggtatcacgaagacaatctccttccatacctcccgacatacctttggcacattgatccaagcggctactggtgacatcgagaccaccaagaaactcatgggtcacaagtcgctcaaatcaaccgcagtctatgcagacgtgctgactgaggaaaaggtcaaggctatctccaataccaagacggtattcaggagtcgcaagccacacaccgagaacaagaagattccacgaaccaagcgaacggcagcgaccaacacgcaccctcgcaaggtcatagatatacaggataacgaataacggctaacgagccgattcaggataacaaccagtttcatttcatcaaaagcagtgccctgattcaaggtagtggtttccgctacccttaggggcttgctatctcaaaaccaagcattcaggataacgtaaacaactaaatatcaagattatgaataagactattgacaacgagactcttcttttgaaggtagagtcatttgagcatcgcatcgaggttctggagaacactctcagcgcagccaaggaggtattgacacttgaagaagcagcccttttcatgggtatatcaaagagcagtctctacaagatgacccatcgtcatgagcttcctttcttccgtccaaacggcaaactcatctactttgagaaggctgaacttctgaagtggatgcgtcagaaccgcagcatgtctgaggctgagaccaaggaggcagcagcccagaagctgaatgaacttgccaaccactaatcaatgagtattatgaatcaggatttcaatcaacagcagtacaacgacaaactggctcaggtagccagccttgccgttacctatgccaaggatggcacaggctatcacagtatgaaggatgccttcaatgaactgtgcgagatttcacatgccaacaagggcattgaccaagaaaacactatcggcagacgaaccctgcttgtgcagagtgtctgcatcaaggctatccatgcgctcactccataccagaacgagcgacttgaacagcagctgaaggacattgcttcggactatcccgagcatcgtcacctgcatttccgcagatagtttcttctttcccttttgtcatatcatagacatatcaatgagagttaccgcttacatacgtcagaaagatacatcgaagaacgaccttgacagccgtgcttcggtgtacttccgtgtccgtgacaaagggcttgatgtcaagtgcgcaagcgaacttcagatcaatcccaatcactggagccaagaacgacagggctacaagagccgtgtcaatcttgtggatgacgataccagaaacctctttgactcacaggtcaaggagattacaggtatcataaccagggaatactatatcggagcaaactccgactggctaagacgactgatatttgcctatcaccaccccaatgcctattgcatgggcagtggcatggcggtaagcaaatcctttgtcatctgggcagagaggtaccttcagaacaagcatttcggcaagcatcaggagtgcaacacccgatgcctgattgacaaggttactcgttttgaggatgaacacaaacacccgatgaacattgacagcatgactgccgatgatcttcgtgtgtttgcggatttcctgtcttctgactatgacatatctatgaataccatcgtcactaacatgaccttgatgcgtaccgtctgcaactgggtacgaaagcagggagtcacaaacaatgaccccttctttggctatgacatgcccaaggcactctatggcactccatatttcctgaccattcaggagcgtgaccaagttctggatgcagacctaacggatgatgcagaacttgctgagtatcgtgatatgttcgtgtttcagtgtatggtcggatgccgtcatagtgatcttgtgaccttcacccccaagaacattattgacggtgttctggaatatatccccatcaagaccaagggcaagttaggtgacgttgtaagggttcctcttatccccaaggctatggctatccttgatggccatgaccatggtgatgatgaaccaatcttccccaagcattataacttcaagttcaacgatgctatccgtagaatcttgaagcgtgccaaggtaaatcgtgttgtcactgtgattaaccctaagacacggcttgaagagaagaagccaatctcagatgtggctacctctcatcttgcacgaaggacttttatcggtaatctttaccgcatggtcaaagaccctgatttggttgcttctatgtctggtcatgccaaaggcagcgttgcttttgcccgataccgagtcattgatgatgacatgaagaaatccctggttgaacttatccagtgattctcttctttttgatggcatattccttttccctttattcggttacatttcaataatatcatagactatggacgataaaaaattacatcgttgcttcactttctctgaagagcagttgaagcatcttcgaagcaagaagtacaagattgaccgtatggaatgcttcatgtcgcttgtggatcttgccgagccagttccaaaacttgtgcaaatcagcaagaccaagcaagtagaaatcttggcaggtcaagttatggttgacaatacccaacttgccaaactctgggacaaagaccgcaagacggttccaaagctgttggatgctatggaggctgtgggcattttctcttctcaggaagtggaagataaccgcatctacacccttcattgtctctcaggctggtatgttgatgccaagttcgtgtcgaatgcctttgccttaaagcgcaataacgacagtacggcaatcatccatgcggaagttcctgcctccaaggtcatcatcactgaggatcctgatgacaagaagaaggacaaggaaggttctgcttctgccgatgacaaatccaatgactctgccgagggcaacaatcctcagacaactggcaatgtgtcgcaccaatcaccacaatctaatgatagtggcaatgtgggtaagtctggagcagatggcaacaagtcaccatcacctcctgaaaacaattccccgcagtctgctgacagcccttctccccaaggtgaagccgatggcaagcagaatgaagggaagcagcatgagcagataccttctcagcaaggaggacagcagccacaacagcctaacggcaatcaaagaccgcctttcaacggctatcagaagcctaacggctactacaaccagaacggcaacaaatagccgtctgaggactcaggaatgcgacctgcaccgccaaaccatcccaaaggacgtttaccgatacaggacaacacggcaagccgaaacgactttctaagccctgacgggaacttagcaggtaaaaggaccgatttttaagaggtacttttcgagaaatccttttgtactacattatttgtgaccaaatttatgcagtcctaaaagtttctcgggctactcgcaggctcgcagacctatgtccttcttttttactgatttatattcatccctttaatcatattcaaagatatggctaagaaaaagaagattatcaagaagacacccacaagggtgcattccttccgctgtaccgataaggactggaaggaactgaaaaaactcgctaaggaatgtggtatgagcataggcaagtatctcgttgagactggcaagaagcatcacccacgtcagcgactcactccagaggaaagcaaagccctgaactctctgactgaggcacgtaccgacttgataaaagtccgcagtaagttgcacgatgcttcacccgaggaaaagcagaagatgttcagatctccaaagttcatgaagtggtggattgaagccgttgaacgactcatcaaacactggtatagcattgaagacaaccttacttctcctgtactgaccaaagttcaagaagacgaatgattatactcgcaagaccagtagcctatggcggcaatgccgcaaggtacgcaatggagaaggaggatgcaaccgtggtcaaggtgaaccacatgcctgactatctcgatgccaccgaaatctggtatcggatgaagcatcactgccagttgcatcaacaggacaggactgttgggcgaaagttggaacgcttcatgaccacgtttgtactctccccatccaaggaagagtcagagaactataccttggatgactgggcaaacctcgctgatgaaggattggaagctttggattcagtcggacttttacccaaaggctttaaggagaaggtcaagaccaatttccgcaattctatgagtgttgctgccttgcatcgggattccaagtctggaacccttcacctgcatcttgactgttgccgtgtggataatgacggcaagaccaacgatgttcacgatgttcacatcagagcaataagggctgcggaaattatcaacgcaaggcatggttgggagcaacctcaggaggttcgtgaaatgcgccaacaagatatagcggagttttgcgaatatacccttcagaagatggatagtttcgacat

SEQ ID NO: 11937 - DNA, 4244 bp, Unknown
  gut microbiota DNA sequence
caagaggataaattgaattgatagaactcacctaaaatgggaaacaaccgtcacaagaaactttggtatcgactacggattctggaataatcgtttatccggttctattgacctttattggaatacaaccaacgacttgctcatgaaaacggaaataccggctaatgccggctataactaccaataccaaaatttcggaagtacctccaataaaggtgtagaactatctatgaatgcgatcattgctgacaagaagaagtttggactgaattttaatttcaatatttcctacaaccgtaacaggattgagaaactaaatacggacaatccgtggcaaagtagcggttggggcggaagtaccatcgcaaaatatgaggatttccgtgtagaagaaggcggacgacttggagaaatttggggatacaaaaccaacgggttctatacagcctatgaccctgtaacaaatccggaaggcgaactaatcctaaacggaacaaactgggtattgaaggacggtctgaaagacaatagcgtaaacattacaggcggaagttatttccccggaggattaaaagtagaatgtgatgagaatggagaaccgatcaaacaaaagctaggtaacacagtagctccggtttatggtggttttggcttcaatggtcgcgccggtaactttgatttcactctcttcttcaatttctctattggaaataagattgttaatgccaccaaactagctacctcattctttgccggaacttcatacggttacaacctgaatgaagacttctgttctggaaaacgctacacttggattgatccgacaaccggctataatttaggcaaatctataagttcagacgcacttgcttactatggtggtgaagcaggaatcatatcacgtttgaatcaaatcaatgcaaatgccagcatttacaatccggtagccgtcactcaaatgcagttgacagactatgctgttgaaaatacctcttttttacgtgtgaacaacattaccatcggttattcacttcctaagtcatggattcgcaaatgttatatgcaaaacgtacgaatctacgtaaccgggtataatcttttctgcctgactaactactccggtaccgatccggaagttgataccagcagcaaacgaaatccgatgactccaggtattgactatgctgcttatccgaaaagccgttcatttgtcggtggtattaacgtaacattctaattctaacacaaaggagattattttatgaaaaagatagcaaagatattatttctgtccgccagccttttctgtactacggcttgttcggacttcctagaccagacagcaccatccgaacaacccggagaaaatgtatttgaatctactttcttcacagaactggcagtcaataagctttatggacttatgacacaagatgccacatactctcgtgacatacctatcgttctgagtacaaattcagattgtgaactggttgatggtctaggaactgatgccaacaatacaactcacgaacgtggtgcaatgaattacaatgtaagtccgggatggtcaaaactgtccaatgtatgggatgctatgtattcaattattgaaaatgcaaatctgattgttgaaggaattaataagagccccttattaacgtcaggtgacagtgaccaacgggcgatggaacgtttcaaaggtgaagcgttgacaatacgtgctatggtctactttgacttaatccgcctttttggcgatataccttataaaagcgagtcttccaacccggatttgggcaatgtttacttagggaaaagtgatcgggatgttatcatggatgagctgattaaagatttggaaacagcaattaccctattaccatgggcaggagaagtttctgcatacactacagaacgggtgactaaaggatatgcccattccttattggcaaatatcgctttgtcaagagccggatggagtattcgtgaagaacagaagaacggctatgttaccgcagacaaaaactcggatccggtctatcctacccaacgttgcgatgacgctacccgcaccaagatgtatgaattggcactgaaacatctggcaactgtcatagataatggcacccaccagttaaatccatcattcgccaatgaatggtatttgatcaaccaacgccaattggatgaaacttatcgtgaaaacatcttcgaaataccgatgggattaggagtcagtggcgaactaggctacacagtcggcgtacgaatgaacggttttagtactttatacggtgaacaaggaaactcctccggtaaacttaagatgacagctccatacttctggtctttccaggatggcgaccaacgtcgtgacattacttgctgtaacctgcaattaaaaacagagaacaatgttctaaaagaaaaaatgctcggtaatacaccattcgccatttactgtggaaaatgggacattcgccaaatgaatgaagaatggcgtcaagttgccatcgctacaggtaaagccaaatggatgtccggtattaactgcgtccggatgcgttattcccaagtattattaatgtatgccgaaaccctaaacgaattggccagtggtcctgacggaacttacaacggagcctccacccgtattagtaccgctagaaaagcattggaattggtacatacacgtgcatttgcagatgcaaacaaatctgaagccgaaaattatattgctgctatcaatggaaaggaagacttttttgaagcaattgtagacgagaatgcttgggaattggctggagaaggtttccgcaaatatgacctgattcgctggaatttattgattgataaaatcaaacagtttaaaagcgattatgaaagccaactgttttctagtaagaactcatatccggaaaaaatttatttcaactattccaatgacgacaagacgagcatagacatcagcagcgtcacttggcatggtattcctagtggaaaaagtagcagcgattatgatgacaacaacaatttttggggaaaggaacggacagataccaaaggacaagctcagttgacagtcaatttaccttccatttccagtggactagtaggagataatgtagcagttatcaaccgttacttactgccaatcgcatctactacgatctccgcttctaacggaatgttacataattcatacggattttcagactaatacctaatcaataagtaatcatgaaaaaattaacacatattataaaaacaggagccttcgcactcctcacttccctaagtgttgccgcttgcatagacggtaacgactgggaaaccattagtggtaaccgactgttcggtactacaagcttctctgtggaaccggctgcaataacagctgaagctaaatgggacgcaacccccaataccgaatattacatcatcgaagcaagcagggaacaaatggatgataatatgccaatgggcagtgcttcaggtagtatcgtatacggtgaagaccaatcaatcaaaaaatcgccttataccctgaccggtctgttaggtgaaacgacctattatctacgcatcaaatccgtagcaagtggaaaagaatcccgttggatatatttggaagacggaacattcgaaacttcgaaagaagaaatattaggtatcattccaagcgaaaacattacggaagaaaccattttaattacttgggaagccggtctggaagtaacgcatttcatcatcaaagcaggaatagatgctcctataacaaaagaaataacttcggaagaagtcgctgccggacagaaactgattgaaggattactgccgggaacagaatatacattctccatctataatggagaaattaagcgtggcgaaactacagcgatgacagtaatgcccgaaatggtagatttcacaagtgttacgcctaccaaaacatctgtcagccttgtttgggatcccgaagctatccaaaccggttccacgacagtttctcattatgcatggtgcggaggagacagaacaccaagcgtcagtgatcattatactgcattaacagctgaacaaatcagtcaaggacaattgaattttgatggacttgagcctagcacaacttatacagtagctttaatgagaggaacgtacgttcgtgcactgaccacctttacaacagcaaaaggcattcctagtggatatacccttgtttcagttactgatatcaccac

SEQ ID NO: 11938 - DNA, 9775 bp, Unknown
  gut microbiota DNA sequence
ttattctactatgtaattaacgtaaaattttatttggacggcgctttctttacccatttatccagccattcaaagaatgtgcgctgccataacactccattctgtggcttcaatacccagtggttttcatccggataaatcagcaactctgcaggaacaccacgcatcacggcagcatcaaaagcagccattgcctgattagccagaatacggtagtctttttctccatgaatacagagaataggagtatcccatttctctacgaataggtgaggagagttggcaaacgtacgctgtgccaccggattctgtttttcccagtatgcgcctcccatatcccagttggcaaaccatttttcttcagtttccagatactgcatttccatgttgaagatgccatcatgagcaatgaacgctttgaaccgtttgtcgtgatgtccggccaaccaatatacagagaatcctccgaagctggcacctacgcatcccagacgatctttgtccacatacggctcttttgccatttcatcgatagcagtgaagtaatccttcatacactggccaccgtaatcgccactaatctgttcgttccattccacaccgaatcccggcaaaccgcgacggttcggagcaacgatgatataatcattagctgccataatctggaagttccagcgataagaccagaactggcttaccgggctctgcggacctccttcacagaacagcaaagtcggatatttcttgttcggatcaaactgtggaggataaatcacccatgtcaacatctgtttaccatctgttgttttcatccagcgaccttccactttacccatttccagctggtcatagatttgtttgttctcctgtgtcagttgagtggtagaaccatccagtgccacagtgtaaatctcatcacccatactcattgaatgacgtttcgcaatcagcttatctccgaaaagagctaccccttcgtaatcatacatccctgaagtaatagcctttaccgaatcatttgccaggtcaagcgcataaatttgtgattctccatgccatacacctgtgaaatagatcactttagcatctgctccccagacaaaagcatctacattcgattcgaacgctttgctcacaaaacgcttctcgccggtttccaggttcatgatgaacagacggttcagatcagcttcgtatccgtcacgttccatgctctgccaggcaatatacttcccatctggtgaatattgcggattggtgtcgtatcctttgttctcttccgttatattctccgttttcttcgtgttcaggtcataaatataaatgtccgaattcgtagagattgcatattccagtccggtttttttacgacaagtataggccaccttatccgaagtcgtattccaggcaagttgttcgatactcccccaaggtctcatcggactttcatacggttcgccgtccaaaatgtctatgacattggaaatactgtttccatcaaaatctgcaatgaacggatgcggtgccatcgtgacccattcatcccaatgcttgtacatcaggtcggtaacgatgatacccgtagctttaggtaaatccggatacttatctactgtgctgtctttagtctttacttgtgagataaacaaaagctttttgccatccggtgagatggaaaatccctcgatatctccgtcgtagttagtcagttgtctgcgttcgctaccatccggattcatttcataaagctggctactaccgctgtcattgcttaggaatgctagtttgctgcccccttttatccaagtcacctcattctcttgataaggagtgtgggtaatttgtaggttatcgcttccatctgcattcattacaaatacttcgcggttactcttgttctccggcacactgtaatacgctaccgtatacgcgatcttctttccgtcgggcgatacggcgaatccgccgatacgtcccatagcccaaagtgcttcgggagtcatgcgcttcccttcgatcttaatatccgatttctcgataagcacctgatctgtcttgcctgcgtctttggttcctccgcaggcagctaacaacattgctgccgacatcataaataaattagcttgtctcatatattttataaaatgtttattttcttgcgaagatagtgaaaaaagaatttagattttctttttctgccagtttcctttcttcatgtattgataacagaagagcagaatgaaagtaccatacacgctttccgttgtccaagaaaaagcgacatccattttcagatagagaatgaagtacgtggcataggctacataaattgccaatacgcaaagttccatagccaatgcagtccgcgtatttcccgtaccggataccgattggaaatagacattggcgggtactaacaccagataagcggagcacaacacccataatgaaggtacagaggcagcccttagatccggcatatccgtgtaaatactcagaatcaggtcgggaaacagacagaagaaaatcaatattggcaatacgaatacgtatccgatacggatatgttgtctgacggtccctcgaacacaatcttgttcgcccgccccgatgaggttgctgaccagcgaaccgcaggtggcggcaaaagccattgcaatcataaacggtattcccgatacgttgcggataatattggcgatagccagtgagcgttctcccagatgttctacgaacaggaagaacatgaaccaggtggacaaagaaacaaaattctgaatcatcgtccacaccgaaacattgagaatccgcttcaatgtctttctctggaatttgggtaatatattcaatgcatatttcttgcagtcaatccgcttccaggtataaatgataaagaaaatcaccgataccatttccgccaatgaagaaccgatagcggcaccggcaattcccagttgcgggaaaccgaacttaccgaaaatcaggatatagttgaataccacattcgaaagcaccataacaatggagttcagagtcagtgtctttgtttgtgtcgtaccaacaaagaatgcacggaacatcaccatgacaaacgagaaaaagaaaccatatacacgccaatggatataactttcggctgcatcataaatatgtggtgacgaaatgatattccttagaatatgtggtgaaaatacgatggacagcgtgaatagaatgacggcaacagccagcaggaaatagattccctgatagaagatcggtcctatttccttgtagtttccttctccgttacggcgggcaattaatatttgcgcaccgatactgaatccgaatgccatcatgaaaatagccagataatatacaccggcaatggcggacgcgcccagttcaatttccccgacacgtcccagaaaagcagtatccgtcataccgatcatttgctccatgatcagactgatgaggatagggtaggctattgtccaaatttgtttataagtatattttgttttcatcttatttcatttttagagaaagaaagccgggcaacccaagtaggatgtccggctctttcagaatataataggattttcttccttatttcttattctgtctttgctgctgcaataactcttgttgtttttgcattgcctccaggcgggcagcaaatccggtctttttcatttgtttcgggtctttctttttcgcttctaggatagccagcaattttgtttcgtcagtcgttttgcgaagcaaaatcatggtacctacgctaatcaaggtcgacacgaagtagtagtagttcaaacctgacggataatcgttcaagacaaacaggaacataatcggcatcagatacatcatccatttcatagccgccatttgcggttgcgctccattatcctgcatagacattgtgtacttcgtattcagaatattagtcaccgtcatcagcaagcagaacaaactgaggtggttgcccaagaacgggatatggaacgggaatgtgatgatagcgtcataagtagagaggtcgtccgcccacaagaaactctgttgacgcagctcgatagcactcggaacgaacatgaacaaagccatcaggatagggaattgcaataacatcggcagacagccgcccatcgggcttaccccgtactggctgtaaaggctcatcacctcctgttgcttcttcatcgcatcctcctgcttcggatatttcttgttgatttcgtcgattttcggtttcagtacacgcatcttggcagatgacatataggtcttccacgtagccggataaaccacaaccttcaccatgatggtcagaatcaacaacacgatacccatgctcaagccccagcccgacagccagtcgaatacgttaatcgtgataaactgattgatccagcggattaacggccaccctaagtataccagtctgttcaattcccatttttcgtcacgtcccttatccaatgctttcaacgttttgaagtggttcggaccaaaatagaaatacatctctgtcggttctttacccgatggatcgaagaaagtattcatttcagcagaataatctttgatatatccgcttccctgttgctccattcttgatttcacggaaaccttgtcgaagtcctgctcggcaatgaataccgatgaaaagaactggttcttgaaagctacccagtcaatgcggctttccagtgtcttgctgtcgtctttggctgccgacagattatccacatcatctcctttgatcttataagtaagctctgccaagcggttttcgtaagtgaatcctttttccagttggcgggcacgctgtgaccaatcgatatccacataattggtgtttgccaatttgtctgtcatacctgtcgccttgatttcaaagttcatcagatagctgtccggtttcaacgtatagataaagtcgatataacttgcgctatctgccgccagacgcatgaccacactgctatccgtcttgtttgccacttcaaagaaataatcctttgtctggatagctccttccttattatagaagttgaaattcatcgatgcatcgtcaccgtcaaacagtacaaccgatgtcttcttgtcctgtgccatgtaatccttcagcatggccgaatagacacgtccgcctttggttgtgaaagtgatttccgctacattgttttggatactgactttagagtctgttccctgcaatgcattgaaaaacagggaggatgaatcggcagcagatgccgcctctttcttgctgttagccagtgctgcctccgtttttgctttcagcgcctcttcctgctgttgtacaagagcgatagaatcgtagtatcttttttgcgcagctatctgctcctcactgggacggctcagaaagctgaatcctactaacaatatacctattaaaacgagacctgtgatggtatttttatccattcttattttaattacaaattactaattacttttcgttttcgatagccgctttcacaaacgccacgaacaacgggtgcgggttcagtaccgtgcttccatattccggatggaactgcgtacctacgaaccatttcaatgtcggaatttctacgatttccaccagatccgattcgggattgatacctacacatttcataccggcagcttcgtactgttccttgtagtcattattgaactcgtaacggtgacggtggcgttcctgaatatgttcctctccgtatgcctgatatgctttagagcctttctgcaatacacactcgtaagcacccaaacgcatggttccgcccatattggtgatcgctttctgctcttccatgatatcaatcacgttgtgcggagtcttctcatccatttcgcgtgagttggcgtctgtatatcccaatacgttgcgggcaaattcgatggcgatacattgcatccccagacagattccgaaagtcggaatatcatgtgtacgtgtatatttgatagctacaaacttaccgtcaataccccgttggccgaatcccggtccgatcatgacacccgccatacctttcaaggcttcacccacattctcgtccgtcagcttttcgctgtttacgaaatgtacttccactttgcggtcgttgtaagtaccggcctgcgacaatgcttcacgaatagatttgtaagcatcctgcaagtcatattttccgaccaatgcgatgttgataggctctttggtctcagctgcgtggcggcgttccaagaatttacgccatggaccgagccccggagtttctcctaccggcagtcccattttttcgagaatggtgctatccaagccttgtgcctgcatcaggataggaacctcgtagattgtttctgcgtcgatagattgcactacggctttatcatccacattacagaattgtgccactttcttgcgcaatccgtcgcttaacgggtgttcggcacgcagtaccagtacatccggctggatacccacactttggagttccttcaccgagtgttgagtcggtttagttttcaattctccggcggcagcaagatacgggacataagtcaggtgcacgcaaagagcattcttaccgagttcccacttcaactgacggatactttcgaggtaggggagtgactcgatatcgcctaccgtaccaccgatctcggtgatgacaaaatcgaatttgtatttgttaccgagcagttttacattccgtttgatttcatccgtgatatgcggaatcacctgaatcgttttacccagataatctccacgacgctctttgtcgatgacgcttttgtagatgcgtcctgtagtaatgttgttcgccttagtcgtttgtattcccagaaatctttcataatgtcccaggtcgaggtcggcttcgtgtccgtctaccgttacatagcattctccgtgctcgtatggattcagtgttcccgggtcgatgttgatgtacgggtcaaatttttgaatggttacattataacctcttgcttgcagcaacttaccgatggaagatgaaatgataccttttcctaatgaagaggcaacaccaccggtgacgaaaatatactttgtttctcccacagctataactgtttttaaaattgtttacttagtagtattcttatgaacttaaaaagcgcaaaattataaaaaaaagaggaagaatgcagactttcgtctctacaattttattaaaaaatgcaattttgaaagaatcctatgatttctgaacaaaataatgtagctttgcagcctaaaccataaacaaatatgatgagagttactactttatattcagtttttatcctgttgttattttcgttatcgctttctgcacaggaaaatgccggcaattcttcacttcccaaatcttcaacggtagtggctaaggccaaagtcataaaagcagatacactttcggcagaactccagaaatatttaatgttaaaactcaacatgtccggtccgacacccaaattggataccgtttcttatttatataataagtatatagcccaattggattatctgaatgatccgtctgtaccgccacgctatattccgtcggatcccgactattttcgtctgtttactcctttggcatattactatgccccgatggaacagtattcaagactggaatggaaacctgtgcagccggacactacccccaaactgacatcggaacttttaccatacgacacattggtgtttaccaaaacccgacgtgccaatacattagtcaataacgctttgatggatctttatctgcaacatccgaatttggttgttactacggaagaccgtatcatgagccgggatgtttttcggcatgatgtgaaaccgaagatctcccccaaagcgaatgtgattcatctgtttcaacgtgaagatatgaatgataatgtaggaaaggccgatatcaagatcagccgccccaactggtgggttgtaggaggtaacggttcattacagatcagccagaaccatctttcggacaactggtataagggaggggagagcaacttctccggattagctacttttctgatcttcgcaaactataatgacaatgagaaagtgctgtttgaaaaccagcttgaagcgaaagtgggtatgacttccactccatcggacgaataccataaatatcttttcacaaccgaccaacttcgcatctataacaagctgggattgaaagcttttaagaattggtattatacgatctcctctgagttcaagacccagtttttcaatggatacaaggccaacagcgaagatctggtttcagctttcatgtctccggccgatttggcggtcagtattggtatggactataagctgaacaaaaagaaattcaatctttctgtcttcatggcgccattgacttataacctacgttatattgacaactcggaagtggatgaaacgaaatttggtctggataaaggcaaatgctccaagaatgacttcggttcacagttgcagtctacgtttaactggaatatcatctctgccgtatcattggaatcccgtctcaactatctgaccaactatcattgggcacgtgtggaatgggaaaacacgttcaacttcgttcttaaccgttatctctctaccaaactttatattcacacccgttttgacgatagctccaaacccactgaaggtgacagctatttccagttaaaggaactgctcagcttcggtattaactacaagtggtagccttcatttgtgaaaaaaaaacattcttttgttatattgtttgatatataatatttatatttgcacgaaatttcgttgcttcatttaagaagtagcaagaaatatggggtaaatatacatgatcattagcaaaaatgacgatcaaaatcttctgccaacaactgtgattggcagaagcgtagcacgctcaaaacgctggctagtggcggttgtacgcatatatcacgagaaaaaaacgagtgagcgactaacgaaaatggggattgaaaatttccttcctattcaacaagaggttcataaatggagtgatcgtcgtaaagtggtagatcgcgttttacttccgatgatgatttttgtccatgtcgaccctcaagaacaaaaagaggtgttgacgctgtccgctatcagccgctatatggtactgcgtggggaaagtactccagctgttattcctgaccaacaaatgttgcgattcaaatttatgctcgattattcggatgaaacgatcagtatgagcacatcgccgttggcaccgggagaaaaggtacgggtgataaaaggacctttggcaggtttggaaggagagttggtaaatgtggacggcaagtctaaagttgctgttcgattgacaatgttggggtgtgcatgtgtagatataccggtgggatgtgtagagccggtatctgaaaatggggatttacgtgagtgagtaatcaatctattttatagggggtatgggggattttactgcaaaaatgtaatgaaagtctgtaaaatagcagacagtctatctgacatcggtaacaagacagtgggtatatttatcgatgatctctctcaaaaaataaaaatccataacagtattatgaattgtatcttgtaaaagatatagtgtggaaatatatgtgtatatcgaaagatgaaagaatcttggtgtggtgacactcacattgaaatcctgctcattgcctttgtgctgatataatcaatcagataaatcaaatttcgaaatattattttattcatttatactataatggaaaa

SEQ ID NO: 11939 - DNA, 738 bp, Unknown
  gut microbiota DNA sequence
agtagtagtgctcgtaatgcttcacaaccggaactttttcttttccgcttgccagacacttgcctgtctcgtcctgtatttcccaacggagcagtgaaggctgcaagtccgtaccgttttcacggtcgtttaccacataaatgcgtgtaggcagtttctcgccggcatatagattgcgtccccacaactctgcactgaccaatacgggttgcaatgcgcgtttcaaagcgtaataagtaggatacggctcgatgttctgatagtcatacgtttgacggaaccatgtcattagtgcaaagtgcatgatacctgaagcctggtcgttggaacggcgtaatgtttctgccaattctcccgtgatgaatgcttgcgttttcaggaatgaggcaggatccgcccaatcataagcctcgtagccaatcaaggcataaggattttggtgaatgagttggtaggaacgggtaggatgtccggtttcattgttgggatagcccgtagacatttcctggctgatgagaggacggtcggccattttgaactgcttttggaactcaccgttgaagaaacggaagagcgagtagtcataccagttataataaccgtgcatatcgtcaatatcgccatcatcaatgctgttcataaagtcggcaccatatttcttatctttgttttttgcctgatagttggagtcgaagcagataggacgagtggggtcgatgcgtcgcatctctttcacta

SEQ ID NO: 11940 - DNA, 10436 bp, Unknown
  gut microbiota DNA sequence
gtagcggtttacttttgagtagaaaatgtcgttaactaattaaatatgctattatatgaagaatttatttatcgtatttttttgtctggtatcagttttggctataaaggcaaacggacaagaaagtttgtggaaaatacaggctgttgattatcaaggaacttattatggcgcagcagtagcgaatggcggtatcggtatattaccgtggaaagaacctttctccgttcgtcatgtcatgttgaatcatgtatttgatgctgccgctccccaagatgtgagccgtgtgttgcgaggaatcaacccgtttaatttgcaaatgcagattgatggacagggagtgagtggtgataatatctcgggatggggacagtgcatagatatgaaagccgccacgcacgatacgcatttcacttatggtggaaaagcggatatctcttatagtatctgtgccttaaggaatatgccttatgcgggactggtgcgtgtagaggtggctgcattggaagatatgtatttatcagtggaaaatcccattgaagtacctgatgaatataagaattccggttcgaaacaggtgagtgtgaatgtcgatggaaacgaactgaaaatagtacgtacctgggctttgtccaaataccgtgaacagaaagtgtcagcttcttccgcttttatttatgataaaaatccaaacctgcagcaacaatatgacggaaccaaccgaatcgctatttcattaaaaaaaggagataaattttctttcgctttattaggctccgtctgtaccggacgtgattttatagacccgtataatgagtcggaccgtgaagtgatttatggtgcgaaagaaggtttgaaccgcctgatggatggacaccggaaactttggaatgaactgtgggaaggggatattatgattgagggagatgacgaggcgcagcgtgccgtacggtttgcactttataatctttactctaatgcacgcaagggaagccggttgagtatctctcctttcgggctttctgcccaaggatataacgggcatattttctgggataccgagttatggatgtatccgcctatgcttttcatgaatcagggcattgcaaggacaatgatggactaccgtactgacagactggaagccgcctgtcagagagcattgagctatggatatgagggagccatgtttccgtgggaaagtgatgatgctggagaagagtcatgtcctacttgggccttgaccggagcttttgaacatcatatcactgccgatattgctatcgcggcctggaattattactgtatgagtggtgataaacggtggttgcgtgaagaaggttttcctttgatggagaaagtggcggaattttgggtaagtcgtgtagaaaagaataatgaggatggttcttattcgattcgcaatgtggtgtgtgccgatgaatatgctgaaggggtggatgataatgcatttaccaatggtgctgctatgcgtgcattgcaagatgctgctaaagctgctgcggtatgcggtgttaaagcacctgcaatctggaaggagatagcctcaaaactacggattccgaaattcgagaatggagtgactatggagtatgaaggctataacggacaggcaataaaacaagcggatgccaatttgctggtatatccattaaatctgataactcgtcctgaagaaatccgtaaggacttggagtattatgaagataaaatagataaaaccggacctgcaatgtccttctcagtgttggctttgcaatatgcacgccttggcgaaggcgataaagcttatgaactgtttgtgcaaagtttccgtcctaaccagttacctccgtttggcgttatttccgaaggtgcaggaggtacgaatccttattttgtaactggtgcgggaggacttttacaaactgtcattaatggtttttgtggtttggaagttacagataatggcatcaagcagcttttctcaaaactgccgaaacattggaagaagttgacgataacaggagtgggaccggatagaaagacttatgtccggatgcaaaaataacattgttaagtcttggtgtagtgaagtatacatatatacacactgtacgaaacattattcgttgatttctgctttcatttagcccgattgagactaaactttcatttattgacctgtttttaatacctgaaataagtgcaaacccctatttttgctgcagtaataacttagtattaacacagaaccagtatcctttactgattcatataatcaggtttgcatgaattttaaatgtttgttttgcggggcgcttattacactgtatgtcggagttgctgaagctgtcaactatgttccggaaaatatttcagcgtccatatcgttgaaagtgccgggaaatgtagctgaaaggtattcactgaacttgcagcaattggggaataaccgttcatcctatttattggaagcttctgaaagcattccggttacaatcactcagagggtggcagatgtaaatggaaaattacgggtaaatgtctgtataacagcactcgaagatatttattttaattatagtcaacggctatcaacaggctatcgccatgatgattgtcaattttatatgccgggtttctggtatcgccggaatctccgttcgcctaaagatgcgccttcgttccattcttcagatagttggttggtgcgtgaagacaggctaagcgcaccgcttacgggtgtttattcggaaaaagaaaaacactttgtgactgtgagccgtatcgataagtttgcagaagaagccttgagcactcatcgggaaggagaaattatcctttcaggtaaaacgtctctaggatttaccggatttgagaatcaagacggaataactgcgctctcttttggctttccttatcgtgaagctcccaagagttatattcgtaagctgacattggcacctgcggtagaagcttttcaattcctgaaaaaaggggagactgttctgctgacatgggagattcaggagaataaggctgatgattattctgattttatacgccatgcatgggaatatagttatgacacttatggacctaaacctgtggagactccttattccataacggatatgaagcaagttcttagcggattctttataagtagcttcgtagaaggacatccgttggtttataattcgggaatacatctaatgacggaaaattgccagagtaacgggcaggcggaagtaggatttattggtcgtgtgctccttaatgcattcaatgcttgggaatatggtcaccaatctgatagggaggatttgaaagcaaatagtatgaaagtgtttgatagctacttgaaaaacggctttactccggtcggtttcttcaaagagtcggtcgattttgataaaggctatgaagatcctgtgcacagtatacgccgtcagtccgaaggaatctatgctatgttgcactttcttgcttatgaaaaagagaacgggcgtcgtcatcccgaatgggagcagaagatgaaaaatatgctggatatacttttgcggttgcaacaggctgacggtagtttccctcgcaagtttcgtgatgattttacgatagttgacactagtgggggaagtactccttcggctactttgccgctggtaatgggatacaagtatttcaaagacaagcgataccttgccagtgctaagcagactgcggattatctggagaaagtattgatttctaaagccgactatttctcgtccacacttgatgccaactgcgaagacaaggaggcatctctgtatgctgctacggctacctattatctttcattgattacaaaaggagacgagcaccggcattatgcagacctgacgaagaaagctgcttattttgccttgtcatggtattatgtatgggatgttcctttcgcgcagggacagatgttgggagatattggtctgaaaacccgcggctggggcaatgtgtcggtggaaaacaaccatattgatgtatttgtgtttgagtttgcttctgtgttgcgatggctgtcaaaggaatatgcagaaccccgcttctcgcaatttgcagaagtcatttctacttctatgcgccaacttctgcctcatgaggggcatttatgcggagtggctaagcccggttactatccggaagttgttcagcacacaaattgggattatggaaaaaacgggaagggatattataatgatatctttgcaccgggttggacggtagcttctttgtgggagttgttcactccggggcgtgcggagtatttcttgaaatgacataaataggtcagaatatatatctattatattttaatttgattttgaacaaattcttttaattattgaattgtttgttttattatattttgcgttggttgcctacttttgctctcactcggttagagataaagtatttattatgagatttttaaatttaatattatggatttgaagaaagcattgtttgtttgcttgttgttgtactatggaacaagtgccaactccgctttacctgtacattctatggctggtaagacgaatctgtcggagcaggcgaaaggtattcgtattagtggtacgataaccgataaggacaaaaatcctcttcccggtgtgaatatacgcgttatggaagaaggaggcactggagtgataacggatatggacggacatttctatatggatgtgccgggaaaaagttccgtaattgagatttcctatataggatttaaaacccagcaaataaaagttggaagcaagattaactttgatgtgattcttgaggaagatattgaagcgctggaagaagtggtggttacgggatatggtagtcagaaaaaaatgtcggttatcggttctatcgaaacattgcagccaaagaagttgcaggtggggtcttcacgttctgttactaataacttggcgggacaaattgccggtgtgatagctgttcagcgttccggtgaacccgggtacgattcttctaatttctggattcgtggtattgcctctttctctggcggacagtcgccactagtattggttgatggaattgaacgtgatctaaatcatatcgacccggcggaaatagaatcgttctctgtattgaaagatgcttcggcaagtgctatgtatggtgtgcgcggtgcgaacggtgtgattgttattaatacaaaacgtggtaagataggtgctccttctgtgaattttcgggtggaacattctatttcagaacctacaaaacttcctgagtttatcggtgcagccgatcatatggcattattgaacgaacttacggaagacaggacacgcttgccattcagccaggagcagattgacaggactcgttatggatatgaccgggatttgtatccggatgtaaattggctggatcaaataacgaaagattacgcttactctactcgtgctaatttaacggtttcgggtggctccgattttctccggtactcattggtcggttcttatttcggtgagaaaggaattatggaaacggacaagacattgccttatgacaccggaatgaagctgacccgttataacatgcgtgccaatgtcgatttggatgttaccaagacgacagtactgcgtttgaatgtcggcggtttcttgcagacgcaccgtaagcaggcttttagtacggacaatgctttcgacagggcatttatgacttctccttttgtgcaccctgcccgttactctgacggaacaattcctatcatgaatatcaacggagtcaatccttgggctgctgtgacacaaagtggatatgatgtggttacggcctcacagattcaatctttgtttgctgttgagcagaacctgaaaatgatcactccgggattgaaagcgaaagtgtcattctcgttcgaccgctggaatcagagttcgataactagaggcaagaatgcgacttactatactattgctaccggtcgtgatatagagggtaacctgattcattcggtgttgaaatacggagatgattctttgggacatggcaataaaggtgaatatggaaattcgagggtctactttgaaggaacgctgacttatgcacgtactttcggaaaacatgatgtggatgcattgttcctgtataatcagcaaagttttgacaacggtagtgtacagccttatagaaagcaaggtattgcggggcgtctttcttatacattcgatagccgctatgtgacggagtttaactttggttataacggttcggagaattttgccaaaggaaaacgtttcggatttttcccctctcttgcagttgggtggcttatatccgaagaaccttttatggataagttcagaaatactttgagtaaattgaaattaagaggatctataggaaaagttggtaatgatgatattggtggacgacgttttgcctatatgacaacattgaagacagatgcagacacgtatcactggggtgatacagggcagattgaacgtaaaggtatttctgaaggagaagtaggagtggaaaaccttacgtgggagactgcattaaaaatgaatcttggagtagaactgggcttatggaatgaactggaactgcaagtagatgtatttaaagaaaagcgtactaatattttcatgcagcgtaaaattattccgtcacaaaccggattcttgacaaatccatgggctaactttggtgaagtgactaatcgtggtgtagaattctctttgaattatagtaaacaaatcaataaagattggtttataggtttccgttctaactttacttatgctatcaatcgggtagacgagtatgatgaaccggaatctgtggtaggtacatacaaagggctgacaggacgttcattgaatactttgtgggggttgcaggcagaaagactgtttacggcagatgactttgatgcggatggtaatttaaagttcggtataccgacacaagatgtaggagcttccaaggttcgtccgggtgatattaaatatgtggatatgaacggtgatggtttcattactgatgcagatgaaggttatattggcggaacagtagacccgcgtattgtttacggattcggtggtaatataaattacaagaactgggacttgaattttttctttcaagggacaggcgatacttatcgtgtaatcggtaatactacatactttattccgggcagcggacaaacgttgcaaggaaatgtctattccaactataatgaccggtggacagaagagaattcttctcaggatgtgttttggccaagattgtcggaagagcctaaccggcaaaactaccggagctccacctggtggaaaaagaatatgcgattcttgcgtctcaagactttggaattgggatatactttgccgaaaatgataaccgagaagatacattcgaagtcggttcgtttctacgtgagcggtaataaccttttctgtttttctccgttcaaactatgggatccggaattggatactgataccggtttgcgttatcctgctatgcgttccgttatgtttggagttgacctgaatttctaatttaaaaaaagacgatcatgagtttgaagaaatatatatttgccggattgataggcatcgtatcgttgggttcctgtacgtatcttgacaaagaaccggatacggagattgatatagatatggtctttgaaaataagacaaaggtagaatcttggctggctaatgtatacagccgtattcctaatccgggaaatgactggttgaatacatacggatgggaagtatttgcggatgacctgactgcttccgcacgctggcaacagtgggactggcctaatatcactaagattcttggtggatggacgcctaatacacaatgggcgggcaatttctgggatggtcttcctcagaaaatacgccaggcttacatatttattgagcgggtgcatgcattgcctgaggccgatctgtcacagaaagaagtggattatatgaaagcggaagcgcgtttccttgcagcttattattggtggcaattgttggagacttatggaccgattccttttagacccaattacattgctcctactgactttactctttcggacttaatggtgggacagagaccgtttgacgagattgtcagtcatttggataatgaaatgctggaagcggcaaagcaattgccgcctgtatggcaaagtgtagagaaatatggtcgtatcacttccgttatgtgtctgactattcgtgcaaaaatgttattgtttgcagccagtccgcttgtgaatggtaatgagtggtacatcgggcataagaataaggagggagaagaactgtttaattctacttacagtcaggaaaagtgggtaaaggctgctgaggcttgtaaacttttgcttgatgaggcagaccaggctggataccgtttgtatgtggaatataatgcagaaggagagattgaccctttcacttcgcttgaaaatgtttggttcaccaagtttcaggatggaaataaggaaattctgttcccttacacaaagcaggatgcttatcaaagttatcagttctataccaataaggctgtgactaaggagtatggtggtggaaatggtttgggagtatatcaagggctggtagatgctttctttatgaagaacgggcttccgataacggatgacaatgcagaatatgtggaaggaggtttctctacagaaaaagaaataagagtcactgagtggacaggtggaacaggacaaaagggagaagtgactgcagaagggacttataatatgtattgcaaccgcgaaccgcgtttctatacaacggtgagttataatggttcttggtatgccttagccggacgtaaatatgagttctttaagaaccagaaagataacgactacacacacgatgctcctcaaaatggttatttggttcgtaaaaaagtatatcctcaggataatccgaagaatggcagttataaatggcggcaaatgttcttgtaccgtttatcagcttctttccttgattatgccgaagcaatcaatgaggcttatgataataaggtatcccgtgaggaagcgttgaaatatgtaaataaggtgcgtgaacgtgcaggtgtgcggcagtatacattgaatactgtttcattggatgaccctaaatatattcatgtagatgacaatcaactggcagtacgtgaggtagttcgtatggaacggcgtgttgaactttgttgcgaaggctcacgctggtcggatatccgccgttggagaatcattgagagtcttcctgaaatgtgtggagatgactatggcatgaattatggtggaacgaacagtaatgagttctataagagaactgtattccaaacgcgtgtatggaaaaaggcaatgtattggatgccggtatatttcgaggagataaataagaatcctaaccttgttcaggctcctttctggaattaattaaatgaaaagcatgattatgaataagataatgaaattaatatgcttgctctttctggcatcgatagtagcgagctgtaataaagatccggagtactacacactggaaacgcctgcagaccagatgctattaaggacttcttctgctgaccttactttggagaaagagaaggagaatgagactgcgattacttttacgtggaacgctgcagcacagcgtggcggtgctgacgccaatattgcttacttctttagaatgtatatggcggacttacactctaatgtcactagcttatatgaaattgaagccggagaacgctctatcagcttcacgcataatgaactgaatgatattttggcttcttggagcatacttcccggagataaagttactatcgaggcagaggtaatcgctcaagtgaattcgtctgctcagtatttgaaaccggaattgtcgaaaacacaattcgatgtggtcgggtatgataagaatgctactgcgatttatatggtgatgataacggaagatggtgaaaggtctatgcgaagaatgacggaaaaagttgtcggttcgggaatctaccagtcacaggcagaattgaaaccatgcaagtacttctttgcgctcagtgcagaatcggattatccatgttacatgaaaggcgaaaatggagataactctttgcagtatgtaacggaagaaggtgattatgagatgttggagaatacaaagagcggtacatatacaatggtggttgatctgaacgtatttgatgttaacatagtcagtttgtatcctttgccgaaggatggtatttggattgtcggtaattcctgcgaggtaggttgggatttgggagttgctaaagagaaaggagctctgcaaagtaaggacccgcgccatcctgagctttggacctatacaggtaatttctat

SEQ ID NO: 11941 - DNA, 1442 bp, Unknown
  gut microbiota DNA sequence
ccgatgatatacgttcggcattgtactcaacttactcttcattaagagataacggactgtattcggccagcatctatcttttcggtgatgtgcgttcggatgtagcatttccaaatcagactaattactatgccaatactttccgacatgaaattgaaaaatttaccatatctgccaacaatagtggaaatcaaaactattgggctcatcactacaaaggaatcataagagccaacacggtcatcgaaaaaggaaaagaacttttcgggaatgatgaagccgttcagaagtacattgcagaagccgaagtactacgtgcccttttctatttcaacttagttcgcgcttacggcggagtacccatcattatggatatcccgcaagaatacaccgattccagaggccatctgcgtgcatcgacagaagaggtctatatacggattctcaccgatttgaccaccgccatcgaatctaacaatctttatcgctcaacaaataacggagaaaaaactccaacaggaagagttaacaaatatgcggcagaagctttactgggaaaagtacttctatccatgccgaacgacatcacagaagctgcttatcccaacgtagaagcatggaaagatatatctgccaatccaaacattaccgtattttatccggaaacgaccactacgcaatacgaagccgccaaatattatctagaagatgtgataaacaatggaggatacgaattgtacccgaatttcagtgaattattcaagcccacaaacaaacattcaagcgaatctatatgggaagtggaatacaaaacagggcaggtagaaggattgggcagcccgttctacactcttttctcacccgcatcttatgcaccccgcaataaagccaactcaaacggatatattccatctcccatttcgaatcaaggaaacggtgcatgcgcaccgaccggatattttatggacatggcaaagaaatgggattccatgtatcccgattatcaatatgaagtacgcaaattcgatgatgttgtctacaccgatacacgtatcagcaacggtaacatcaaattagacacagatggtatttcttatcttccggttaatgagaacaaagattatacacaaaacgtcgcatatccttacgacccttatactggtacctctttccggacttctgtcaaaggctttagtgcagacgaccagtggatgtgcggcaaatacatgggttcatcagaatataaagtaaatgattctgatgacaactggtatatcctccgttttgcggacgtactgctgttattggcagaagcggaagcacatataaatgacggagttctgtcacaaagcattttgaacaatacaattaaccttgtacgggaaagagccggtattgttccgtaccttgcatctggagactctaataaagaatgggttcta

SEQ ID NO: 11942 - DNA, 637 bp, Unknown
  gut microbiota DNA sequence
cacggaaaactgtattacctccgctataaagtagaaggtgatccggaaggtcgctacgcggttgttgcaacaacccgtcctgaaacaattatgggtgatacggctatgtgtatcaatccgaacgacccgaagaacgaatggctgaaaggaaagaaagtgatcgttccgctggtaaaccgtgtcattcctgtgattgaggatgattatgtagacatcgaattcggtacaggttgtctgaaagtaactccggcccatgatgtaaacgactatatgctgggtgaaaaatacaacttgcctagtatcgatattttcaatgacaacggtacattgagcgaagctgccggtatgtatatcggcatggaccgtttcgatgttcgtaagcagatcgagaaggacctcgaagctgccggattgctcgaaaaaatagaagcctatacaaataaggtaggatattcggaacgtaccaacgttgtgatcgaaccgaaattgtctatgcaatggttcctcaagatgcaacattttgcagatatggcattgcctccggtaatgaacgacgatctgaaattctaccctgccaaatacaagaatacctaccgtcactggatggaaaacatcaaagactggtgtatcagccgtc

SEQ ID NO: 11943 - DNA, 471 bp, Unknown
  gut microbiota DNA sequence
aaaagcctttgttcttgggctccaaggagatgatccccgttatctgaaagcttcggcttgtgctaaacattatgctgtgcatagcggtccggaaaagaataggcatagcttcaattccgatgtaagtacttatgatttgtgggatacttatctaccggctttccgcacattggtagttgatgcaaatgtatccggtgtcatgtgtgcatataatgcttttaagggacagccttgttgtggaaatgatttgttaatgcagtctatcttgcgtgataagtggaacttcaaaggttatgttacttctgattgtggcgctatcgatgacatattcaatcatcataaggcacatccggatgcggctacggcagcagccgatgcagtatttcatgggactgatttggattgcggtcaaagtgcatatctggctttagtaaaagctgtaaaaaatggaatcattacggaaaaacaatt

SEQ ID NO: 11944 - DNA, 340 bp, Unknown
  gut microbiota DNA sequence
tgccccaaggaatcaaacagtgtattcaaggcatcctcatccaattgattcgagtgacaataaagatgttctaacagacttccttgcggtaccattaaacgagttagctgattatgttcacaacgcaattcactaatattagagttatcggacagatcaagttcggtcaatttgttgtatgagcaacttaattcccttaaagaagggcaacatttcaatatatcagtaattgattggaaagcacatccttgtatcaatatcgcagaaattgaagtcttctcgttcaattccagatgtgacaatacttcattagaactcaaatcaatatcgcgcaatgccg

SEQ ID NO: 11945 - DNA, 1003 bp, Unknown
  gut microbiota DNA sequence
agtctttcgattttgtaatcaagactcctcccgttgccattcagttgcttgaaatggctaaggtaaagagtggttctgctgagcctaaccgtaagaaagttgccgagcttacttgggaacaggttcgtacgattgctcaggacaaaatggttgacttgaactgttttactgtggaagctgccatgagaatggttgcaggtacagctagaagtatgggtatcgctgtaaaaggggagttcccggttaataactaataaacttcaattgtaatgggtaaactgacaaaaaatcaaaagttagctgcagaaaagattgaagcagggaaagcatactcactgaaagaggctgcatctttggtaaaggaaatcactttttccaaatttgatgcttcattggatattgatgtacgtttaggtgtcgatccacgtaaagctaaccagatggtgagaggtgttgtttcacttcctcatggtactggtaaacaagtacgtgtgttggtactttgtacaccagatgctgaagctgctgcaaaagaagctggtgctgactatgttggtcttgacgaatatattgaaaagatcaaaggtggatggactgatattgatgtgattatcactatgccatctatcatgggtaaaattggtgcactcggtcgtgtacttggtcctcgtggattgatgccgaacccgaagagtggtactgtaactatggatgttgctaaagctgtaaaagaagtaaaacaaggtaagattgactttaaagttgataagagcggtattgttcatacttctatcggtaaggtatcattcagtcctgatcagattcgcgacaatgcgaaggagttcatctctacactgaacaagctgaaaccgaccgcagcaaagggtacatatattaagagtatttatctttctagtacaatgagtgcgggtatcaaaatcgacccgaaatcagtggatgaaatctaataaaacagagaaataatgagaaaggaagataaaag

SEQ ID NO: 11946 - DNA, 3679 bp, Unknown
  gut microbiota DNA sequence
cggaaaaacttgtgtgagaagaaaaaatcaggagattcatttctaaatctcccgttttattgttacttttgcatacgaagagttctttgaaggttacgcaacgcacagaagaataatgcagtagataactaactaattcgtaacctattactattatgagcgattacccaatgctcatttccaataaattacactcttttcgtaacttccaatagcaaaattaccaaacggaattataactttagaaggcagagctttctaccattgcccggaattaacagaagtactaacttacggatctgttgtcagtgacacccctgacgccataatcaaagcatgctgttttgaaggatgtccacaattaactcgctttgaaattccacaaagcatccggatattaggccaagggctactcggtggcaaccaaaaagtgactcatctgaccattccttcgaatgtcatccaaatcgatttctcagcattcgataatacaggtattcaggaagtgaaagtagaagcaacaactccaccacaagtatttgaaaaggtatggtacggatttcctaaaaacatagcaaccattcgtgttccttccggaacagcggaaaaatataaatcggcaaatggatgggaagaatttaaagacaaaataagaacgttctaatatttctttcttcgattataactgaaaggtaagtacctaaacccttactttttctgttataatcgatttttacattaccgactgatttatatttccccatttactcctaacccaaacaatgcaaaatcccccaaacaaggatcatcaggaaatacctctgccaaagcaacagtaatctgacgggcattcttcaaagagaaagtttccgaatccgtcaaatttaaataatgagctacccggcaaacatgtgtatctaaaggaacgatcagatctttctggtcgaaactatcccagatcccaaaatcaacttccgaatcccgacgaatcatccaacgcaaaaacatattcagttttttctgtggactttttgcagaaacctcaagaaaagcacataacttttccatcggtattccggtatacacatttaaagcttcctctaaactgtcaaagcaggagtaagctgtatacaaacgctgaaaatatccataaaaatcatcatatgacagcattcgataaaaactattcttcgctcccgcagggaaatcgtccttccaacggcatgataatacatatcggtaaggcgaatctcccattaatccatgtaactcctctgctttcttccgtatctgcttacgattaccaaaactcattattgccgtcagcagaccgctaatttcaatgtcctgtttcagtgtgtaacgatgagggaactgcaccggatcactttctataaaaccggcacaatgataaatttccgcacacatcaatagcttgttctttatatcttcagtcatttcaaaaaaaggtatcaatcattaaagatgcaaaaatacatattctaattctattttcactccaaatataaaactgacatatcttttagattatggtataatattggcatattaaccataggaagaaacaactttcccaataacgagatcgtgattaacaatcttatttttaaatatttgcaatattcaaagtaactaaaaagctcaatagaagctttctattttgaaagaagcattccattttgaaaaaagattagcaaccaataaaataccagataacgatgaaagtttgtaaatttgaaaaaataaagaacgaggaagagataatacggattattgattgtatccgaaacgaacatcctcatgtagtagtaattccaacagcaatacctctacagaaatggctgcaaaaaatttctgccagctggtttcaccatgaagacgaaacttcacattctattatcaatacaatagaagaatattactatacattagcagatcatcttatcacaagtaataaacttaacaaagacataaatgtacttatccaaaaatactgtaataatatccacaacttagtggaagaaaaagccgatttacttatagataaaataataaaagctgaaatataccgactatttagccatttatttacttattgcctacgtgagcaaggtataaatgccaagttactcgacaccagcatatttatgcaactcaatcttgaacgaaagcctgacattccctatatccaggaaaatatccgaccatatatagagcaaaatcaggatacagaaatattcatagctcctctctccttatgccagaacgtatatggtgaaatagattttgttaacaaaaaatacaatgattattacactatcatattggctacggtctttaatgcaaatgaagtcctcttatcaacagaaatcaatcatatctgtgcaaatctaaataaccagcgcgaacaacactctctgacttatgcagaagccgaacaactgataaataatggtgcatatttactttatgcagattgtatcactcttgcagcacattcagatatagccatccgcctgatagataccaatgatacggcaaccgaaaagctatatatttcttcccatgatacgaaaaacaatataaaagcgatacttgtacaagattcggtcaccctcgttcgttttacctcattgaatgtgctccccgactatttactgatgggtaaactactggaagttataggcaaatataaaatcaaaattatttctatggcctcatccaatgtatccgtttccatgatcctagccgccagccgtgacacattgcgcatcattcagagagaactacacaaatatgtaaaaatgaccaccgatgagaatatgtccgtaatacatgttataggctcccttcattggaaacacaaacagatagaaagcagtattatagaaacaatcaaagatattcccatatccctaatcgcttatggcagtaatgaccactgtttgactatatcagtccatactaccgacaaaaacaaagtcatccgtttattatcacaacaatttttcaggcaactttccgcttagcaggaaacagggtaagcaacatataccgtattcctaccgtaatccatacggaaaaaacaaacggagcagtcagtgtagtaattccgacatccattcccaaaagttgaagaaaaacagataataacacggagaatacggcatatactcccccgctccatgtcttgtctcccaaagcgatagcgcataacacaccattatatcccattagccctgcattcaataccgcagattcgactcctgccaacagagctacaggaataggcaacaatgctcccaacaccgtatagacagcattcacacgagaattaaccaaaatacctaaaagaaaaaacagacctgtcaatacagcgccaccttggaacatcacttgtccaatattcaggctaaacgactgtaagaaagcgaatgcttgcgttcccgcagtattttcggatttcaatagtaaagaaggaaaccagcaagaacagacaaacagtaatatccatacagacagaataaaaggagccgtaaatccggagataaaacgttgcaaactaaaaagccgtacaatccacgtggataggcaagaaacaacaatcaataatagcaaggaaggcaaagttatcgacataaatgcccctatcgcaatc

SEQ ID NO: 11947 - DNA, 6327 bp, Unknown
  gut microbiota DNA sequence
gtttgccgtcagatggatagttgctttacctgttttgtttccggtcttcaatgtaaagaatgtaagctggtcgcccggttgattgaaggttagcgactgttgcgaaggtccggcaatttgtactcctccaccggaaacctgaatagatacggtgacattctttacctgattttccattgcaaagatatttaccggaacagtgatttcctcttgaatactaagcacgcgcggcaaggtggaaagcagcattaacggtgtccgtacataggccgtcttttctgcatttccataagcaccgtcctgtcctgccactaccatagcgcgtacagaacctacgtacatcggaagtttcaatgtatgtgtctgatgtttgctttttcccagatagaaagggcctatgaatttaacgaccggtttgaaccggtttgcttttgcatctgccggtttcaaaactgcgtccccacctgtactgaaaagagaaccgtaacttccggcggaagctcccaatacgttgtcgtacatatcccatgtccggataccgagcgcttcgcgtgaatagaagtcattccaaggatcgggtgtcttgaagttcgtaaggtccagcagaccgtcgtctacgatagccaatgtgtaagtcatcggtttcccgctcttttcgctgacggtcacattgaagttcgtttccggtcgtagcacttccggcatttgtatttgcggtcttaatattgtttgactgttagttacgaataccgggacaacaccatgcatacggataggcaagtcattcactgtctgcgcatgaggctgcaacaagctgatgtgcagatatacattcggagccatttcttctgtgaccttgaacgtatattttgtatctcctttgctggaaacttcgatccattcctgtttgagtaccgtcgatccgttttcgatggataccaatgcacgtccgttggctgctgcggggataatagccatagctgtttctcctatctcataggaatctttgttcaatgagaaagcaagcattttaataccactggggtccgatttacttgaacgtcccctccattcgggccagtctacgtagacagtacctccggtggcatgtccgctttctttgtctttcacatagaccagataacgtccccaattgggataatcgacgcggaatttgaaagaagcctttccattgttggtttgcagactcccgctggctaccggagtgatggaagttccgtttatataggaactgaaagattcttcattgttttcccaccaccagctccaactgatacggtagattttatattccagatttgaacggctcaccgcctgtccttccggattcactgtcacaatgtcaaatacatgatctttgtccgtttctatgtatttgccttttggctgattcaagttaatgcccacatacgatgtgaacggagagaaaggaacgctttgggtatagatactggcatctcctcccggttcgaatacacgggtggtgaaagatgcgtttagcatacccggcgcattggttgctgcagggagttttaaagtgactcccgctcttccttccgcgctgagcattccgtcaaacatatttgtcttgatggtagtgaaatctgtagccggattattgaaaatatactgtccgtagtttttaaattgtgtatttactttagacagtgacatctctactttggttttcagatgtgaagccttagcccctgtcatccaggcagaagtgagtggagcatagacttctttgtctgttgcttgaagaattctaggcaatgccaacattattttaagtcggttgggttttattgtttcgatgcgtatccctttatggaaagtcgaaccgcctacttttacgtatgcgttccacagaccggtaggggcatctgcctgagtagggacagtaaatgtgtaaaagccattcatcccttgtgttgagatcattttggtatagaattggcctttcggattgtagatttccagcgctaccggatgtttgtccggtattcttttttcccggtcttccagaatgaaagatatatgtaaggtgtctcccggtctccatactcctctttcaccatacataaatccttttaagcctttttgaatatcctttccacccacatcgaagcggctgaccgattgctcttcaccgtctgcaacacgtacgtaagctttttgtccgtctgcctctgctacgataatgaagggaactcctttcggagcgatttccgccaagccttctccgtttgtttctcctttaccgatggtttgtaactggaaattgtaaacagttacttgcgcctttccgacaggttttgtgtccaaaatgttgtttactgcaatccacagattgttcaaggagttcttctttacgagcattcccagattagaggcaaagacattgcaggtagctgtccggtctgctcccatataataggacgggtggcacggattatcccgttctttccactgatacaaactccagtccatagtttcgccgttgtaataataataagcctcaggagtgtcccatacagcttcgtctgcctctgacaaaatactaccgctaacttttgtcagaccgtcggaagtcgtgtcggaaaacttcatttctttgttttcttcacttccaccgcaaggataagcggaatattcttggcggaaagacaggataacccggtagatggcgcccggttcttgatgaatcagtccggcaaggtcgatagagtaatcttcccattgatgaatatcttttgatgaatccttgcttagccacaatgttttcttataaaccaggcgtcccgaacggcgcaactcattggcagaggccagagagttgttttgcatgaacatcaagatgttactctcaaagatgcggataacctttaaatctactgcatacagattgacagcgcggaatggaataatcaggcttttcgaatcgggaagaatagcggctgaggtagccatctctacttgcggtttcagattcaattcgctgaatgagatagagtgggaagtccccagactacggtcttgactgctttttattccttcatggatattcaaagtcagtttatttattttattggtttcaaaatagataagaacctgattatccttaatttgggtgatgcaagaagatacttccggtatctcgatcagtcctttcagatcttgcatattggatatgggagcagagaatacgacttcgatcccgttttccggttggtcaatgcgtttggcggtcagaaagcggaaactatcttttgccggaatcatgatttcttcgatttgcgtatggtcaattccggcgggattgccgtttgctgtcagttggatttggtaatcttccgcttcccgcaagatccggttgatactgaattcataacgagtcggattgttggtggaggtaatatcgaccggataatttttacttttgccattgccggctatcagcattttctcgacttcttctttctttacaacgtcactaaagcgtatttctccttttatgttcacttcgtcgggttgagtagctgtaatcgttataggttctgtatgaattgtgaagttacgttcctgcacccggaatgagaagttaaattcctttagctttttatctacctcgataaaatctccaagctggaaagttccttcgtagaatgctcccggttttaaagtaccttcttccggaacaaattcgatggtgttattgctaatccaatatgcttttcctttcaaagacggtgaaaagctgaacggattatcttttaactcattatttacgtcaaccataggttgatcgtgtgtcagctcgatgcgtatagtcgaactttgggagatgactcctcctgtgtaggcatttacatagggggcatattttgcagaggggatgatgtctttcggactgtgcatacatgcggaaaaggtcacaatccacattatgaaaaagaatagtttggtagcgaggctgctacgtccagtttttatttgtcccatagcaaagagtttttattggttcagtggacaaatatactgtttttataatagattcttttatagacaggggtatttttccttcaactttttcatgaaggacttgcttacttgtaggagctcggcgtcattaaaaggggggagtaatacacaattattgtcttcaattgatgccagatagctgatattaataatgtaggattgactgatctgaagcaaataagggtgtaaactcaatatcttttgcgagttcgtgtttctttttaatatcagagtatgtttgttggataacatgacttcccacaatttgctttttgagttatagcggaaataaccgatttcttccaagtgaatcagttgcaaatttccggtaatagtggtatataaaaatatgctttcttgatgttgcgtaatttgtgtctggtcgcaatgttcaatgtttatgtgttgattgttcatgatattaatttattaatttcccgtgtcgtaatttttattttctgtcaaaagtaacagattactcttaattataaaaatgaaaagtgtctcattatagaaatgagacacttttattattaagatttgtacgttacagaatagaattattctatttactttgttgatattcaatgaatttactaggagaaataccatatctttcggaaaagttccggtagaaggttgcccgtgagctaaatccgcatgcaaacatcaactctttcacattctttttcggattttgggcgattagttgtttgaaatgctctagtcggatataattaatatattcacggaaacctgtaaatccctgacttttgattgcatccgaaatattgcgttctttgtcatttaaggcttctgccaaatcttttatattgtatttctgatctgtgtaaggatgttctttctttaaataactctcgattgtggtgaagagtgtgagtggctgaaatgagtttctcatttcttcaggattttcttcttctgtattatacaccatactgatatggtctgaaaacggattctcatatcgtaaatatagcattgagaataaagcagtaaaaacgattgctgtaataccgaataaattgaagataaactcattaatgcttaatgtgaataggatgtatataccaagaaataggaataagaatcccatgaatagatacatgtttctattcatcttacgatgtgtcttaacacggctggtgacataaatgagaataaagagaggagtgatgacagaaagcagaaatatactgattctgagtttgacatccatattaccgatattgggcattatctcatttagtgaatggatagccgttatgttgccattgaagtacagatagcagattcctaccgttatggtaatgataggaggcaataagaaggtgaatattctgaaatggttgaaatatcccggagataaggatgcgatgggaaatagtgctacgatattggccaaagcgtaccatttaagcattttatcaatattgagcaattctgtgaagtcatattccggggtgtccgtgacaatcgtcagccatccgatgttttcccatgaaaacatgaaccctataccgactgctatgactccccaatataattgaggataattgtctttggcacgaatgataagaataatccccgatataagggcaatcaaatcaagtgctagttcaactgataaatgtagtattcccatgtttataagtcttcacctgcatatttaaggctattaagtttaataacgtgattatgagtttatgcaaatgtagttgttttgtttctatccaacaaaattcggttgataaattgcatttatttgcgtacttacaaaatataattagttaattctaaaactgatcttcgtagcgtttccaatatattaggatgatatgccaaaatttgtgaccgtttgttagaattgaaatagaagtaagcattataggtatataaacaataaatccccataaccttattagttacagggatttagtatatagcaatttattaaattacttgctcaaagcctgagctacgtcaaccgcacaagctacagtacaacctaccatcgggttgttaccaattcccaggaatcccatcatttctacgtgagcaggaactgatgaagaaccagcgaactgagcgtcagagtgcatacggcccattgtgtctgtcatacataaactcgtgacggtttaggaatatacaatatattgtaatttgctattatataatatgttatgctcttatttttattaactagatgtatattggtgacggtaatttatttgttcc

SEQ ID NO: 11948 - DNA, 980 bp, Unknown
  gut microbiota DNA sequence
tgaatgttggtgtgacccatcaacttgcttgtggtgaacaggtctgcgccaagtgtcagcatcattgtgccgaaggtgtgacgtgaacagtggaaactgatgtgcttctctacacctgctgcctctgcccatttgcgaagggctctgcctatgacggtctgagtagttggtatatcaaagaagggagttgttattccctttggttttggtaaccaacgctttgcctcttcagagagtgggatgatgacaggcttctccgtcttctgcatttccatgtcaatatactcgcccttgccgtcaggagtcttgaaaatgtgaatcggtgcaagtttgtacatatcactgagtcgcaatccagtgaaacaagcaaagatgaaggcttgcttgacctctgggcggtaactgtcggttgccatgagggctttaagttcctcaatggtaaggtattccttcttgccatcctttggctgaatgcgctccttggcatccagttccttcattggattgtttcggataataccttgacggacagcattgttgagagtagtcgagaacatgccgaggtaacggcttgccgtgttctggctgataggtcttggctcaatgtacttgcagtgtgagtttgggaaggtgcgaaggaacttcacatacccacggcagaaatcagcattgacctcttcaagggtgatgaaggtctgattggactcttcaagatatttctccacggtgtgaagcatttcaacacgacaatggagggttgacttcttggtgctgactccaccttcacaatacttcttgatccatcctgtcaagagttgtgaaccctgcttgacggtttcccagtcttgcactccgtgaccatggagagccttgatgcgctctgccttgatacgttctgcgagtgccatcgtttccttgttctgctccttgcagagtggattgacctcaggaatgatatagagtttcagatactcatactt

SEQ ID NO: 11949 - DNA, 356 bp, Unknown
  gut microbiota DNA sequence
agttcaatggcatgggggaacgtgcaatacttaccgccttgatagatacggagataccaaattatagccgccaaaaggataatcggactttccacgaagaaatcgccctgcttgcttatccaacttcgattgaggttaagcattatcgtgtagcttgcttcgtaggcatccgcaatgtccgacatgaagctggcatttatcgggttgcatcggtggctcttgcgtgggtcgtcaaaattgataacgtaaaatttcggtttaaccttgtagccgtccaagtggttaagtaaatgattgtaagcgatttccgaaaggtcaggaaacttataatcatacaggtagagcgcaaaaccttt

SEQ ID NO: 11950 - DNA, 2957 bp, Unknown
  gut microbiota DNA sequence
aacaagtcgttgtcttttgagctataaatggttttccacaccattggcaaatctttcttacttccatattttcctcctttatatcggggataatttcgccttatttctcccggattttgtcaacacatgtaaaccactgtcaacacacgtcaactaatgcgtcactgtgacattcgggctaaccgtgaatttctgtcgcggtagaaatatgtaggaaaaatatggataaaaaccgttacttccaaatacggattggaaagtgttaaaatagaaaagtcgctgatatacaacgactttattctaaatggttatagttggttacggctgtttctaagccatcatttgccgatgcaaaagtgctgaaagatattttgcagtaccatatcgttagtcacttctcctgcaatatcggaaatgaaaaagatacattcacgtatgtcttgtgaaaggaaatcccctgaaagatgtgagtcaagtccattttgtactctatgaatagcatctaaagctttgcttaaggcttcgtaatgtcttacatttgttacgatgacatcattttgtgttactgttggcaaatgcgcagcattgataagcattttttgtaattcattagtgttctctcttcgtttagctgagatgtaaatatgctctgtagattcttgtgggaaattctccaataaagctgataaattacttttttgtacatcttcaattaaatcagctttattgaatactacgatcaagtgctttccttcacaacgtgggataatcttttttgataactgttcaatttgagatgcggcgtttacagaatccaccatccagagtacaatttctgcttgctctaacttttggaaagtacgttcaatacctaaactttcgatcttgtcattagtttcccggattccggcagtatcaataaaccggaaagtaactcctccaatactaatagtatcctcaataacatcgcgtgttgtcccatgaatatcactgacgatagccttatcttcattcaataaaacattcaataaagtagactttcccgcgttcgtttcaccgataattgctacgggaacaccacttttgatagcattacccacattaaaggattgtactagacgagaaatgacttgttctatctcatctgctaacttttttaatgccgaccgatctgcaaattcaacatcctcctcgctgaaatccaattccagctcaatcatagaagtgaagttcaatagcttgttgcgtaaatcagttaattctttgctgaagccacccctcatctgactcatggctagccgatgggtagcggcagatgaggatgcgattaaatcggcaacggcttccgcctgacttaaatccatttttccattgagaaatgcccgctgcgtatattctcccggttgagccatgcggcaaccctttttgatcagcagttgtagcacctgttgaagaatgtaagaagaaccatgacaagtaatttccgtgctatcttctcccgtgtaggaatgaggcgtgcgaaaaaggctgacaagtacttcgtcgataatttcgtctccgtcgtatatacgtccaaaagtcaaagaatatggcttttggtcactaaacaatttgtccggttttgccggtttgaatataaggctggtgatggaaattgcttccggaccggaaacacggatgcttccgatagcaccgccttgagcggtagcaatagcacagatagtatcttggttcatcatatttctttttggagactgcaaagataattgtttctgagtaaaaaagataagattctgtacaacttgtactttatttgtttatatttgctgtgtgcggtgatatgccaaatgaaataatataatgcttatggagccagacacaaatttatattcccaaagtgagaatagtgaaatcatacgggaaaattcacagaaaatactctctgtacttgctgcacaccaaattgctttgtgggaatatgatatatctacaggaaagtgttccttcacggatgactattttcgtacattaggcttgaaagaagctggaattgtttttaaagatatcgatgacttttatcgctttgcctatccgaaggatgtgaaggcctatcaaactgctttttccaagatgctcgcatcggattcaaaaatatcacagattaaagtacgttgtgtaggcaagcatggtgaagtgatctggctggaagatcattttctgtcttataagggtactcaggacggacgtcttgctgataaattattggcatatacggtaaacgtcacttcgcaatgtgagaaagaacagtatatcaatcatctggaagagcacaatcgtaagataatagaggcgttgccagaattcattttttatttttgatgataatttttttattaccgatgtgctgatgacaccggataccgttttgcttcatccggtggaagtgttacgtggtgtagatgggcaagatatttattctcccgaagtcagtgatctgtttctgtgtaatattcgggagtgcttgcaagatggaaaattaaaagaaatagaatacccacttgaagtagatggaagccgaattattttcaggcacgtatcgccccctttgaagggaataaggtacttgctctgatacacgatatcggtgatcggattcgtcgttcgcaagagttgatcgaagctaaacggcgggcggaaaaagctgacaagatgaagtctgtcttttgggcaaatatgagtcatgagatttgtactccgttgaatgctattgtcggtttttcggagataattgcggtgacagagaacgaagaagaaaagctgcaatatttggagatcattcaaaagaatagcaatttactgttacagttgattaatgatattctggacttgtcacgtatagaatccggaaaatcggaaatgcacttattgaaagttatccgcccggaaggagaatattg

SEQ ID NO: 11951 - DNA, 11069 bp, Unknown
  gut microbiota DNA sequence
ctaccgatcgtaaccgggtgatgcaggtacttttcaattttttgtcgaatgccataaagagttcgtgaaaagccggatttgattctgatggatatccgtatgccggtgatggacggtattcaagctactgaaaagatacgtaccatttccctttccgtacctattaattgcggttacggcatacgctttttatacggaacagcaacaagccattcaagccggatgcaatgctgtgatctccaagccttattctttggaaaaactgaaagagacaattgaatcttatatcggataaacgataaaaagtcagtgtcaccatcatagcagaatggtggcgctgactttttatatatttatattctgtcaagaacagtcttaatcaacgtatcaatggtatttttatatccggtgttggcttccttaatcagtcgattggcaatcaccatacagacagtcatagctttatgtcccatcagccgactgagaccagccaaagccgaactctccatttcgaaattggtaatcttgaatcctttatactcaaatgcttcgattttgtcgttttgtttcggatctgccaaaggaacacgcagctcacgtccttgtggaccgaagaaccctccggcggcaattgtaacgccacgtaccatatcgtcttgggcaatccgttcaatcagttcctcgcttgcatcaattacatagggagcaggagcacacatatttcccatccatcccatgtgattaagaaaagcacgctcgaaaggcagatcacatacctcattgcgtccggcgtagaaattcaataaaccgtcgaagccgatagacttctgggaacaaacgaatgtacctaccggagtattgggttgcaaaccgccgcatgtaccgatgcgtactaattccaattgacggaactcatccttttcttctcgtgtattgaaatcaatattagccagtgcatccaactcattcatgacaatatcgatgttgtcacaacctattccggtggaaactacggtgattcgttttcctttatacgtacctgtaaccgtcttaaactcgcggctttccacttcgcattctttattttcaaagtgagaagctacgagtgctacacgtcccggatcgcctaccaagattactttatctgccaaccattcaggttttacgtgaaggtggaataccgaaccgtcttcgttgataattaattcagaggatggaaagtactttttcatgctattaaaaggctttagttttacaatatgttgttgctataaaaataaaaacaccggaaccggatttaagttcagaagaagactctttcttttccgttaggaaaggggagtacatcttgagactgaaatgaaatcagattccggtgtttgttgtaacttatttgctcaaaggctgattccctgcattgcctgctgccggtttggcaatcgtttcacgcatggaggtgtcagcttcgatattcttcatccggtaataatccatgatacccaaattaccgctacggaaagcttctgccattgctttcggaacttccgcttccgcttcgattacctttgcgcgtgcctcttgtgctttcgctttcatttcctgttcggaagctacagccatagcacggcgttcttctgcttttgcctgagcgatattcttgtctgcattagcctggtcaatctgtaaagcggcaccaatattcttacctatatcgatatccgcgatatcaatagatagaatttcgaaagcagttccagcatccagtcccttacggagtacaagtttggagatagaatccggattttcgagtaccgatttatgattctcggaagaaccgatcgatgaaacgataccttcacctacacgggcgaggattgtatcttctccggcaccgcccactaattgacgaatgttggcacgtaccgtaacacgagctttggcaatcaactggataccgtcttttgcgacagccgttaccggaggagtatcaatcactttcgggttaacggacatctgtacagcttcaaatacgtcacgtcctgccaagtcaatagcggtagccatctgaaaaggcagctcaatattcgcttttgatgcggatacaagcgcatggaccactttttcgacatgtccaccggctagatagtgtgcttccagttcatcacgtgtgatgtttttcaaaccggccttgtgagcttcgatcatgcccggtacgatgatatacggcggaacattacggatacgcattaaaaataattgtatcagcgagatgtgtactcccgatactttggccgacaaccacaggaagaacggcacgtaatggaaaaatattatcaggaagataatacctccggctatcagaaagataggcaaatagaaagatgtttccattgatagtttgtattaagtgaatattatttctgcaaaagaataattattttctgtgtttctcaaccataattgtcccgtcactgatacggttgacgataatcggagtcttttcgtccagaaaaccgtccatcgactttacttccacaatgtttccattgatttccgcataaccgatttgtgcgaggcgggtagtacttatacctgtatcacctacttttacactttgttctgcgctgcggtctactttcgaatcgatgtcttttttcaaagccagcttatctagcatctttgagcgcataaaccagatcagtgaaccgatacaggcaatagccgatatgcccaaagtgataaatcctcccgccattccaatatttgcaaacgcataatagttggcatagataatgcatcccagtgctgagattccagccagactaatgccgggaataacgaacagttctaccaggaacagtataactgcggtaataatgagaacggcgataatgagtatatccatagttcagggttattaattattttgtttttctgcattacgcacatttatttcgagagctgccaattcctctgacatctgcaatatccgcttttccaggtcgaggatagcaggagccattctctctttttcctgtttattgccagtggaatactgttgtcgcaagttgttcagtttttcttcctgttgcagatgatctttttccatttgtcggtaacgcaggaaaagctgtttggctttggcggacttaaagtcagtcatcaggtaataagttgtattatcgtcaatgacaaattcaaaatcgacctttcgacgttctttgggcttatggctgatagcggcttccagacgttgcagggcttctgcaaccgtttgtttatctttccaggtttctttcaaagaatggatttgtgccagccgaatcatctgcttccgatccatcgcttcgtagttgtaagtctgttttgaattattgggaatgaatacatagatacatacctttccttccggttggaaacggtcggaagcgaaccagcctagattgttatattcgtcaacgacgtacatataatcattgtatggagaattgaacggcatacccacgttttccggtactaaataagtatcggtattggtattgtaacgggtgacaaaaatatcataacctcccaatccttcaccgtcactggcataataaatagtcacaccatctgccattacataaggatagtttgcgtttcctgcatcattgatactacccggcagtggtcgtccgttgctccattcattctgcaacttgtttttggaaagtatatccagactacctctttcacccttctcgctgtaatagattttattcccgatttcagtttcgtagacagtaccttcgtgatctcctcctgtttggaagaactcgttgaaagtaaacagttttcccgattcctcactaattttataagcattcagaaacgttgctttatctacaacgaaactgtcgataatacaaacatcttcaacacctttcaacatacggagatcagctttgctcttttccagtagtttctctgcttcttcggttgctcttttacgcttcttcaaatcagcgatatactcttcaaaacattctactgcctcttcgaaacgatatgttccgttataagcctggcctaaataaagctgtccgctagctacacgcttcttgactgccatttcgagaggtttcaccgcttcttcggcttctctggttttcaggcagcacacgccataccaatagttgtagtttccgttggacggttgagattttacgtaccttttaaagacaggtttggctttctcatattcgccttttgtgaacaaagcgcgtgcctgttccaatgtttgcgcagaaacttcgcataagaagagactacaaaatagaaatagaatatattttcctttcatcgtttttagcatttatgggtggcagattatttaaaagtattgttgcttttggaagtctgccaactaatcaattgctcaaaagtacaaatttattagaaataaaccctttttcagagattctattatgttaattcttctttaaatcattcttttcgcttacttttgcagccgatttttgaagatatgacacaatttaccgaagaagagaaagccattcgccgcattgaacggcggtttaacaaaggagtggtgcaatatgggctgatagaagagggggatagaatactcatcggactgtcgggcgggaaagattcgttggcgcttgtagagctgctgggaaaacgcgcacgtatctacaaacctcgcttttctgtcattgcagttcatgtggtgatgacgaatattccttatcagagtgatacggaatacctgaaagcgcattgcgaagcgaatggagtggcttttgtgcaatatgaaacttcttttgatccttctacagacacccgtaaatctccttgctttctttgttcttggaatcgccgtaaagcattgtttacggtggccaaagaacatggctgcaataagattgctttaggacaccacatggacgacattttggaaactttattgatgaatattacttatcaaggggcattcagtacaatgccgccccgattggtgatgaataaattcgatatgacgattatccgtccgatgtgtctggttcacgaatcggatttaatagaattggcagctttgcatcattatctgaagcagatgaagaactgcccttatgaatcgcaatccagccgtagtgatatgaaaggcattttgcggcaattggaagcgatgaacccggaagcgcgttatagcctttggggaagtatggcgaatatacaggaagatttattaccgaataaaattgattgagttatgaaaggattctatactattttactactgattgtgtccaatatatttatgacctttgcttggtacggacatctgaaaatgagacaggagtataattggtttgccgctttgcccttgataggagtaattacattcagttgggcaatcgctttttttgaatattcatgtcagattccagcgaatcgcattgggtttataggtaatggtggccctttttcattgatgcaattgaaagtgattcaggaagttatcactttaatcatcttcacattgtttactactgtgttctttaaaggagatgcgttgcattggaatcatttagctgcatttgtgtgtctgattgcggcggtgtattttgtgtttatgaaatgagtcctttttaaagaatataagattataggataagtgctatacttgctagacttatcctattttcgtattacttgatagatttaaaaaccttatcaatgcatcgcttcttctgttccatgtttggatgaacatagagatttaatgtagtagtgatatctgaatgtccaagtattacacttacagttttgtagtcgcaattgctttcaatgcaacgtgtggcgaaactgtggcgcagtccgtgaaattttagtgggggaatattgagttgttccatcattcgtttgtaatagttacgataggtacgcggctcagttggtttctcttcattagtaagtacatagaacttgccatttacgattttttttaacgggcgtagcatctttaataattccttgttcataggaatgtcacgaatagaattctgagttttaggtgtgccgataatgatttccgtatgtattttttctccgtccaatatataaattcgttcaattgttttccgaatacatattactccattgataatatctatatcatcccaagttagtgcacaaatttcaccgattctaattcctgtagtcagacaaatatagatgcctaagttgcggaaagtgaagtgattgcttatatactgtagaattgctttgtgattagcgatgttgagtacatttagttgtttgttttcctgtggtggcgggaatttgatacaccaatcctgataggacaatataccaagttttgctccaaacttcataaccatttttagtacaatgagtatatcctttacactttttgctcttagtctttgctgaagtttctgtaagacaaactcttgtacttcgttttcgagtaactcatacttatctccaaatgtaggaagtatgtgattttctaagattagggcatacgctgaatatgttgagcttttcacatatttacgtttgtcttctttccacataatggtaatttctttaatcgttttctttgctgtcatgctttcataatttaaatagattaatattcttgtaagataacaataatatccaaatatttagatgtaatgctattttttatagaaaggtacatttcttgatctcttgttttacttcgaagtgaataaatgtgaaaaatggagaaaaaagagaatgttttctttcatctccattttcgtttaatggttttgtagaattaactgcgcatccagttagaaccacaatcaccggagcagccgcaactgttggtgcatacttcccaagttgtgtctttcaattgttccattgtcctaccatatttctcattgatggcagcaagatttgttaatttaaagttcatttctttgagtattaatgatgatatatcctgtttatggtaaggataattaaccgtattttttgttggatgcttccaaaaagcaactaaaaaacggattagattatagaaatcttttgttccacaactctctcgagaagagtgcatagcccaacaaggaattcccacttttacccatctcatttctgtctgggtctgtaaaaaggcgctaattgttcttcctgttctgaaatcagagtgggatgtttctttttggaaagggatacctgcctgtttacataagtcttgaaatactgctgaggataaagcagtggtagcatagtgcatattggcgtcatatttaatcgttatacctttgttgattacaggtgagcaagtcggatcttcacattccctataattgggatgagtagcaaaagatacgttcagcgatacggtaaaaaaattatgcagcatttttatcatatcatcctcgtctccgttcatgctttagtcaatacattcctaaagaatggagtatccgcccctcctaatgcagaatttgtttcttcttccgcatcgaagaaagctaccatgttgcttgcgttgttttttgcatttgtttccatcagggcatgatgggctgcgtaaaccatcgtcctatcatccatgaagttgtcaatgcacggatttttgtaatcatacacgtataggaattacgtttgtatatatctctgttcgtaataaatttccaccagaatacgtagggcataccggttcaagtatccaacctttgcatcgcgtatccgacagataacaaggggaggatagatcgatgttgtccgtttttatacctttctctttttctttgttcatgagaagaccagtccttaatagctccatgtatgagcgtaccgttggttgttgcgtagcagatatatttggtcggctatgtttgcgcccataaccattcgcaaattttttaaatttgcgggatgtcatgaacggttcttcgctgtgaaatagtatttcgacatagtctattccttcctttatggcacgttcaaaagtcgatttgatacctgtttggtctatgtctatcgacattacggctttcccttttatgtgctcgttgcaataaatgcggtttaaattgcgggcttccgtcatataaagggtatatgtgcatcttttgaccgcttttcctttcttgtttgtaagtgttacgttttctatcaatgtcgttacatcatctatacggtgattctgcatatattcgagtgtaccggagatttcaagtagtttgtcccctctctccatcataacttttaaatagttttttcccttccgaaccattcatggtttcgttgaataaagaccgcatggctttctcgtcttcgtcattgttttcttccggtggattgaaagggttgactgtagtgtctatcgggacatgagatgtaagcgttgtgccatattggacagtactgttattctttttgataatgagaaaatatataagccaataggctatcattgctacccaaccgagaaatagcatggctatgcaactgagtacttttatccgtttggataccgggatatttttccatgcaggatggctgtgaaaatatccaatgcgactaaaatgatgcctaaaatcagtaatactctgccatgatgtataataaaaagtgtccccgattcgttaatcaatcggggacacttttagtgcatattgcccaataaaagcgtttatgtatgtgtttattcttgcttcgcatcttttttatttcttttgaatagggcgagaagaagtcaaattctaaaatagtggatattctagctaatgtgtcggtgtccactgaatatttatcgaatattttatatacgtttgttctgctgcatgacagacgctgggttagccacacaacagtccgttgtcgtttttccttccttacttgtgcaagtctttctttatgacctttactttatagttgaatgagcggtcatttcacttgcaataagggtatttgttgccttattcttcctacattcttgtgataatacagcattgttctttggttggatattagttatttctatgagctcactattgtgagctgaaaggctaacactagtggatatatatgtccattgatgttagcttatttgttcacattagtgagctcttgtaaatatcaagagcttttactgagaatgttaagaaagtatctgtggaatgactatatgttaaatgatgagacacctgagagcataagtgtaaccctcaggcttgctatcataactgaaaagccgatgaataaaggaatgcaggtgatttatgagagtatgagggtaaaatgcgcaaaactttttttagttggctttttctttctcttcttcctgcgggatgcggaaagctgtataaagttcgagtatggcggcaattgtaagacaagcaatccattcgttaccacgtgttgtgaacatgaatgctccggtgagaatcagggctaatgctccgaatatttgttgaatgcgtaaacgtttcaaagttttgcttttacctttgatgggtgtgttcacttgtgccagtgcgataaaaccggcaccgacagtgtatatgtagggagcatacgcccatccggtgataaatacggcagctccggcaagagtcattatagcgccgacaacgaacagtgcgggtattaattgtttcattctctattcttcttcaaaaacgtaaatatcttcgttgggtttcttcatcaagtacttttcgcgggctatctgttcgattgcatccggattggtacttatttcgttgaggcgtttcgtattctcttcataatctgtgcgatacttttctatttcttcttttagctgactgatttcgcgttcatatccgagacggcgcaccaaactgttctcatccagaaaacctatgatgacagcgaatgcgacaatggtaataagatacttccgtctgcatatgaaattccaaatactgattagcttactcataacctacctttataaatatccgcaaagataaaactaataacttaaaaacttatctcttccgctttaaaacttctttctctatcccttattacttatcacttttttatgtacttttgcactgaaagcaaaaaataaagaaaaatagaggaatcccggatatggaaaactatattgtatcagcccgtaaatatcgtccgtctactttcgaatcggtggtgggacaacgggcgctgaccactacgctgaaaaatgcgattgctactcagaaacttgctcatgcttatttgttctgcgggccacgcggagtcggaaagactacgtgcgcacgtatctttgccaaaaccattaactgcataacacctactgctgatggcgaagcttgcaatcagtgtgagtcttgtgtggcttttaatgaacaacggtcgtacaatatccatgaactggatgctgcttccaataattcggtggacgatatccgccaattggtggagcaggtgcgtatcccgccacagatcggtaaatataaggtatacattatcgatgaggtacatatgctctccgcgtctgctttcaatgcttttctgaaaacgctggaagagcctccccgtcatgccatctttattttggctacaacggaaaaacataagattcttccgaccattctttcccgttgccagatttatgatttcaaccggattagcgtggaagatactgtgaatcacctttcttatgtcgcttcaaaagaaggaattacggcagagccggaagcattgaatgtgattgccatgaaggcggacggtggtatgcgcgatgctttgtctattttcgaccaggtgataagttttaccggaggtaatatcacatacaagagtgtaattgataatctgaatgtacttgattacgaatattatttccgtctgaccgattcttttcttgaaaataaggtaagtgatgcattgttacttttcaatgatgtgttgaacaaaggttttgacgggagtcattttataaccggtttgtcttctcatttccgtgatttgctggtagctaaagatgcagtgacattgcctttgttggaagtaggagc

SEQ ID NO: 11952 - DNA, 1194 bp, Unknown
  gut microbiota DNA sequence
gctctgtaatgagtgtgatttgaattatcgtgtcagcaaaaataagcgtttgctggtagaactgaccttaatacaggttgcgcagcttaccattgagggggatgatgtgagtggtgggcgtagccctaaaaagactataaaacccgtattcacccaacctgccgcagcacagcaaccgcaggtgacttctgctgcttcagcgtctcagactgctgttcatcaacaaacgcctgttcgtcagccgcagacacctgtggcagcgcaggtggtatcatcgtctacatcatcatcatcttcttcttcttcgaattccactacttccgttccgtctcaaagtgcgggaattgctcagagagggcagggagaacggaagattcctgtcatgaagatgtccagcctgggggtatctatcaagaatccgcagcgtgatcaggttactcagaaagaaatgatgccacagcctggtaaagtacaacagactgtagaagaggattttatctttaatgaccgtgatttgaatttctattggcagcagtatgccggtcagttaccgaaagaggaagattctcttacgaaacgtatgcagatgcttcatccggtactgctcaataactcgacgacttttgaggtagtagtggacaatgagattgctgcaaaggatttcagaaatctgattcctgaattgcagaattatcttcgtgtccagttaaagaatagtaaagtggtgatgacagtgcgggttagtgaaccaacagaaacggtacgtcccgtcggccgtgtagaaaagtttcagatgatggctcaaaagaatcaggcattaatgcagttgaaagacgagttcggattggaattgtactagtccttaatggaggggtataaaaatgagccacattcgattgattattgtttgataagaaatcggatgggctcttggtcttaatgtaatctgttgttcatgcggttttcatatccgtctgaaggcgttttgtaaggcatgacaatccacaagataatatagatgattacaccagcgaaagctgtgaagaatgtggctaatacgtatacgattcttaataaagttgggtcccatccaaaatattcggctattccggaacatacacctgcaatcattcgattggaagatcgggtcagtttcttttcattttccatatttattgtataattgtttagtat

SEQ ID NO: 11953 - DNA, 754 bp, Unknown
  gut microbiota DNA sequence
atattaggtgtgtttgcggagaatcagaatttaattcaatcaattattaattctaaaaacttatatctatgttcagtaaacaccctaaaggtttgattgctgcggctttagctaatatgggagagcgttttggcttctatattatgatggcgattttgacgttatttatttcagcgaaattcggattgtccgagacgactaccggatacatctattccgcattttacgcatccatttatattttagctttagcgggaggtgttattgctgataagacgaaaaatttcaaaggcactattttggtgggattaatactgatggctgtcggttatttgattattgccattcctactcctactccggttcctaatatggctctttatttggggctgacttgtttcggacttttagtgattgcttttggtaacggcttgtttaaaggaaacctgcaagctctggtaggtcagatgtatgatgatcctaaatattccaatcttcgtgatgccggtttccagatattttatatgtttattaatatcggtgctgtttttgcaccgtttattgctatcggtgtgcgtaactggtggttgaaagtgaataactttgattatgatgccactttgccggagttatgtcatcaatatttggaaaaaggaaaagatatggctccacaggctatggaaaatctgactacgttagctaacagtgttgtcttggataaaactcatgtaacagatatgggcgtatttgtaaa

SEQ ID NO: 11954 - DNA, 1563 bp, Unknown
  gut microbiota DNA sequence
gggggttaactgtccgatcaggtacgttccgatccagagagcgaatcctgctattgacatggccagcccgcgaactttggtgggatacatctccgagagaagcacgaacactacagcgcagatagacacggcacaacagaatacatagaacaggaagaaaacaagaaggaagaggcttgagacattcagggaatctccaaagaggaaataaaggccgatgagaatcaaagagacaaccattcccgaaactccgtaataaaccagcttcttacgaccaactttatcaatgatgacaagagccaaaatggtggtcaaagtattaacaagtcctaccagaacttggtaaaaaagagaatcacctcctgaaagtcctgcattctcaaaaatagaaggaccataataaagcaccgcattgactcccataaattgtcccaaaatagcaatgcatacacctataattactgccttcaaaatgccgggtttcatcaataacgaccattctgagcttgtttcagcagtcaaaactgattgagtttctttcaattggttcgttgcttctgtaatcgaattatagattctctccagaatatttatagcctttctctcctgccctcgtacaattaaccaacgaggactctccggtatgaaaaatatgattataaagaataatatcgcaggtaacgtttccatacctaacatacctctccatacctcagttataaatatcttatttaatagaggaacacccaataaagcaccactttccgaccaagccaacaactgataattaaccagataagctcctaagaagccaacggtcacagccagttgatataaagagactaaacgccctctatactgtgctactgaaacttccgaaatgtaaagaggagacactatggaaacaacgcctatcccgacacccccaattatacgatacaccactaattgcgtaaaatccgtacagagagcacatcctaaagccgatgcggagaagagaatagcagaaataaccatagtcaattttctccctaatttatcactcaaaataccggcaaaaaggactccaatgattgaaccgaccaacgcacaccctacataccatccctgctgcaatgcatccagttgaaaaagctgagtaacctgagcaattgtaccggatataactgccgtatcatatccgaacaaaaaaccgcccaaagcagccacaacagaaaggaatataagatagccaaaattaatagtagattgcataatattattttatttcaaaatattctatatatctgttatacaaattccctgcttgcaagtaagcagattgcggactcataaaatgagaaaattcaaaggttatagccttatcatatccggcacgcttggcagcttccaatttcatccgaagtttatcaaacttaatgggtagaaaacgaataggcatatcacgatcaaaagattcggcatttgtccagcattgcatcccatacttatctgctaattttttattgacagaaaagaaagcatccaattcatcataatcaatatgtccatcttgaaaagcac

SEQ ID NO: 11955 - DNA, 140 bp, Unknown
  gut microbiota DNA sequence
ggcagaccgttctttgctatcggtttcccgaacatggcaggaggttacgaggttcgcaattccttttttaagggctgcatcgccccgaaagacatcacccatatacggcagcagggagagccgagagagaaatgtttggt

SEQ ID NO: 11956 - DNA, 7804 bp, Unknown
  gut microbiota DNA sequence
cacctcgatgtcggctcgtcacatcctggggctggagaaggtcccaagggttgggctgttcgcccattaaagtggcacgcgagctgggttcagaacgtcgtgagacagttcggtctctatctatcgtgggcgtatgaaatttgcgtggctctgacactagtacgagaggaccgtgttggactgacctctggtttaccagttgtgccgccaggtgcattgctgggtatctaagtcgggattggataagtgctgaaagcatctaagtacgaagccagccacaagattagatttcttagggtcgtcaaagacgatgacgttgataggatgcaggtgtaaaggtggtaacatcacagccgagcattactaattgcccgttcactttctttcggacttgtacggggcgcgatatatacgtttagcttgctagacactgaagttttacttttcatcatgtcataaccttattgaatttcttcaggtggttatagcacgagggttccacctcttcccattccgaacagagaagttaagcctcgtcacgccgatggtactgcgtaacagtgggagagtaggtagccgccgtttttaagaagcctcgcttgtctattgacgggcgaggctttctgtttttcttcataatacctattaaaaaagtgaatatttactgataatttgtatgttatgaggatatttatttgtatctttgtcgcccgaattgtaagctaacgattttaaaaagagagaagctttgggaaaatttgataaatacaaaattgacttgaaaggtatgcaggcagactctgctaagtatgagtttgtgttggataacctttacttcgctcacattgatggtcctgaagttcagaaaggaaaggtgaatgttacattgaccgtaaaaagaacctctcgtgctttcgagctgagttttcagacggatggaatggtatgggtaccatgcgaccgttgtctggatgatatggagttgcctatcagctcttctgataagctgatggtgaaatttggacatgaatatgcggaggagggagataaccttatcgtgattcccgaagaggaaggagaaatcaacgtagcatggttcatgtatgagtttattgcgctcgctattccgatgaagcatatacatgctcccggtaagtgcaataaagcaatgactagtaaattgaataagcatttgaagacaaatgcgaatgaggatagcgatgtagatgacagcttcgatgcaggtggtggcgaagacatcgtaatagaggaagaagtggaggaacaaatcgatcctcgctggaatgaattaaaaaaaatattagataataattaaagttttaagaaaatggcacatcctaagagaagacaatcaagtacgagacaagcgaagagaagaactcacgataaggcggtagctcctacattggctatctgtccgaattgcggtgaatggcatgtttaccacactgtatgtggcgcttgcggttattacagaggtaagcttgctatcgagaaagaagcagctgtataattagtacagtcatactgaaaacagcctgagggtaaatctctccggctgctttaagtattatagtattgctaatttaaaataggtttgatggaaaaaataaatgcagtaatcacaggagtcggtggatacgttccggattatatcttgactaacgacgagatatcaaagatggtggataccaacgacgaatggattatgactcgtattggagtaaaagaaagacacattctgaatgaggaaggattaggcagttcgtatatggcgcgtaaggctgccaaacagttgatgaaaaaaactggcgccaatcctgatgatattgatttggttgttgttgctactagtactcctgactatcacttcccttctacagcttctattctttgcgataaactcggactgaaaaatgcatttgctttcgacttgcaggctgcttgtagcggttttctctatttgatggagacggctgcgaattttattcgttcgggaagatataagaaaattatcatcgtcggtgccgataagatgtcgtcgatggtcaactatacagatcgtgctacctgtcctatctttggtgacggtgctgccgcttttatggtggagccgactacggaagatgtgggtattatggattcgatactgagaacggatggtaaaggattgcctttcctacacatgaaagccggcgggtcggtttgtcctccgtcttatttcacagtagacaataaaatgcattatctgcatcaggaaggaagaacagtgttcaaatatgctgtttccagtatgtcggatgtttctgctgcaatcgcggaaaagaatggactgacaaaagataatatcgactggattgtgccgcatcaggcaaatgtccgtatcatcgaggcagtagcccatcgcatggaagtgccgatggataaagtgctggtaaatatcgaacattacggtaacactagtgccggtacgcttcctttgtgtatttgggattttgaggataaactcaagaaaggcgataacatcatcttcactgcattcggcgccggatttacatggggtgcggtatacgtgaagtggggttatgacggaaagaaggaataagtacaaaagttactgaactataacactcaaaaacgcatcctatttcgattcgatgcgtttttttgtctcaaccaataaaatgaagagaaatgcataaagctggttttgtgaatatcgtaggaaatccgaatgtcggaaaatcgacattaatgaatgctttggtgggtgaacgtatttcgatcgctaccttcaaagcgcagactactcgtcaccggattatgggaatctataatacggatgagatgcagatagttttttctgatactccgggagtattgaaacctaattacaaacttcaggagtctatgttgaacttttctacttcggcattgacggatgcggatatcttgctttatgtgacggatgtggtagagacgccggataagaataatgagtttatggcaaaggtgcgtcagatgacggtgcctgtattgttgctcattaacaagattgaccttaccgaccaggagaagctggtcaagttggtggaggattggaaggaactgcttccgcaggccgagattattccgatttccgcagcttctaagttcaacgtggattacgtgatgaagaggatcaaggaattgttgccggattcccctccttatttcgggaaggaccagtggacggacaaacctgcccgtttctttgtgaacgagattatccgggaaaagattttgttgtattacgacaaggagattccctattcggtagaggtggctgtggaagaattcaaggaagaagccaagaagattcatatacgggcagtcatctatgtggaacgtgaatcgcagaagggaattatcatcggcaaacagggaaaggcgttgaaaaaggttgctactgaggctcgccgtgaattggagcgtttcttcggaaagacaatcttcttggagacgtatgtgaaagttgataaggattggcgcagttcggataaagagttgcgtaattttggttatcagttagattaagagtattcatgcgactgtgatagtcgtgaaaaacaaggtattgaactatgggaaatttagttgcaattgtaggacgccccaatgtgggcaagtctaccttatttaaccgtctgacgaagactcgtcaggctattgtgaatgaagctgcggggacgacccgcgacagacaatatggtaagtctgagtggctgggccgtgagttttcggtggtggacaccggaggatgggtggtaaactcggatgatatctttgaagaagagattcgtaaacaagtattgctggctgtagaagaagcggatgttattctgtttgtagtggatgtgatgaacggagtgactgatttggatatgcaggtagcagctatcttgcgccgtgcgaaaagtccggtgataatggttgccaacaagacggataatcatgaattacaatataatgctccggaattctataaattgggattgggggatccgtattgtgtttctgccataaccggaagtggaactggtgatttgatggatttgattgtcagtaaattcaagaaagaaacgtcggagattctggatgatgatattccccgttttgcagtggtaggccgtccgaacgccggtaagtcttctattgtgaatgcttttatcggtgaagaccgtaatatcgtgacagagattgcgggaacgacccgcgattctatttatacccgttacaataagttcggctttgatttttatctggtagatacggccggtatccgtaaaaagagcaaggtcaatgaggatttggaatattactcggttattcgttctattcgtgccatcgaaggttcggatgtgtgtattctgatgctggatgctacaagaggtatagaaagccaggacttgaatatattctctttgattcagaagaaccagaaaggactggtagtggtaatcaataaatgggatttggtggaggataaatcagtgaaagtacagaaaacatttgaggaagctgtccgttcgcgttttgctccgtttgtcgatttcccgattatttttgcttcggcgctgactaaacagcgtatcctgaaagtgcttgaagaagcccgtaacgtatacgagaaccgtacaacaaagataccgaccgcccgtctgaatgaagaaatgcttccgttgatcgaggcatatccacctccttcaaataaaggtaagtatatcaagattaaatatatcacacagttgccgaatacgcaagtaccttcatttgtctattttgccaacttgcctcagtacgtgaaggagccttacaaacgtttcttggaaaacaaaatgcgcgaaaagtggaatctgacaggcacaccgattaatatctatatccgtcagaaataagactcaccacagaggacacagagaacgcagaggtttaatataaaaagcaaccgactcttatgaatcggttgcttttttatgattggagatattatgagatactcaccgaatcatttttgattatttcggataaatccattatttccctctgtgtcctctgcgtcctctgtggtgaacctatttttccaattggaaatctttgcggcgtagtacgaaactattactcaagtacttttcacgcacaatctggttctccgacaattcttccggcgtgccttgaaaaagaatctttccttcaaacagtagataggcgcggtcggtaatgctaagtgtttcctgtacgttatggtcggtaatcaggataccgatatttttatctttcagtttccatacaatctgttggatgtcttctacagcaatcgggtcgacaccggcaaatggttcgtcaagcatgatgaatttagggtcaatggcaaggcaacgtgcgatttccgtacgacggcgttcgccaccggacagctggttacccttgttcttgcgcaccttttgcagacggaattctgctatcagactttcgagcttttccttctgatactctttaggcttgttggtcatctcgagcacagcagcaatattgtcttccacactcatctggcggaatacggaggcttcctgtgcaaggtatccgattcccgtttgtgcccgtttgtaaactggatatttggtaatctccaagtcgtcgaggaagatacggccttcattaggggtaatcaacccgacggtcatatagaatgaagtcgtcttaccggcaccattcggtcccagcaaacctacaatctcaccttgcttcacattgatggaaacgtggcttacaacggtccgtttaccgtacttcttaaccaggtcttccgtgcggagcaccatcttgctttctgccatattctagttattttgcggcaaatgtagtaaaaataagctgaaataatgtacatttgcagacaaatagtgtgagttatgataaaagcattgagaaccgtcggaagatattttatgctgatggggcggactttttcccgtcccgagcggatgcgtatgtttttccggcaatacctaaacgagttggagcagctaggtgtaaactccatcggtatcgtcctgctgatttcgtttttcatcggcgcggtgattaccattcagattaagttgaatatcgaaagtccgtggatgccccgttggacagtgggatatgtgacacgtgagattatgttgttggagttttcttcttctatcatgtgtctgattcttgcgggaaaggtcggatcgaatattgcttcggaactgggaaccatgcgggtgacacagcagatcgacgcgcttgaaatcatgggagtcaattcggccaattatctgatattgcctaaaattacagcaatggtgactgttattcctatattggtgacgttcagtatttttgccgggattatcggtgctttttgtacctgttggtttgccggtgtgatgaatgccgtcgatctggaatatggtttgcaatatatgtttaacgaatggtttatctgggcgggtatcatcaaatctctcttcttcgcctttatcattgcaagtgtatccgctttcttcggatatacggtggatggtggttcgattgctgtgggaaaagcctcgacggattccgtagtatccagcagtgtgttgattttgtttgcggacttggtattaactaaacttttgatgggatgattgatattaaaggactttataaatcatttgatgacaaaacagtattgagtgatatcaatgcaacttttgagaacggaaagacgaacttgattatcggtcagagtggttccggaaagacggtgttgatgaaatgtattgtggggttgctcacaccggagaaaggggaggtcttgtatgacggacgtaaccttgtgctgatggggaagaaagagaaaaagatgcttcgcaaggagatgggaatgatcttccagagtgcggctcttttcgattccatgtcggtgttggataatgtgatgtttcctttgaatatgtttagcaacgatacgttgcgcgaccgtaccaaacgggctatgttctgcctggatcgtgtcaacctgtccgaagcgaaagacaagtatcccggagaaatcagtggaggtatgcagaaacgtgtagctattgcacgtgctatttctttgaatccgcaatatttgttctgcgacgagccgaactcgggactagacccgaaaacctcattggtgattgatgacttgattcatgacatcactcaggaatataatatgaccaccattattaatacgcatgacatgaattccgttttgggaatcggtgagaaggtgatttatatttatgaaggtcacaaggagtgggaagggacgaaagacgatatcttcacttctaccaacgaacgtctgaataactttattttcgcctcagacttgcttcgtaaggtgaaggagctggaagtacagaatatggaaggctgattatatataggcaataaaaaaacttctgtcatcgggtggcagaagtttcttttttcttagctatgtagcgtcggcatttaagctttaggtctagcttctttaactaccatggtgcggcccatgtactcagctccgttcaattcagcgatagctttagcagctgcagcatcgtcttccatttcgatgaaagcgaatcctttggatttaccggtttcacggtccataataactttgactgatgatactgctccgtagggatattcagtaaatgttcctctttctaaaaaatcaagagaaaagctcacgtaaagcaaagctttt

SEQ ID NO: 11957 - DNA, 1188 bp, Unknown
  gut microbiota DNA sequence
aacggattttaccgattttgaattgagaataggtggctggtaagctccgtccagtgcgatatacattcccatagtcagtgcaacgatggcatagaggaatcggttgctgagtgtatatttgcgttgatagaaccaccagcagatgccaagcaatgtaggaatggcaattaatatgaaagagccgattccgttaatgttctgtatggcatgcaggaaattgatgttgttctgcgcatgacggccttgaaagattgtttccgggataagaccgcatttcacggcaatgaaacaggcaaacaatagtaaactcagtacggcgaggatactaccgtatacttttatcactttagagcgtttcttcaccagatagaataaatattttgccaggaagtatgcgatgaaaggataaataggcattaggtatacgctacgtttactttgcggtatgcaatagaatatgaatgtggcaactatgctggtaagagcgaacaaatccaccggatccatattcttgatccatgcggtaaagcgtttccaccaggcagccggctggatactgaatttatgataggtgagactgaaaagagaaagcagtgccaataacgtccaaggtacataaccggcaaacagggttacgaagttgtaatgccagggattcacgcaggagtcgtaactcattgtgttggtcatacgtccgaagttctcttccatgactaatgcaaggaattcttctcccccttgttggtaagcggctatgtaccaacagaacggcaagatgagtgaaaggatggcccatgcggaaaggagaaggaaagccctgaagaagtttactcctctgagcagaaggaatacacctgtaaccagacaggggatgatagtgcctaccggacctttggtcaacgttcccaaactcataagaaggatagccagccagggaatgcctttaagccctttctcgtaccatctgtaaaaacaatataacgcacagacggtgagggctgtcagcaccatatccacccggcagttggctccggcacgatgcaactcgaagttggtcaaggtgatgaatgcggtgagcagcgccacttccgttccttttcttttggcgaagaaaagaaagccgaaaagagtcatggagattagcgcgatggccgatggcaaacgggaagtcatctccgtaacctgacc

SEQ ID NO: 11958 - DNA, 1671 bp, Unknown
  gut microbiota DNA sequence
cggggaaatagataatattcgtattttcccctgtacagtcaatgccgtgcgtccgtcgggtacaagcgaggattccgactcattatcctttcacggattgctcgtcactcattcctaaacgaccggaaatacaaagcagataggatacaggctgcacagactcagaggagcggtcactccaatctgtcgtcaccagcaatgctccttgtgtcgggtgaggagtgtgatatacatcatccttagcacaggaggacatcagaaaaacagcaccgcaaatgagagcggcacatgaagttattttaatagtttccatatcagtgtgattcctaattggttaataccccaatatttttttgtcttacaatctttgcgcacacgaaccttattgataagcgtgtattcgtcataatcggcgtaagtataacctactccggcatgaaagtcgagcgaaagattactgttcagtcctagctgatacccgcctgtaaatcccccgccctgatagtcaccctgacaaccgatattaccaagtttgtagtgaaactcgcccgtatgatacatcgctccgagaaagctacgacttttcccgcccagatagtaacgtatttcaggagaaaccttccaaagagcgtagcgacggtttttatcatcccaattccatgaggtccaactaccgttgactaaaatacccaagtggcggtttacacgccattcaacacccagttcggggagtcagcgtagcccaacgaagcgggttagcgcgtaaagcaaggcgataagacggatgtgtttcagatgaagccagaggtttctccgaagaaacgccgacagatgttgttcccggacaagcttcctgttcagaattttccgaaataacctccattaccttttcctttattatagatattacagaatcctcttttacatttgccgccgtcccattttggggtaaacgaagacgaacgatgaccacatggcacaaatccccataagtttcagcatgattacgagtgatgaagcagttttcgtcgattcctttgctcaggataagttccgatttcacacgattactgcgaattttagctagtttcagattctccgcaaccgtgggttccgaaacacaataaccatctaccagcaaaggaacttcaccactcaaaatagcggctttgtggttttctacaagagataacagatgatccaattgcgtaccgttccctttccaaggaatatagaacatattcttatgagaaacaaaacgaaagacataaagagtgtcgggtgtctgtgccatagaaacagcaggtagtaagagcgacagaaacaaaagcagaagataaaatttgtgtatctgcattgtcgttgagtttttaatgaatattcagtccttttcattttccgttacttataattattattaatggccttcacctttttgctataactcgttattcataggcattagcgggtgaagggtggcgtcttcacctgcaacacacctccgattcattagcagcaaacttccttttttataggcactaaacttcttttctattatagataaacttctcttcttgcgaatataaaattctttttcactaatcacaatctataaacgcaagttgcgtttataaaaacaaagattgcgtttataaaaacaaaggcttcgtt

SEQ ID NO: 11959 - DNA, 8031 bp, Unknown
  gut microbiota DNA sequence
agtatacatagatagcttaaaaagaggaaagcgggtgaaacatacgcccttcacccgctaacgcctatgaatagggtattatagcgaaaaggtgaagggcggtataaaaagaccaaatctgtcggaagagaagctatcgggtagcgttgtataacttaccgaacaaccgaattaataactgattttcactccggcaaagaagcttctcggcaaggacggaccatagatatatccggaatcgcggtcggctcctttatcaaagtcattctgataggcattgaaaatattctgtactccggcgttcacttgcaaattcacagacttgtagagtttaaagtcgtatgcagccttcaggcttatgtcgaagaagtccttcgtattcaccgttatcggattttcaaggaatcccggaacaggttcgtgaggaaccagcatcgaaccggtatatgtaccggaaagagcaatagacaatggttttaccggagtataagttgctgtaaaatagccgtaagtattcggcgtacgcatcattttcttcacagccggagcgtctggattccacacgtgcggttcgttgtaatggctctgctgcaaagtgactcccgcctgaacctggaatttagtcagatatgccatctttccttccaatgtcagtcccatcacacgggctcccggtgcattgtatcgtgtacgtgtcaggattccatccaccacctctccgtcggtaagtgcaaatacatctgataactttgtataaaatccttctaccaggaagttaacttgaaacgcaccaaaacgatggtaaatatctgccgaggcactcaagctctgcgacctttcttctttcagattatcagccagttcgaccatcgctacattaccgcctacattctccacatgcaagtcttcatcgaaagcctgcggggcacggaaaccggatgagtaactgaaacgaagattgatgttttccgtcggattataacgcagattggcacgcggactgaatatcacatggtcaatcaggttatgtttatccaaacgaccgccaatcagaaatccccaatgttcattcttccattcattttggaggaaggcactaccgatattcactttctggtctaccgtacgattatatccccacatattatcttccagtttatcctgattgaattctattccggcagtcaggtcggacggcatgaaaatacatttcccgaaactatagacatattgcgatcctgccatccagttcaagtcggtggtgtttccgtaagcatctaacggatctctatcacccggtccataatagctgtcacgattgatatgctgcgctgatgcaaacacattgaaacgatgtttctcgttaggagagaaataatcaaatttcagtcctccgccattgatagagtgctcggtctgctccgccacattcgcttcgtgaggcgggcggctcaataggtctcctcccctacggaattcttccatgtggtgatattcaaaagtcagtttcgaataagccgttgttttcaaaaatgaacggaacccgactgtctgcccgtgcaacttgggtatttcggaatatccgtcaccatcatggtcatacgcagaacgatggcggttctgcccgaaaatatacaaaccggcacgctggtcgtccgtcacaagtgatgcattcagtgctgtactgttgtcaaaagcatcgccatcaccaatacctgttatggtatgcgacaacataccggaattacgtataggttctttggtaatgatgttgattgttccggcaatagcagacgaaccgaataaagcagatccacctccacgcatcacttccacacgttctatcatgctggcagggatctgctcgatgccatacacaccggaaagtgcactaaagatgggacgggaatcgagcaggatttgcgtataaggaccatccagtccattgatacgtacttgctggaagccgcaattctgacaattagactctacacggacacccggctgaaaactcaatccttgcgccaaagtcgtggaattggtattctcaaagattttcaaatccaccacattcaccagcgtcggagccaggcgacgggtagtctcattacgattggcagatactactacaccatccaaagcaaccgcatcttcttctatctcgaaatcttcttccaatgtgcgccctttcttcagcgtcacattccgtctgacggttttataccccaccgaactaacttcgagcacaaaattaccttcgggaagattcttcaagaaataatgcccggtagcatcggttaccgttccgatggtagtacctttcaaggcgactgttatatagggtaagtgttccttagtgtttttatcaagaatatggccaatgatattggcgtccgatttacgtaattcaggatgattaggatattcatgagcttgtccttcaagggcaggcaacaatgcgcagcacaggcagacaagcgaaaagatgtatttcttcattttccgtttgttatttgttttcgtttaatacttgtatgtacatatagataatcccctgcctcaaatgagacatggtaccatcatttaaatggcgaaaagacaaatagcaggcggagcacgcagtgctgtcactccatgataaggagcatgaaaatgtgtatgcggcaagcgtccgagcagcaaacacaatagaaaagaaacgaaaaggggaagggcaaaaacaacagtcgcactatccgctatcagatgagacaggatatggatgtgcaacaattcgactgttgaatgttgatgcgccgtcccttgcttaaacgggtgcgaatggacaattgtcacgccattaaccacatggacgtgggtaaagaatgtaatacttgccaaatacgatataaaaagtatcggcaagaaatagcgtgttatatttaaaaccaatcgtttcacctcattttcactttgggacggcaaagatacaaactatttatttcacaatcaatgattagacaaaatactgttaatataccgccgaagccatgatttgtataaacagaatcaaaaataccatagcaatcggataaacagtcgcgtaagctacactaggtatgttgctgtctaccattgaatcggcagcagcaagtcccggagtactcgtcatgcctcccgttatcgttcccagcaaatcaagcagactgattttaaataccagacgtccgacaatggcggcaacgagcatcggcaccaatgtgatggctgcacctacgccaaacatcagcaatccgctttcctggaaagtggctaccagattcttaccggcagaagttcctacttcagcaagaaaaagaagcagacctaactggcgcagcaattgattggctggtccggacatagaccagatgatggggcccgtcttaccaatcgcactcaacacaagggctaccatcaacactccaccggtcagtcccggagagaatgacagactgtcagagaaagatatatttattttgccgaacagcactcccaatacaatacccatcgcaatggggaagaaatccgtatcagacagtttcttcgcattgttacccagcaggcgggctactcctttaagtccttctttctcaccgacaaccatcaatttatcgccaaacttcaaagcgagatcgggagatggagacaaatcaataccgcttcgacggacacgggtcactgtacatccaaagtttttctgtaagttcaaatcacccaactgcttatttatcatgtcctttttagtcaatagtaaagattctatttcctgcgttttatccaaaggcaactcaccttcttcacgcttgccaatcaacacggcaagctgattcaacgactcttcgctacctacggcttgtatataatctccttcacgcagcaccgtatgggccgtagggatggatatttcatcattatgtttcagacgtgaaatgacagcgcccgtcatggcgcgcgcatttatctgcatcagagtacgattgaacacatgagaattggtaacccgataaatgcaagtaatcagctccggaaattgtccacgacgttctatctccaagcggcgggcttctttatccaaatctacccgcataatcttaggcagcagtttgacaaacagaatcacgccgatcactccaaacggatatgcgataccgtaagcgatggacgccaaaggagaatgggtactgtcgatagcaaccgccagacccggagtactggtcagcgcaccggcaatcagaccgacaacgctcggtgtatcaatatcaaatgcgtacttcaacccgactgcagtcaagcaggcagaacaaataataagcatagtaataagaatgagcgtctttcctttactacggaaagaatcgaagaatccgggccccgcttgaataccgatggtgaatatgaagagcaccaaaccgaagtttcctaattctttaggaataataacaccataatgcccgaaaagaagggcaatgaaaataaccgccgacacatcaagagataatcctctgatctttattcttcccagcataaaccccaacgcgactatcaggaaaagggagaaataagaggaatgcaataagtcagtaaacataaaaataaaggttagttagttaagggcgcgaaggtacggattttatttaagccgtacaatattccttctcacaagaagcgacttcctcacgtttaatacctacatataactaaagcttggttatttttcatttcttttaggtattttccatccttatagttccctataactttgcaaccgaaaattaaacaatcattatctatcaaaattaacagagtatgaaaatcttgaacttttggatggttgcctttatggcactgtcactctcaacaacattgacgtcttgcagcgatgacgacgaaaagaaagaagaaacagagatgaaaacattgaccgttgacgctactgcttataatcaatgggtatatgtaaatcttaaagatggcaagacccaaaccgtaactatggaaggaagtgatgacgaatctgcagttaccattgactggcagattgccatacatcgctatacggaagtaaaaaccaatggaggctctgttgtaaaaacagatatgacggatatgagcaaggtgactacaattccgacaggcggatatgtcgcagatgaaagtgaacagaacatactcgtcagattcgctatgccgccaacagatgattgctacgtgaaaagccactgtaatactgcaatggtatggaccgaaggttcggctatggctggaacattggcaacaaccaacaatgtgttcgttctaaaatgtaaagacgggacatatgcaaaactccagttcaccgattttgcaaatgcggataatgtaaaagggcacgtcacgtttaattacgagtatcccgttaaataaccaatcatgaaaagaatctttatgatgttattgggtgtcctatccacgttgtatacgacagcggagacggggtacctctacgaaaataatgagaacgataacgctactacgcggtgtttcaaaggagttgtattagatgaaaacggcactcccctgcccggagcgtccatcgttgtaataggtacgacaatcggtgccggcactaatacacaaggagagtttacattaagtttaagagataaagggtttcctatcttgcgagccagtttcatcgggtatactcctgtggaatacaagattcaaaacaatgaacacaataacattgtcatacgcctgaaaccgacccaaagctcattggaagaggtcgtcgttacaggtacacggacagaaaaaccgctcaaagatgccccgatactaaccagagtgatcgggcaaaaggaaatccaggctttaaatcctatggatatagagacccttttacagtatgagctacccggtatacaattcaattacaattccatgagtaaattgccggaaatcacttatcaaggaatgagtggcgaatacttattattcttggttgacggtgaacgtataagtggtgaaggttcggatcataaccccgatttcagccgtttcaatatagatgatattgaacgcattgaagtcgtcaaaggagctcaatccactctctatgcttcaaatgctttgggtgctgtgatcaatatcatcacgaaaagcgccaacagaccttttacaggaaatgtaaacgcacgttatggcaataacagtggacaaaaatacactgtttcaggtggaaccaaacaaaaccgtttttcttctttcactaccatatcccacagaagaagagatacatacacaatttctgatgacaaagaaacagaaagaacagtcatcaatccggacggttcaatcaccatcgataaaagtgctaacagcagtaccattcggggatatcagatctgggatgcctcgcagaagttcggttatgcttttaccgaccagtttagtgcggaaataaaaggaacatattatcggaataaacgcgataatgctacggctaatgcaaaaaccaatgatatattttcaaactactcggtaaatggtaaattaaaatatttgtttaatgtcaatcacaggttggatctttcctacatcttcgatagttatagaaaggatatagactattttgtagcaggatataccaaaaagaactacgataacttcgtgcaaacagcacgtttgaactataccggaaatttcaacgaccaacatacatttacagcaggactggaagccaatcttgaatatttaaaacattatatgtttaaagacagtaccaattataaccagcaatcatacgtgttctatgtgcaggaagactggaaaatctccgagaagttcaatctgatagcgggcatacggactgattaccattcccaataccacttccgtatgactcctaaactatcggtaatgtatcggccggtagaactgttaaccctgcgtgtcggctatgcacaaggctatcggacaccgactttaaaagaactgtatgaagaatatgacatgggaggtctggggatgtttaccattcatggtgatgaaaatctgaaagcagagaatagccagcagttttccctgtctgccgaaattaacaaagacatcttttatgcctccatatccggctattacaataaattcaagaataaaattacactagcttatcttgataatattgaagacgggaaaagtatgccggacatgaaatacatgaattccgacaatgctgaaagtataagtatggaagctattgcacgagtaaaaatggattgcggactgatgttacaaggttcttacgcatacgtccatgaaaaagaagaatataaaggatacaatttatccatgacacggcctcatagtttaacattcaatgcatcctttaaccgtaaattcggtaaagtcaatacttccgtttcactgaacgggcagtggagttccaaattacacacatactcctattattccgttgacaatactataactgaatataattactctccacgtactatttgcaccttgaacactagtgcaagttttcctcgcggtatctctgtgggactgggtatagacaatttattcaattacaaagataaatctgccgattatggaatccagttaccacagcaaggtatcggctttatcggaactgtttcaattaatcttgccgatttgttcagactataacgagagttaaactacatacaaagctaaaaataagagaaatgaaaaagaaaagtaaaatcatcttaggtgtatgcatcgttgctgcagctctgatagggatgtccgtatggaatacctggttcagtcctacaaagattgctttcatcaacttccagaccatacagcagggaagtatatcgaaagccaacgacaattcatccatcaaactcagtgaagtatcgctcgacaacctcgaccgcctgaacggttacgacatggtattcatcaacggaatgggtctgcgtatcgtcgaggaacaacgtcaacagatacaacaggctgccgacaaaggtattcctg

SEQ ID NO: 11960 - DNA, 24488 bp, Unknown
  gut microbiota DNA sequence
atggatacctgcatccatgaagtgatggacgtcttttttcgccccgaacttggtggaatcattgttgagaatgtagatgtgaatggtaatctaatagattgctttgaaggacggcagattacccctggtcacgcgattgaagccatgtggtttatcatggatttggggaaacgcctaaaccgtccggagttaatcgaaaaggctaagaacatcactcttacgatgcttgaatatggttgggataaagaatatggaggtatctattatttcatggatcgtgatggctatccaccacaacagttggaatgggaccagaaactttggtgggtgcatatcgagacgcttatttctttattaaaaggatatcaatttgcaggagacaaacagtgcctggaatggttcgaaaaggtgcacaactatacttgggaacacttcaaggatcaggaacaccctgaatggtttggttatctgaaccgccgcggtgaagtgttactttcattaaaaggaggaaaatggaaaggctgtttccacgtacctagaggcttgtatcagtgctggaaaacattggaagcaattagtcaaaaataaagaataatgaataaattaagaattatatcaatcctatttttttgtctgttcttattctcttgtggagtgaagaaggagaagattgtgtgttatggcgatgcacatagcaatctggctcagttgttgacagatgagggatatcaattacatttctgtacttctgtaacagaggctcttcggatagcttcagagcaggctccggttttattgctttgtccttcttatccagaacagggtacagtggtgacaagcgaggatttagccttgattcaatcgaagtctctgcgtgttttcatggactttcctcagcagatcggtgaacatttgtgtgtaaagacggataccatggaactggagcggatagtggtttgtgattcactaactcctcaacttccttctatggctttgatggcttttcaccgatgcgtgttgaaggaattggatttaacacctgatagtacgtatttggtagctgctagggtagcaggttttgataaagcggtatatggcttggccaatacaccggtccatccattgttgtatcagcagaataatcagttgatggtagctgctactagtatcagtaattttgcagtttgtcgttatcttcctgagcagcgtgtgcagtctatgtttgaatatattatgaactggttgctgcataaagaaggtgtaacattttcttcttggttgacatatgtgtcaccatcctatactgctaccgagccgttaccagaggaggctggaaaacaaagtattgctaagggagtggaatggtattataatggtcacttcttggtgcatccttcttggaaaaaagattgggcagatcagtatatgggtgatggtttgatgccggttggtcctgaattgccagctgacatgcctgatggtgatggttcgttgggtgtattggaagggcatatgtcaggtattaaatatgacggtgcgcagatgtatcgttactggatgcgtgatgatgttcaaggagaaacttcgttcgcttttgctgctgccggtacattactggataattcacaatatacaaaggtagctgccaatttactcgactattcattcactgaatatagagattcagtacgcaatgatccaaaatccccatcatatggtctattaggatgggcttatacacataaaggcacttattatggcgatgataatgcccgttcattattaggttctatcgcttcatcagcattgatgaataaccctaaatgggataagcaaattgttgagggcattgtaggtaatttccgtactacgggattaaatggatttagaggacaaaatattcttgagtctgatttacagaaacgcggatggaaatcatactataatgctaacctggtaaatctgcatgctcactttgaggcttggaattgggcttgctatctttggctttataatcaaacacattatcagccactgcttgaacgtgtgaaacgtggaataactatgatgatggaaggatatccggaacagtggtcgtggactaatggaattcaacaagaacgtgcccgtatgattctgccgctagcatggctctatcgggtggaaccaacagaggaacacttggattggctgcattttatgacaaatgaacttcttagaaatcaagtgccttgtggaggtattcgcgaagaactgggtgatgagtcaaaaagtctttttggacgtactccttccaatgcggaatatggcaacaacgaagcaccactaatttttgacaatggcgatccggttgctgatatgctttatacaacaaactttgcctttgtgggtctgtgtgaagcagctaaggcaactcaggatgctacttacataaaggctgtaaatcaaatgcgcgattttttgattcgtattcaagtacgtagtgataaattcaagagcatagatggtgcatggttcagggctttcaattacgaagattggaattattgggcttcgaatgctgatgccggatggggggtatggagcactcttaccggatggattcagagttggattgtgggtacacagtttgttcttgaagaagattcatcattatgggatattgctaaccaaaaagatgtttctactgttgccactaaagtaattgaggaaatgataacacgccaactttaaataaaatatatacatattattaataaacttctaacttatgaaacacaaagctatgcaaaaaggtcgtttttgttctatgagaatattattcttctcattaacaatactttttgtatgcgcatcgaatagttatgcgcaaagtacagtcaatggagtcgtcatagatgcgacagggttgccgttacccggagtcagtgtgaccgtaaaggggagcgcaacgggcacaactactgatcttaatggtcattttaccttgaatgcacccaggtctgctacattagtactatcatatataggtatgataacacaagaggtaaaagttaacagccgttctatgatcaatgttacccttcaagaagacattaatagcctcgacgaggtggtagtagtcggttatggtactcagaaaaagatccatcttacaggatcaatatcttcggtatcttctaaagaattattgaagtcaacaacaagcaacgtttcgcaagccttggtcggcaagttgccgggattgatatctcaacaagccaccggagccccgggagctgatgatgtttcattgttggttcgtggacattctacatataatggaggtgatggcccccttattctggtagatggtgtagaacgaagcatggcgtatatcaatcccaatgaagtggaatcagttactatattaaaagatgccgcctcgtgtgctgtgtatggaatgaaagctgctgcaggtgtaatattggtcactaccaaacgaggaacagagggcaaaactgccattaattataaagggtcgctcactttgtcacatgctactacgctacccaagtttatgaatggtacacactatatgcagtggtataactatgctcgtcgcatggatggtgagaaagcctactttaccgatgaagaaattgccatgactaccaatggagatcctaccgatggctttgaaaataccgattggcaggaacctatttatcgtactactttaatgcatcagcacaatctttctatcagtggtggcaacgagaaaacccgttacttcctcagtggcggatttatgaaacagaatggcttcattaaaggttttgagctggaacgtggtaactttcgttcgaatatcgatacgcaagtaaccaaagatatcagtgtgtcacttaacgtggccggtaaaattaacgactattatcagccaggtggcgacagttatgagaatcaaacgacgaataatgtggtgggggtattgctttatgccgctccgtttgttccactcgaatatgaagggatgccgacatctggttatcgtggtgcttccaatcctgagtatgcagctggacattcgggctatagtaaaacgcgcaccatgcgtctggagacatcggccaagatagaatactctttccccttcctcaaaggtttgaaagctggtatgtttgtgggttgggactggcaagatcgtgattcacgcagcttcaaatactcttacgaattaatgctttataaacccgagtccaagaaatatgtacgtcaatatgcttctaatctgcagccaacaggggggatgtcagtcggtgacgagaaagaacagcaagtagtattacgcccttctatctcatacaaccaaaagtttggtttacatgatgtaggtgcactattcctttatgaacagactgagcgtaaaggaaatacgctgacaggctatcgctccgatttcgcacttctcgatattgacgagttaccctttggctctactattcatcccaccgatggtaacttttccagcagcatccgccagggctatgccggttatgttggtcgtttcaactatgcttataataaccgttatttggctgaatttactttccggtacgatggctcttatcactttaaaaagggtaatcgctggggattcttcccatcggcttcattgggctgggttgcttctgaagaggattttttcaaagaactctttcctcaagtggaacgcttcaagttaagagcctctttcggtatcttaggtagcgacaatgttgatcctttcctctatcgcaaacagtacgcatgggccaaaaacagtacagttttcggtactactccacaagcggtgaatactctgtataataaagtatcttacccgatggagaatcttacttgggaaaaatgtcgttctatcaacgttggtttcgaactttcggcatggaatggtcttttgggcattgagttcgatgttttctacaaatatacttacgatatccttcgttccattggcggtgtatatcctccttcgctgggaggccattatccgagtattgaaaacagtggtacatttgataaccgtggattcgagatgacagtaaaacaccgtaatcacattggcaaattcaattacagcttgaatggtaacctttcgtttgcccgcaataaaatactgcgtatgacgcaggctgacaatactaaaccttggcagaaccgtctgggaacatcggtagggtccatttgggggttgaaatcgctaggtctgtatcagacacaagccgagattgacgcagctccattacccatcagcgaaactccccgattgggtgacatccgttaccttgattataatggtgatggactcattagctgggacgatgaggtaaagattgcacgccccaccacgcctgagatgatgttctcgttgatggccgacgccaactggaaagggttcgacctctctgttcagttgcaaggtgctgccttgtgcgacaagttgctttgtggcgaatggaacaacggtgcacgtgaccagactccacttacgcgccctttctatgccggatgggataacgcgccttactacttggtggagaacagctggcgtcctgacaataccaatgctgaatatccgcgtctcagtacagtagcttatgctaataatgcgcaggtatctgacttctggaagcgtaatggtgcttacgtacgcctcaagaatgtgactttgggatacaccttgccacagtcatgggtaaagaaatccggtatcagcaatcttcgtctgtttgccagcggccacaacctttttactctcaccgagtttaagtacctcgacccagagtcggccaatgtcattcaaggttactatccgcagcaacgcacctttacgtttggtgtagacgtaacgttctaaaccctatgtacaacatctaataaaataaattagcatgaaaacaaaaaatctattactgggattggctctgtcgaccctcacattgcaatcgtgtaatgtgctcgatatcgatcctactgacacttatagcgaatctacagcctatgcttctataaagaacctggatctttatgtcaaaagtttctataacgtgttttatagcaatgccgatatcaatgtgggagctaatctggccatggacgatggtgtgagtgacctcattaaatattcttggttcaatgtagctgagggtagcgtgaacaaacttttttattacgacaatatgatgagtcctgatgctaattatcgctctaattgggatgacatgtacgagcagattcgccggtttaatgagtatttttacgatgttcatagtggctttgctgataatttggattccgatcagttagccattcgaactgccgaagttcgttttatgcgtgcttttgcttatcaagagctggtattgcgtcatggcggtgtaatcctgcgtatcaacgaagatcgagtggatgatcataaccagcgtgcaaaagctcgttcgtcagaagaagattgctggacttttatccttgacgaatatgaaaaagcagcccaaatcctaccggaagaatggacaggatcggaggcaggccgccttacaaagggggctgcttatggcatgaaagcccgtgccgctctctatgccaagcgttggcaggatgctgttaatgcagcattagaggtagaaaagctggagaaaaagggtgtatatcaactactttcaggaacttctaaggacagctatatgcaaattttcaatactgtgaataataaggagttaattttgcctgtctattttcaacagaagactaagcaacacatgtttaatcatttcttctgcccaccctatgacacagaaaaagcaggcttacaacctggtacgttgggcgcagccgctacgcctaccgatgagtatgcttctgcatttgatatcaaggtaggtaaggactggaaatcgtttgattggactcatttgaatgaatattccgaaggaccatggggaaaccgcgacccacgtttctatgcttctattctctataatggtgccaattggacaggacgtcaacttgaactttacgtaggtggtaaagacggatacatggatttctctacatcggcaagccaggactatgtgcgcactagtaccaccggttatatcttccgtaaatttatggatgaaagcgacaatatcaactacgtagacattgaaagtacatcctactggattgagatgcgttatgccgagattgttcttatcctttccgaggcctatgcccgtttggataagtttaaggaagcttacgactatctcaacaaaattcgtactcgtgtgggattgcctattttagctcagcagtctacctgggacaattatcttgaagatctctcgaaggaacgggtatgtgaattgggactcgaaggacatcgttggtatgatcttgttcgttgggatattgctcaaaaggtactcaatgggcaacgactgcatggtatcaaaattgaaaaaaccggttcaagctttctttatacccgtgtagaatgtgacacgcaggatcgtaagttccccaagaaatataatattttcccgataccttccagcgagcttcgaaataacataatgtgtgagcaaactcctagttggaaataattatggttaccatctaaataagtagataatatgaaactaaaacatatcataaatggcttttgggctttctcgttctgcctgacgggatgtgttgaccctgacgatttggtgagaaccgaaagtgaaatcaccgatcaactcatcattaccggacgatttgcaggtaatgagaacactgagtatgaaaccgttatcgatcgtgccaacggtactgctgtagtacagactccctactacatctcagatacagaacctattcaaggagatattacccgtatgcgactcaaagctacacttcctgtgggtgcccgttttgatccccctttatcgggtattcacaatttgaaagaaggattctcttctaccttaattgaagccgatggttccaagaagaactacacttttacagctatttataaaaaatcggaacgtgctaatatcattaaggtcgaactagccaatgtacgtgctcagattgtagtggctgatcctgttgaagagggtaaaaaaggacaaattattatctataagacctcgtcaagtatcgacggagaattgcaaaatgcacttatcaccattgctccatgggcgactattgaatcggatgcttacgatcctgtgacaaaaatcctcgatttgagtgtgatgcctactgttactatcattgcacaggatggtgttaagaagacggtatacgaaacagtgtacaaaactcctgagttcgtggaatatggtgtgggttatgtggccggactctttggtttccagactttgaaagaaaattcgcatgggtttgaagtgggtgccaatcgtactatggctgtagtagatgattatctcatccttagtaatagcaataatttcgtcaacatgccggtgtttaaccgatataacggcaagttgcttgatcaggtgaaagtgaatgtgaccggtataccatctaatcgcatcatacgtgctattacctccgatgataatggacacatggtagccatggcttacgtgagtacccgtacaggaagctatgccactccttatacggatgttaatgtatgggtatggaaaaatggtatagagaacactcccacattgatacttgataaacctttcagtgatccagttttcgatcaggcacctatgggagttaactggaactataatattgatatgggtagttctattcacatcacaggtgacattactagtggaaaagctgtactcaccactacgtctcctttctcataccgtatggtatttatcagctttgtcgatggcataatgagtggcaaggcgcatgttgaatttgctaatgtgagtggtgcacgtgtagaagactatacgaagatccttacaactaatacggagaaacctttcagctacatatctacaccagccaatgaaactaatatggtgatttgtgctcctgttggtgatagtgcagacagagcttttgcttttactgttcccgattcacattattgggggtggcaaggattcactaaaggtatcgattatgttgattttaacggcgcgagattgttagctgttcagaatggttcgggttccttcaatggaccacaacgcctttatgtagctgacatcaccaaaaatcccaatgctaattctatgagtaatggcttcatcttcgattcacagcaaggcaatacaataggaaatgcagatgtgccgggcggcgtaccggggtcaggttatacagctacgggatatacctctccttgggcgttcgatggagtgagcagtgtgcttggtgagaatattccttgtacaggtgatgtaatttttgccaaaagtcaggacggactggccgtacaggtatatatgcttactaccgatcatggcttgatagctttcgaactcacaaagttcaaaggcctgtaaacggtacctaatgttatttttaattccatttaaacgatattcaaacgattatttaaacataataaaacaatgaataagaaacgtatgaaaaagattgttcttacctttgtatcactactgatgggaggcttatgctcagtattagtagcttgttccgatgaggaacataccgttcctattttcccagaagacggcagtggagaaattgaaattaagcccgaccaaaaatacgattgggaaatcaaccgtcagtcaatcttggctaataccgatatggtacttttttactcgggtggtgaccaacgccccatttggacgcaggaacgcgcccaaccttatattacttatgtagacgaacaaaacacttcacactggttctttgatagcttccttatgcttgaaatcctcaatacttccgacaattggcagacggtgagagagtataccaagggtatgcgctatgaatcagccaccaaggctgagtggatgaaactcatcgattgttatttcaattcagaaactggtattgcagctatcgaagccggtgtaaagaaagcaatgattaccattggggcgcctgtgtacaaacgccaggtaataattggcattcctgagcctattgacgtacagaatgaattggtgccaggttcgtcgagtgtatattggggtgagattgataatgtgtcgctcgacttctccaaacctgctgaccgtgtgaaggcttgtaagtggttcatcgatcaagtacgtgcccgtttcaacgagaaggggtatcaatatgtcgacttagctggattctattggattgccgaggatgcttcacataccggaaatatcattacccccattgccaactatctgaacgaactgaaatatagtttcaactggattccattcttcaattccgatggccacgagtcttggaaagaactgggatttcactatgcttactaccagcccaactactattttgacgataaaatacctcttacacgtcttgatgaagcctgcaaagaagctttgcgttgcaatatgcagatggagatggagttcgaggacgatgtgttggcagctcacggtaaagcttaccgtttggaaaactatatggcaaaattcaaggagtatggtgtatgggaaaaatgccgcttggcttactatcagagtaatagcgcattgcttactttgaagtactctagtgagccggctgatgtggctctttatcataagttctgcaagtttgttatagaacgccctatccgtgattcacattaacaagtaaatttcacatttgcaatcgagggtgtccaaagaaggacacccttaaaattcttatacaaaacatttttctcgcatttgaatagacgatatgcttatgaacaataaatacttttatcttatactacttttttttatggtgagttgccaaagaaatcaagatccggccacaaatacacttagtgaaatgtgcgaacgtttgtttcctcaacatgctcattctttccaatttcaacttctgactgattctgtagatatagaccgctttacacttgagtctgacaatgggaagattctgattaaaggaaacaaccggaattcattggccgtaggactaaaccattatttgaagtattactgtcagacacatgtctcttggtatgcttcggatagtgtagtaatgcctgctcaactgcctgaagtagaaactcctgttattttacgttcaaagtgtaagaatcgtttctttcttaattattgcacctttggttactctatgccctactggaaatggagtgattgggaacgacttattgactggatggctctgaatggagtaaccatgccgttggctatcacaggtcaagagtctatatggtataaagtatggacggagatgggactgtctgacgaggaggttcgtacttattttacaggtccggctcaccttccctggcatcgtatgtcaaacgtagattattggcaaagtccgttacctcaatcatggttggcagaccaagaaaaactacagaaattaattctagaacgtgaacgggcttttgatatgactcccattctaccagcttttgcaggacatgttcccgctgaacttaaagaactttatccggaagctaaaatctacacaatgagtcaatggggaggatacgatgaaaagtatcgtagtcacttcattgatcccatggattcgctttattcagtcattcaacatcgttttttagaggaacaaacaaaagtgtatggcactaaccacatttatggtatcgatcctttcaacgaagtagactcacccaactggaacgaggagtttttgtccaatgtatctgataaaatctataaatcgatccaaagtgtggattccgctgctcaatggttacagatgacgtggatgttttatcatgccaaagagaaatggactcaaccccgtatcaaatcctttttaaatgctgttccccaagataaactgattttacttgattattattgtgattatacagaaatatggcgtgatacagagcaatactacgggaaaccttatatttggtgttatttaggaaattttggtggaaacacttttttagctggtgacctgaatgatgtagattttaaaattgatcgacttttcaaagaaggaggcgataacgtatatggtttgggagtgacgcttgaaggtcttgatgtaaatcctttaatgtatgaattcgtttttgaacgtgcatgggaaaattcaatacctgtccaccagtggattgcaaattgggcccaatgcagaggggggaatgtagataatcatattattaaagcatggaaacaactatatgagaagatctatacctcagcagccctttgcggacaagcagtattgatgaatgctcgtccacagttagaaggcgtagaaggatggaacacacttcccggatacgattataaaaatatcgatttgtgggaaatttggaaggagttgctgaaagctgaaggagtatatcattctgaatatcattttgatgtaattaatgtgggaaggcaagttttaggcaatctttttgctgactatcgtgataagtttgccgattgctatcggaaaaaagatttggaaggaactaaggtgtggggacagcgtatggaccaacttttgcttgatgtagatcgattgctctgctgcagtcctgttctctcaataggtaaatggataaaagatgccagagattttgcagtgaatgaacaagaacaaaaatattatgaagaaaatgcacggtgcattcttacggtgtggggacagaaagatacccagcttaacgattatgccaatagaggatggggaggattgacacgtacattctacagagaacgctggaaacgtttcacagaagaagtaattgccgctatgaccaggcataaaaactttgatgaagagaaatttcatcaggatattacacagtttgagtatgaatggacattgaaaaatgaagattttccaatcacttctggagaaaatccaatttctttggctaaagaactaatattgaaatatgatgatgacttccactcattatatccgtaattgttaactaatttttcgtaactatgaaatttataattaaagatattctgatcatatgtttattttgttgtgcctcttcattgaatgcacagcatgcatttccatacaagaatccattacttcccactgaagaacgggtaaacgatctgttgaaccgtatgacgttacaggaaaaaatagctcaaatcagccatttgcaatcgtgggatgtatttgacggacaaaagctcaataccgccaagttagcaaagatgtgcggtgataaagggtatggctttttcgaaggctttccactcacggcagcgcaatgcaggaagaacttccgcattattcaaacctatttactggagcagacacgtctgggtattccgggtttttcggtagcggagtcacttcatggagtggtgcatgaaggttctactatctatccgcaaaatatagctataggcagtacatttaatcctgcattggcttatgaaatgacaaaacatattgcgggtgaacttaatacaatcggggtaaaacaagtgttagctccttgtatagatgtagctcgtgagttgcgttggggcagagtggaggaatcgtttagtgaggaccccttcctttgtgctcgtatggctgtagcagaggttaaaggatatatggatcatggcatttcaccaatggcaaagcattacggaccgcacggcaatccattgggcggcttaaatctggcatcagtggagtgtggcattcgtgatttatttgatgtctatctgaaaccttttgaagccatactggctgaaaccgatattttagcagttatgtcaagctacaatgcctggaaccgtgaacccaattcagcttcaaaattcatgctgactgatattttacgtgaccgttttggcttccggggctatgtttactctgattggggagttattgatatgttgaagaactttcataaaacagctgataatgattttgaagctgccagtcaagcacttacggccggtttggatgttgaagcgtcgagtctctgtttcaagtcgcttgagagtaaagtgctggctggtgagtttgatgtacgctacatcgaccgggcggtgaaacgtgtgttacgtgctaaatttgaattaggtttgtttgaagacccttatcttgagaaaaattcatatcgttggccgttacgttccaaagaatgcatttcactttcacgtcagattgctgatgaatcgacagtacttctgaaaaatgaaggtaatttgcttccattggatataaagaaacttcggtcggtggcagtaattggtcctaatgcagactgtgtgcaatttggcgattatacatggagtaaaaacaaagaagatggtatcacaccgttacaaggcatctgtcgtttggcaggcaaaaaggtgaaagtgaactatgcccaaggctgttctatctcttcgttgaatcagtcaggtattgaagaagctgtacgtgcggctcaacagagtgatgttgcattactatttgttggcagttcaagtaccgcttttgtacgccacagcaatgccccttctaccagtggcgagggaattgaccttagtggtgttgaattgactggtgctcaagaggaactgattgaagcggtctgtgcaacaggtaaaccggtagtcctaatattggtagccggtaaaccgtttgctatacctttcgctaaaaaaaatgtccctgctattttagttcaatggtatgccggagaacaagcaggtaattccattgccgatattctttttggtaaagtaaatccatcagggaaaattagtttttcctttcctcaaagttccggtcaccttcccgctttttacaatcatttgaccactgataagggattttataaagagcccggaacttatgaattgccgggacgagattatgtgttttcttctccgaaccctctttgggcttttggtcatggattgagttatactacatttgatctggtttcagcgattgccgacaaaactcactatcaggctcatgacaccatagccgtaaaagtaaagattgcaaacagtggagaagttgtcggcaaagaagtcgttcaactttacatacgtgatgttgtcagtactgttatgacaccaataaagcagctgaaagcttttgagaaggtaagtttgaacccggccgaaacgaaagaaatcacattgaaagtccccatacacgaactctacctgaccgataatatcggtaatcgctacttggaacccgggacttttgagataaaagtgggcactgcatcagatcgcataacccatcgcatttctatcgaagtagggcgtgaacctgagaagactcctgtaattgattctcctcaaatcattaaagtcacgcctagtggcgagtttattactgtacagggatttgtacgtgatgcacaagctactccagtagcttatgtcacggttcgtgccatttcatccggtcaggaaactcaaactgatgaaaagggattctattctataaaccttaggactgatgattccatagcttttgtcaaagcaagattcatcactcaacaaatggaggtgaaaggacgcaaaaatattaatatcagattagtgaagtaaagaactttaattatatatactatgtcattttcagtttataggaagatagcaaaccttattttattacttgtggcaagtaatctgtcagctcaggtaacctactatgatgcggctgaattccaactattgggaaaggctaccgctgctaccacagagcggtatgtacgtttgcctgattcattggaacatgtttctcgcttaccgttgtggcaactaagtcggaattcatcgggtatggcagtgcgtttccgaagcaattcgactcaagttgcagtaaaatgggaatcgttggttaatttccatatggatcatatgactgatgtagcagtgaaaggacttgacctctactgtctggaaggaaagaactggtattttgtgaatagtgcccgtcccataggaaaaagtacggaatctagcctcatcagcggtatggaagccaaagaacgggagtttatgatttatttaccgctatacgacggactagtttctttgtcgattggaatcgatgctggcgctagtatcaatcagcccgcaatagaaagtcctgtacgtgaaaaacctgtagtattttatggaaccagcattcttcaaggcggatgtgcctcccgcccaggcatggctcacaccaatataatctcacgccgtttgaatcgggaatgtatcaatctcgggtttagtggcaacgcttttcttgatcttggagtagctcaagtgatggctggagtagatgccggtgttttcgtgcttgattttgtacctaatgtcacggttgagcagatgaatgagcgaatggagaagttttaccgtatacttcgtgacaggcatcctcatacacctgttatctttattgaagatccacagttcatggactcctactacaataacgccaatgcccggaaaattaagactttgaatgacaccttgcgtcgtatatttaatgagttgaaaaaaggaaaagagaaaaacatatactatatatcctcaaagaggatgcttggaagcgatcgtgaggcaacagtagatggcattcattttaccgatgtgggtatgatgcgttatgctgatttggtgactccagtgattaaaaagctacttaaaaaatagtggttttatggctcattcactattaattttgtctgacaacgaactatatgggaaagagtaatgcacattattatgatctttgcatcaaagctagagatacggggtatcatggtattatttgagaaatcgataatcaatatgactgtcttatgttgaatagaatgtctttatgctatttttcttcactttcgataactgatgcttttgataaatagatgaaactagagcgaggaactactaaaatatagaatttatttacagaattgtgcataaaatagctgttgtttgcatatgaattaccgtattatttgttcaaaacataaggttgattttaaaggaacgtccaacgtcccattaggtttaaaaaaaatgctaagtacgtttaaaaggaacgtattttagccctgaaatagggagtgtttcatttattaaccccttactaatcataatgatgcaaagtaacattaaaaattaagatgtattacagaatagtgtgagaaataacgtaaaaagaacatatacatggatatatctgcaacaaagtgatttcttataatggcaaatctctgccattttatcctctattctgtacaatggatggaaatacgtccggcagagaatttataattatcaaaatgaaaaatgccattttgataattatatggataagtcttaataacaatacttcgttaaacattgaattaacaaataaaaagtagatcaagtcctaccgattcattatattaagggtcaccacatctttaataatgatgaatagaaacgaacttgaccaatatttggagataataaaacgcgtactgctaaattcagcagtaaagataaatgaatggcgtgagagttttatgcatgaaatgctacttttatatctgattattcctgggagaataaatttcctccaattagggtgttacggccgtttggatgaacagcgttaccgtcagcagttcgaacgtaagtgtgaccggttgtcttttaatgcctgcttggctgattcacataccgacaatctggttgctatcgcttttgatccgagctatatcagcaaatcgagtaaatgcacgccctatctggggcgtttctggtccggttgtgctaaatcgactaaacatggtctggaaatttccggcattggattcattgatgtagatcttcacaactgctttcatctagaaactgttcaaacactaccggcaaaaatactggagcaagtcaggtggacactaacagactggtatttgcatgtgttacgaagccgcaaggaaatacttcaacggttgactagccatgtggtggtcaatgcctatttctccaaatcatcttttgtggctggcgtcctggatatgggattatatgtaatcagtcgttttcgcgatgacgcttattttcgttatctgaccaaggataaacctaccggtggcaagatgccccaaactgtacgatgggaaaatggacatgaagcatctcgaagaaaaccgttttgaaattattccataaaaaatgggcaggagggacgaatactctcgacaatcgtacattcccgttccctcaaaagaaatattcgattatgcatttgggagagtgaggacgagaaagtacgtaaacagtatgtctctactgacacgcagatacaggcaatagatgtaatggattattatgggacgcgttttcaggtcggatgctgctttcgcgactcaaagcagtttacagggctgaccgactgccaaaggcgggagctggataaactgaatttccattttaatgtagcattgaacgccgtgaatctggagcttcgaaaaaggggacagccttatcaatggcatctgtaaaagtgctatgtcacaacattttgctcatgcaacgatttatttccatatcagggattaggcctgacaaggaaacaaatcggaagctatgggaaaaggaaattaaatttgccgctattgctgcataaatgttaattcaatgtttaacaaagtattattatcataatattgtattttattaattcaacccgttggcggaattaaaattataaaagatttgtgactaaaaagttgtgcataatgctgattattaacatatgtgctaatgtaattctgccaacgggttaattcaatttcggtacataaagatcacctacctaagtttattcctatttttttcttttaattttttagtaaaagtcttggctttttccatactattggcttcttcttcctgagtagcataagcgtgtttgtaaccttgtattttgttccattcaccacgggtaaaatctggaaatgcgacagatgcacaattgttgtccattgacaattcacctaattctgccaagcaacaccattcagccaaatcatagacatccatatctaatggtaatccattctgtaaacaataaatcagacggctatccattataaaatccatgccgccatgtccacctacttctttagccatctcaccatatttttttaaaataggatgttgatacttttctactaacgttttcatctcattttcaggcaaaaagttatgtgaggtcaagttatccactttgggcttcattccggatgcactcatctgattagaatctaacgcatatccttctaccggatatttattagccagtcccttagtgcctgtaagctgatataaacggttgtagggttgtggggtcattacattatgttgtatttcaataactttcccgttttctgtacgaataagtgtagtcgtatggtcaccattgcggaagtcgttacacgtttcccctgttcttttttcaaccagatctttgccaatgacagattttgtatccattgcaatcaatgttttcatacgatctccgcgatggatatttaaggcttgagccacaggccccagaccatgagtagcatatacatctccgcgatgtttcatgttatattccaatctccatccgagtttgtcatcttttccttttttccaataataatcccaaaattcatcgaggttatgaatataagctccttgtgcacgaatgacctcaccgaataccccttgttgagccatatttaaggtattcatttcgaaccagtcataacaacagttttctaaaatcatacaatgtttacgggtcttttctgacatatcaatcaaagcccaacattcttttaaactcatagcggaaggcacttcaatagccgtgtgcttgccattctccattgcacacatagctacaggaaaatgatgtaaccaatccgttgcaatataaactaaatcaatatcatcccgtttgcataattcttcatatcctttttcacctgaataaacagtagcctcgggcatagaagccttctttaataacttttgacattcttccgcacgttctttctcataatcacataatgctacaatctccacacccggaatataagtgaaacgttctaccgctgccggaccacgcatccctaatccaacgaatcctacacgaacaaattccattttgggagcttttaaacctattacactagtttgtccggtaggacgttcaggagtttcaatgacaatagtccctttatcccaatgccattttgttccgagatttgagacttgtgtatcagaagaagattgtgaacatgaaatggccaatatagccacaagcattactagtaaaaaattgtattttctcattttatttagtagattaattttaaaagttttctttcatcatttgtatgttgatcttatgttgtccgtttgtccgtactttttggctcgcatagccttttttggagaacaagagaatatcatctgaatgtgctggtaaggaataagatccctttgcatcagtcataacttcctcttcagaatttatagtttttactttcactccggctattggtgtagcttggacatcgcgaacaattccttctatgcgtataattttaccagtggttattacgggggcttttgacaaactgttttcctctaaagaaataggcttattgcctacccatactggtaatttataatatatttcgtctgaagaagtgcctacttggatttcgaactttccaggttccaaatatcggtctccgaaattactagtcaagtaaagttcatgtacaggtacttttagctgcaccagcttttcctcgcctggttgtagttctatctttttaaaccccttcagttgtttgaccggtgtcatgaccgtactaaccacatcgtgaatatatatctgaacaacttcttttcctgctaatttcccactattctttacttttacggatatgcgtattgtgtcatgaggctgatagcttgttttatcagtagtagcttgcacgtattcaaagcgggtataacttaatccatgtccaaacgtccataagggggcaggacttgaaaaaacataatctcgtcccggagaggtgtatgtgccaggttctttatagtatcctttgtcagtaggaagataattataataagcaggcaaatgacctgtactttgaggaaaagagaatggcagttttccagaaggattaactttgccaaacagaatatcagcaatggagtttccagcctgttctccagcataccattgagccaatatagcgggtactttttcttttatatagggtatggcaaatggtttaccggctaccaaaaccacaacaacaggtttgcctgtcgcgcatacggaacggatgagttgttcctgcgctcctgttagggaaatatcactaaggtctattccctctccacttgtcgagggttcattactgtggcgcacaaatgccgtactggaacttcctacaaatactagagcaatctcactatcgtgaacagctttaacagcctccgttatcaatgtcgtatccattgacgctaacgaacatccttttgcataatttattttcacccgttttccgagcagatttcgtatgccttggagtggcgtgatgccgtcacttttgtttttactccatgtataatctccgaattgcacacaatcggcattaggtccgattatcgcgatagattttagttttgtgcaatccaaaggtagtaaatctccttcgttcttcaacaatactgtagattcatcagctatctgacgagaaagctgtatactttcttttgcacgcaacggaagatgataggaagctttctcttgaaaagggtcctcaaacaaacctgattcaaatttagcccgtaatacgcgttttacagcttgatttatgtaacgaatgtcaaagtttccattcttcacctgctttgctaatgtttcaaaacaaggactggaggcctccacgtcaagacctgcttctaaagcttgacgggcagcttcaaaatcatcacctgcagttttatggaatgattttaacatagccactactccccaatcagaatatacataccctcgaaaaccaaatttgtttcgaagaatttccgttaacatgaaatgtgaagctgaattgggaactcggttccaagcgttatagcttgacatgactgccatcacgcgggtttgtgcaagaaccgtttcaaaaggtttcagatatatgtcgaataaatcacgaaccccacagtcaacagaagctaagtttaatcctcctgatggattgccatgaggaccgtaatgtttcagcataggggagattccatgatccaagtaccctcgcacctccgctactgccatagcagaacaaagaaaaggatcttctccgaaagattcctcaactcgtccccagcgtaattcacgtgctacatcaatacagggggagagtacttgtttaactcccatcgtgttcagctcaccggaaatatgtttggttttcgcatacgccaattcagggttaaaagtgcttcccaatgcaatattctgcggatagatagtagccccttcatggactactccatgaagagactccgcaaccgagaatccgggaatgcctaaacgtgtgtgctttatcagatattcttgtatccggcggaagttcttgcggcaatgtgaggctgtgagtggaaacccctcaaagaacccgtatcctatgttgccacatgctacttccaacttattcggattcagttcttgtccgtcaaatactttgtacgaatggagatgggtaatctgccctattttctcttccaaagtcatccgacctaacaagtcgttcactcgttcttctacggacagttgcggattttgatagggaagcatttgctgtgctttcactatcagagtcgtgaagaacgggatactgactataatcaatgtacgaatatgctttcttatacgtctcatcctaattgatctgataattattatttggaacgaatgggacgggtaatcacaaattggcaaaattcatgatacagttcttgatcagcttcattggcagagttctttaatgaaagaaggtttccaccgccttcataatatgccaagcgtttagtgtcccatatttgatgagctttaaatgcttttatatagtctttcatacggggataataaatattgtgttccgaattacttgccaacacccggtaatcaaactcaaattccatatccagattttcccttttcgcagttttacaagtttcttccaagacagcgtatgactgttctgtattgaagaaatagttaggctggtagtaggcattgttgaatcccaaagtttcccatttatcatgtccttctgcaccacggtaaggtatccagttgaaactatatttgaattggttgacgtaagctcctactttggaaataatatctctggtagttccagctgtttccgccaaccaataaaagcctgccaattctatattctggtactgcatctcgttgaatttgctgcggacatagtctatgtaccatttacaagcatctacccgatcctgtgcgatggaaaagtccatgatatgtccatccaagcttccccaatatacggtagtcgaattttcatttgccggtgtcttgtgggctatgggttccggaatggcaatgactactctatgtttcgtttttgggttttccaaacgcttttgtgcatttgatatggcacgattcaatgctcccagtccggtactacttgcaaaataataatcaaccaatcttttccaatccttttgattggctgcatccaaaccttcttgattttcgtaagtgtaggttttattggttcctccattacctgtgtctttcaattccagaaacaaaaaggcgtcgaagagccagtgctctgttccagccttgtctttataagttacataagaacttattctgtctacatcccaattataaggttccctgtgatgtcctcctccataaataagaaccatatcagtggaattcaaaagtgctgtgcgattctcttcccatggatagagctcacccggatttaccggaggagtagggggaacttctttatcgtctgatggaccgtcggaagaagaacatgaaacacataatgccatcaaagagcataaaaaaagtacactgaatttgataaattttctcataatcaattttgtgaagttatgtagtttatgaaatgtaattagatggctgatagtattatacagctctaccaaccatctaaaagttattgaatgttatttatattcccagaattggaattcggtgaaagtataaacgtgttctcgccattctgg

SEQ ID NO: 11961 - DNA, 938 bp, Unknown
  gut microbiota DNA sequence
ttccaacctgtgttcctcggtggcgaaccatgccttccccggtgccgtacttttgtataccttaattatctactccttgtcattcaaccgaataaatccaaaaaaaggaagaatttgtttgccaattcaaagaaaagccgtacttttgcaagccgattattatcacaaaatgataagagattaattcatagcgagttagtcgtcctttgtccggggaggactaataagtggtgaagaaattttagtagtaacatttaaaaaacaaatttaagagtggatactttaagttacaagaccatttctgcaaacaaggcaaccgtaaccaaagaatgggttattgttgacgctacagaccagactttaggtcgtctgggagcaaaagttgcaaaattgctgagaggaaagtacaaaccgaactttactcctcatgtagactgcggtgataacgttatcatcatcaatgctgacaaagtaaaactgactggtaataaatggaatgacagagtgtatttgtcatatactggttatcccggtggtcagagagaaatgactcctgcccgtttgatcgctaaaccgaacggcgaagagagattactgaaaaaagtagtgaaggggatgcttcctaagaacattctgggagctaaattgctgaacaacttgtatgtttacgctggtagcgaacacaagcacgaagctcaaagcccgaaaatgattgatattaattcatataaataagatataatggaagtagtaaatgcattaggcagacgtaaacgtgctatcgcacgcatattcgtaagcgaaggtacaggaaagattactattaacaagagagaccttgcagagtactttccatcaactattcttcagtatgttgtaaaacaaccattgaacaagattggtgctgctgagaagtatgacatcaaggttaacttgtg

SEQ ID NO: 11962 - DNA, 2380 bp, Unknown
  gut microbiota DNA sequence
ggtctttagtctcgataacctttacaccgttttgtcccaatacagccatgaatttattataaatcagctcgacaccttctttcacggcactcacatcggttgccgtctccatcgttttgatggcacgctcgaagtcatccactatcggaagaatgctgctgagacttttttctccaccgttcagaatcagttccgccttttccttcatggtgcgtttacgataattgtcgaactcggcggacaagcgcagatatttgtctttctgctcatcaatagtctcctgagccttttccaattccttttccaactcctcttcgtgcgtcagtggagccgcctcttcagcttgttcgttttgcggttgttcatccgcaccgttctgagtttcttcaacattcagttcttcttccttcacttttttttcttttggatccattttggtatttactatttaactagttactatttattgtttaaaaacacgttatcttttagagataccgtctattcgacatactggactgaccggatgtcattagttttgcttgcaaaaactttgccaagtcggtgtttttgccagaaaacgcagcaaaggtaacacttttatgtcagattggcacatatcggatagctcataattcattttaaatgtctacctttgcacgctaaaacaataagtagtaactagtaaaatagtaaataataagatgattacagtttcaaacgtttcggtacagtttggtaaaagagtgttgtttaatgacgtaaacctgaagtttacaagtggtaactgttatggtattatcggtgcgaacggtgcgggaaaatctacgtttctccgtacgatttacggagatctggaccctacaacaggtacgattgcgctcggaccaggcgaacgtctctcagtgttgagtcaggaccactttaagtgggattcatataccgtcatggataccgtcatgatgggacataccgtgttgtgggacatcatgaagcaacgtgaagaattgtatgcaaaagaagatttcacagacgaagacggactgaaagtatccgaattggaagaaaaatttgccgagttggacggatggaatgccgaaagtgacgcagccatgttgctgagcggattgggcattaaagaagacaaacactatacattgatgggtgaactgagcggtaaagaaaaagttcgtgtcatgctggctcaggcgttgtacggaaacccggacaatcttttgctcgacgaacctaccaacgacttggatatggagacggtaacctggttggaggaatatctttccaatttcgaacatacggtattggtggtgagtcacgaccgtcacttcctcgactctgtatgtacgcacaccgtagatattgactatggaaaaatcaatatgtttgccggtaactatagcttctggtacgaatccagccagttggctctccgtcagcagcagaaccagaaggcaaaggcagaagagaagaagaaagagttggaagagtttatccgtcggttcagtgcgaacgtagcgaagagcaagcagactactagtcgtaagaaaatgcttgagaagttgaatatagaagaaatcaaaccttcttcacgtaagtatccgggcattatttttactcctgaacgcgagccgggcaatcagattctggaagtttccggattgagcaagaagacggaagaaggcgtagtgctcttcaacgacgtgaacttcaatgtagagaaaggtgacaaggtggtattcctgtcacgtaatccgcgtgcgatgactgctttcttcgaaattatcaacggaaacatgaaaccggatgcaggtaccttcagctggggggtaaccatcaccactgcttacctgccgctggataacaccgatttcttcaataccgatctgaacctggtagactggttgagccagtttggagaaggcaacgaggtatatatgaaaggcttcctcggccgtatgcttttctccggcgaagaggtgctgaagaaagtaagcgtactctccggaggtgagaagatgcgttgtatgattgcccgtatgcagctgcgtaatgcaaactgcctcattctggacactccgaccaaccatctggacttagaatctattcaggctttcaataacaacctgaagacatataaaggaaatatccttttctcatctcatgaccacgaatttatccagaccgttgccaaccgcatcatcgaactgacaccgaacggtatcattgacaagatgatggaatatgacgaatatatcacttccgaccatattaaggaattgcgggcgaagatgtacggtgacaaattgtaatttcaccacggaggacgcagaggttgttattcagaaataattagagtctctgt

SEQ ID NO: 11963 - DNA, 366 bp, Unknown
  gut microbiota DNA sequence
ttcgcactggtggcggtggaactggtgaagctcaaaaacaggattattggaatcataaaccatttgtcggatgattggaaaaataaaaaagggaagcggttttaagggctgtgtgaactatgtgttgggcaaggagcaggcggttttgcttcatgcggacggggttctgactgaaagccggggcgatataatccgcagcttctgtatgcagaccgggatgaatcccgatttgaagaagcctgtcggacatattgcattaagttattcggcagtggatgcgcccaaattgacagacggaaagatggtacagcttgcgcaggagtatatgcgtgaaatgaaaatcaccgatacgcagtatatcatcgt

SEQ ID NO: 11964 - DNA, 1114 bp, Unknown
  gut microbiota DNA sequence
atccggaattcaggtaaactggtttcgttcaaaggaagacctcagaatctgtacttcaaaacctttttgaaagagtgtggtatgatttgggtattgggaacacaagttactaataaagacatgcttacttatgaatattctcttgcaacggcggaaggtgtagatgatagtccagtgggaatggtagttactatgccatcgttggatacttccgataagataaccggatatctgggaagtgtacttgctgctgatatcgttgctgaatgggcgatatcgcttcaaggaggaagacaggtgggaggtgtcggtatttataatatctcaaatgactacttctatgcggataaaaactataaatataccaagaaaataatttcatcgcttaatccgtcagttaaataaaaggaggtttttaatatgaagaaatataactcaattttcagtctttttgtattgctgttggcagtaaatgtagtatcctgtcaggacgatgccgagagttttgacagcaaggtgattaccggagatgtgtccaaaaaggttgcaacacatttgcttaaacccggtgtagacgaaatgttgcagacttttcaggctaccattccccagccggtggagagtgatatacatattgtatataaggcagaaccgtcattggttacaacatataatgagatttattatgatgcagctgttgcgctgccggaggattactacgaagtaaaagagtcgaatgtcataattaataagggaagtgttgtttctactgatgttgtattgcattttaaggacttgacggcgttgaacagtaatttggtctatgtattgcctgtaactgtagctgagtctgattgggaacttttggaaagcgcacgtacagtttattatgtatttaaaggtgctgcattaatcaatacagtggccaatataaaagaaagaaggttgaagccgaattttcttcacgccggtgtattgataggcttgaagacaataacggtagaagcacttgttcgtgccgatgaactgaataataaaatcagtactttgatgggaatagaaggaaagtttctgctccgtttcagtgatcagggacttccgggaaatcagcttc

SEQ ID NO: 11965 - DNA, 3750 bp, Unknown
  gut microbiota DNA sequence
ttcgggatgtactgtatacaacattggatatagaagtagccggatgggtacgtagtcttcaactccgtggcatcgaactgccggatgacctcaaagacgaggtctttctgattatcggagaaagaagaaacggaaacagttgagagttgacagttgagagacgatagttcgttgctgtgatctgattacggtctttaatttttaatctttaatttttaatttacttggatttactacaatatacattctttcaacacgccttattgggtagtctgctggcaagcattgcctgtgggattatcggtacatacatcgttacccgccgtctggtatttatcagtggaggaatcactcatgcttcttttggcggtattgggttaggattgtttgccggaatttccccgatactctcagcggctgtattctctgttttatcagccttcggtgtggagtggcttagcagacggaaagatatgcgtgaggactctgccattgcagtgttctggacgttggggatggcactcggtatcatgttcagctttttgtcacctggatttgcacccgacttatcagcttatcttttcgggaatatcctgaccatcaatcaaattgacttatggatgctcggcatattggcactcatactgaccggattcttttatctgtttatccgccctatcgtatatattgcctttgaccgtgaatttgcacgttcgcagaagattccggtagagatattcgaatacgtgttaatgatgttcatcgcattgactattgtagcctgcctgcggatggtaggtattgtgttagccatatcccttctcaccattccacaaatgacggctaacctcttcacttatagtttcaagaaaatcatctggttatccatcggcatcggtttcttaggatgcttgggcggattatttatttcttatcattggaaagtcccctcgggagcttccatcatattcttctctatcctgatttatgctgtctgcaaaatcggaaagagttgttgcaggaaaaagtcatcataataaatatagtatatggaaatcaaaattcaatcactggaaagtatccatgaagcagcccaggaattcatcgctgccatgggcgacaacactgtatttgctttatacggaaagatgggtgccggtaaaaccacatttgtaaaagcactctgcgaagaattgggtgtagccgatgtcatcagttctccaacttttgctattgtcaacgaataccgttcggacgaaaccggagagttaatttatcacttcgatttttaccgtatcaagaaactaagtgaagtgtacgatatgggatacgaagattatttctacagtggcgctctctgctttatcgaatggccggaactggtggaagaattactgccgggtgacgccgtaaaagtaacgattgaagaactggaagacggaagtagagtgattaaactatgaccggacaatatatcgtacaaggaatctttgcgctggcaggaactgtctccctgctggcgtcattgcttaactgggactggttctttacaacacgtaatgcgcaaaccattgtcagaaatgtaggacgtaaccgggcacgactcttctatgggatattagggattatcattataggcatggctatcttcttttttgtagaaacacgaaaagtcatgggattataagctttataagaaataaagaaaagtcagaccattattgatttatattacaatagttgccgtgctttcatctccaaatatttattaatcacatcaattgaaagattttccggtgtggtcaacaaagaatagatcccgtgctgcttcaaagtagatacgatgagccgtttctcgtaagcaaacttctctgcaatcacatggcgataatagccttccgtatcttttgccggttgtgcaatgtattccttcagatcggcatcctcgaaaaagaccacgagcaaacggtgacggtgattcagctgtttcagataagacaactggcgattcatgctgcctatactcgaaaagttggtatagagcactaacaagctccgtttaccaacatgtttgttcagatgcacacaaagagccgagaaatccgtctctccgaaagtagtctgctgactatacagattctccaacaacgtttgcatatatcccggctgcctggaagcagggacaaaagtatcgaagtgttcatcaaaggtcaccaatccggctttgtcttctttccgcatggcaacatacgaaagcaccagcgaagcattaatcgcataatccaacaaagtcatcccacgaaaagcctgctgcatcacccgtcctttatctatcacattgtaaatctgctgcgaacgttcatcctgatatacattcaccataagctcatgcctgcgtgcactcgctttccagttaatcgtacgataatcgtctccctttacatactctttgatttgttcaaactccgtatgatgtcccaccctgcgaatacgctttattcccagctcggtcagattatcgctcatcgccaacaattcatattgatgaagcatcagataagacggatacaccttgatatccaaaggttccgcacaggtataacgacgggaaaccagcccaatccttccggtcacaaaaactctgacatacccaaacgaataaacaccgcgacgggtaggacgcagacgataagttatcgtctttccttcattcgcctgtaacttcgtacgaaagtcaacatcacgtttctgaaaaacgacaggaatctcatcaataacctctaaagaaacaggatacgtatagctgctttccacacgaatacttacctcattctcatcaccattggagaagcggtcggcacactgacggaaagcctgtattccccgaatacgataaagagaatacacatctgccgataccaccaaaaacaagacaaaaagtgtccactgcccgatgacaaagaacggagcaagaacgtatccgctacccagcaacaggataactacgatcagggcaatatagaagcgacgagttaaaaacatctatttcgggacttccactttatcaatcaaacgctgtgtcactttcaccggagaataaccttccatttcagcttccgcagtcaggatcaggcgatgctgaagcacatacggagcaacgaacttgatatcctccggtgtcacaaaatcccgtccttgcaaaagagcataggcctttgaagattgcaacatcgctacggaagcacgtggagaagctcctagatacactgccttgctagtacgagtctgctgcacaatcaacgcgatatattgaagcagcgtacggtctacaaacacccggctcatcaaggcacgaagagaaagaagttcttctttagtaagtacgggggtcacatcttccagttttaccaatgccgcattcgtatggtggcgttccagaatattcacttcctcttccagcgaaggataatccatcgttatcttcatcagaaaacggtcgagctgcgcttcgggaagtttgtatgtcccctcctgctccaccgggttctgagtagccagaatcgtataaagttcccccatccggtgagtggtcccgtcgatactgacctggcgttcttccatcacttcaaacaaggcagcctgtgtcttcgcaggagcacggttgatttcatctaccaatacgatatctgcaaaaatcggcccctgatgaaagtcaaaaccattggttttcatattaaacacagttgtacc

SEQ ID NO: 11966 - DNA, 273 bp, Unknown
  gut microbiota DNA sequence
gcagcgtatttcggcggtttccccgactttcagccttttgggtactggcagtgtttcgatgctgaacgggtacgcctgctgaatatccaagttgtcattacaggcggtgacaagcacgagggcggccacgatgtagcagcccatgatgattttatacattacattcttcatatacattattatatagcggtcagttgataatgaatttcagtcccaaagatacctgcgtgtggaacttgcctatgtccgagccgaacaacgcccgttcccttg

SEQ ID NO: 11967 - DNA, 317 bp, Unknown
  gut microbiota DNA sequence
gcagcagcttttcgcttcggttgcttgtttcgtacccggcgagagccgacaatcccaatgaaaggaaaaaagtctttcgcctgtccgataggaatttcaggtaatagccgccctctgcggtgaactgttctacgggtatctgcatatccttgtagtcatacttcttgtgcaggtattccccgccaatcacccagcggtttgcgttcttggtgtaaacgctgtacgccgccccgatgtggtaggcaaaagccgtattggcgttccaatgcaccccgtccgtcatgcccgccgtgacctgcaagcctttcatgcccggc

SEQ ID NO: 11968 - DNA, 1343 bp, Unknown
  gut microbiota DNA sequence
aatggaaagggtgctgatacggtcactatccgcaagtatgatgacaggcttgccgaaataaataaagaattagattatataggtaaatcccgcccgcaagttcttttttatgaaagagacaaggaggaactgtttgataaagaacctgctacgcgaagccggaagaaagaacaggatgcgaagctagttgcattggacgaacgtttcgatctgaaaaaggagaagttgcaggtccagaaaaaaggggcggacgagcatctcgagcggattggcaaagaattgcacttattggaggacggattgaaaaaagtggatatgttccggaaagatgaaactttctgtccgccttctgtgacggaaataggagagaagcctacccggaaaagttgcgatgttatagtggaagaattgaagtctctcatcgtatccaccatcagaaaaacagaagaattcaagaaagcggtgacgcagttcaatggaaacttctcgtcaaaaaacacgtttcatttccgtacggaactggttggagaacaggattactatgatttcgcttccaatctgtgcgagtttgtagataatgataagatttccgattatcagaaacatatcagtgaacggtatacggatataatccgccggatttcgcaggaagtgggaggactgacccgtaatgaaagcgagatacacagaacaataaaggatatcaacgacgattttgtcaagcggaattttgccggagtaataaaggaaatagctcttcgcccgcttcagagcagcgataaactgatgcagttattgctggagattaaacggtttagtgatgagaaccaatataatatgggaaaggttgacttgttctcgcaggattcccgtgaagatgtcaatgcgatggctgtccggcatttgttgtcgtttatgaaattcctgcttgacgagccgggacgcagacggttggcgcttgccgatacattcaaactggagtttcgcgtgaaagagaatgataatgacacgggatgggtggagaagattgccaatgtaggttccgacggtacagatattctggtaaaagcaatggtcaatatcatgctgattaatgtattcaaagaaaaggcgtcacgtaagtttggtgactttaaaatccattgtatgatggatgaaataggcaagttacaccccaacaatgtgaaaggtattttggactttgccaattgccggaatatattgttggtaaatagttctcccactacttacaatgtggaagattatcgttatacctatttattgagtaaagacgggcggtcaaatacacaggttgtcccattgttaacctataaataagatag

SEQ ID NO: 11969 - DNA, 350 bp, Unknown
  gut microbiota DNA sequence
ttaaaggggctggactgcaaccgggcggctgacttcgtggagatactggaaatcatcgaccgggatttaggcttggggctggcttccggcactcctgtttccattcctccggcaaccgtccaccggacagtatcgggcaaaaccgaagaaacacccgaaaagcccgtcaagccctaccagttccgggaacagaagtttccgcttgccgaactggtgtactggcaacagtacggcatcacgccagaactgctggaacgttacaaggtttgctcgctccgggagtacaacagcgaaacggcagagggcaaaccgtacacctacacttcatcggtggcagaacccatgtacgg

SEQ ID NO: 11970 - DNA, 14509 bp, Unknown
  gut microbiota DNA sequence
gatgtttatcttgatccggcaattactattgcctgattcctgattataggaaagtgaatattccggtgactgtgtcaacagtcggtgaatattcacttttttcgtttctctttgtattgtgtgggagtttcccctgtatattgtttgaaggctgtactgaaataacgtgaagtggtgaagccgaccttctcagctatttctgtaaatgtcatatccgttccggtaatgtatgctattgctttctccattctgaacttattgatataatcattagcccccatatcggtcagggctttcaacttattgtaaagtgaagcccggctcataccgatttctttgcagataaaggctatatccaaactgctgttgtccagattttcttgaatgatcttattcaacttgagcaggaaggtctcgtctgcctggctgaacgtactttcttccggtgcagggattactccggcatttaggtatcttttcttggtagactcacggtttttcaatcggttacaaatgatttccataagcatttctatttcaaaaggctttgttagataggcgtccgctccattcttgtaaccgcttaattgactttgctggtcgtctcttgccgtcagcagaataatagggatatggctgattgtgatatcttccttgatacttttgcagagttcatatccattcattctaggcatcattacatcgctgacaattatgtccggagtgtgacttctgataagttgaagggcttctgcgccatccgaagctatcactacccgtttaaagtattctcccaacgattttttcaggaaatctgttaaatccggattgtcgtctacaactaaaactgtatatggagttgtatcgaaatcatcattgccgggtgcttgttcatggctgtcgttactcatcagttcgttcagataggcttttggttgacagatgatttcttctgattctcgtctcaacggcaattcaatgaagaaagtcgcacctgcttcctgattgtcgtatgcgccaatggaaccaccttgcaattcaaccagaatctttgaataagacagtccgattcctgttccgttttgttctcccgtgccttgatagaagcgtgtgaaaagtttttgtgtgttgacttgtttcaaaccgcttccttggtcagtgatagaaatacgtactctgtctttttcaggaagcaattctgatataatagtgatttccgtattctccgggctgtgtttcaatgcattgataagcaagttactcaaaataatttcgcatttgtctttatcgaaacttaccgtttctatttgcggatccaattgatatcggatacgtacgttcttggcttctccttcactgatgaaatcctgtgagatgtgttctatccattggttgaggaagtgaggctgtatctgtattttactttcgcccacttccatctttcgtacgtcaagtaccatattaatcaggttcttcatccgttgtgactgcctgtaaatcgcctttataggaagatattgcggctcttcgggagaaagtgatttcaatatccggctaagtggggcgtgtatcaatgtcaacggtgtgcgtagttcgtggctgatattaatgaggaaacgtactttttcttcgtatacctgttgctcatgctctttcatcgcccattttaacttttcttctttgcgcttcaaagtccttctgaaagtctcgataataacgacagtaatgagaatcgcacagctaaggatgaaccaccatgtgcggtaccagggaggaagaatagtcaatgccaatacttgctgattgggaatccaactaccatcttttgctgtgcaggacgctgtgattttataacttcccggaggaagtgaacgtataaccaattcagggttgtatgattctatttgttggtcgttcagtccttctatttgatatcggtatactttctgtcggaagatgtctttttcttttgacatgatccgaatgattatattgctgttccaaggagcggaaatactcgttggattattgtttagcttatcattgacggactcaccattgatgatgacatccgatagttgaagttggggtatttcggtagtgattaagggtagggtactattgatgtgtaataatcctttcactccgcccatatagatattgccttgtgaacttaacaaacagggtttggataggtactcgttttgaatgacaccgtccgattcgccgaaaagcacaaatttctgttctttgattagccaggcgaacagcatattattggttcctatccatacttttccttgttggtcacacacaatcgatgtgacttccgagaaaagggaggtagatatgggagtttgtattttttcatcgggattataatgaaacagcccgtaattatttcctatccagaaatgcccatgttcatctaatgaaacagaattgataatagtgtccttgtggcattgatacagaacttccaatcggttggtgcggttatccaaccgataaatgtgctttatgtcgttcagataagtataattcccataatttgttattggtaagaaagtgccgataatgtccagtccttcttgttcggttgcaatattgaaagtgtgtttcttcaagtcatattgatagacatggtctccaagtaacagaatgctatgagggttattggaaaataaattgactgtctttccccgctttccgagacgcatggaagtttccgaatctataatcatgaatggcgttttcttgcctgttgtcgggttgaatacgaatattccttttgagaaaatggaaactaacagattgccggaagtgaatggacaaatggaagcgattttgtcttcccaagtggatgagtaatgggtgaatttctctgtgataggattaaagagattaatacctccaccgtctgtgcccacccagatgcggtcgttcgattcctgataaagactgagtacggtattattacttaatccacgattgctgcccgtcaggacttccgtataggttttcatggaaacttcccggatattgatcaatccgttgcggatacttcctgcccacatattattattcctatcattgtagagacaaaagatagaggtggcgggaagtgaatagttatcacctccgggaatgtgttccaacaaggataaacgtcctgtttcaggttcaaggatattgataccgcctccgtctgttcctatccatatttttccttcccgttcggcaagacttaaaacgacgttgttacttaggtcggaattgtgagtagtataggcttttaccagttctccgttatgggtgaagcattttattccttcattgtaaggggcgatccatattctgttttgtgaatcgatcagcatattcatgatttcctttccgcaatcgaaaggcggaaggcgatgctttcccgttttcagatccagtaaagcaagaccttgccaccggctgcaacaaagaacagtatgttcgttccataggcttagtaaagagatattaaaattattccctttattcaacttttgcagaaggcgaagagaagaatcccgataactataaaagtatactttgtctttagaaccaaacaataccccgtctttggtcaggcaggttgaataggcgataataggattacctttttcatccgtaggtaagaagaagtcatcactttgacgttgatagcgggctattcctttgtcggtcagaatccaaatattgctcatttcatcttctgcaatctgatggattaagttattgggaatcgaatgaggattgtttggggaatagacgtacttctttagctcatgtccgtcatatcggcttattccagccttcgttcctatccatacaaatccctgtttgtctgtcaggatacatctcacggctgaagtcaccccatcttttaaggagagctgtttatagtaataatggctggcttttaggggcgtgacaccggtaaactgcataatagctgtcaaacatagtaggacaaagatttttattctcatgagattaggtcagttaaatgaaagcaaaggtagtattatttgtttataattcctatctttgctcgaaaatatgtaactatgattaccgaagaactgcagaaactttatcagtcatatacgggagttcccgctgagaatataacagaattaccttcctccggctccaatcgccgttatttccggctgacaggagcacaaacactgattggagtatatggaacttctgttgatgagaatgaagcttttttttatatggcggaacattttcgcaaaaatgggcttcctgttcccgaagtacacattgtgtcggaagataaaatgtattatctgcaagaggatttaggagatactttactttttcatgtcattgagaaaggacgtgctaccagtgtattttccgaagaagagaaagagttgcttcgtaaaacgatccgtctgttgcctgccattcagtttgccggagctgacggatttgatttttcccgttgttatccccaatcggaattcaatcagcgttccatactttgggatttgaattatttcaaatattgtttccttaaagctaccggaatggagtttcaggaagataagctggaggatgatttccagaaaatgagtgatgttttgcttcgtagttcttccgctacttttatgtatcgtgattttcagagtcgcaatgtgatgataaaggatggaaccccttggcttattgactttcaaggaggacgaaaagggccgttttattatgatattgcttctttcttgtggcaagccaaagcaaaatatcctgatagccttcggaaagaattgttacaggaatatatagaggctcttcgcaaatatcaaccgatcgatgagtcttatttttatagtcagctccgtcattttgtgcttttccgtactttgcaggtgttaggggcatacggttttcgcggctatttcgagaaaaagcctcattttatccagagtgttccatacgctatcgcaaatttgcgcgagttgcttaaagaggaatatccggaatacccgtatctctgcaaaatgttacgtgaattgaccggactgaaacagtttacagatgatttggagaagcgtcaactgacggtcaaggtaatgagctttgcctataaaaaaggtattcctgatgatccgacaggtaatggtggaggttttgttttcgattgtcgtgcagtgaataatccaggaaaatacgaacgttataaggcttttaccggattggatgagcccgtgataactttcctggaagaagacggtgagattcttcgttttctcgaccatgtttacgctttggtggatgcttccgtcaaacgttatatggaacgcggattcagtaatttgtcggtttgcttcggttgtaccggaggacagcaccgttccgtttattcagcgcagcatttggcggaacgtctgaatagagagtttggggttaaagtagaattagtacatcgcgaacagaatataaaacatacatttgaagcaactatatagaagatcgttatgagagcaatgatatttgcggccggtttgggaagtcggttgaaaccgctgacggatactatgcctaaagctcttgttcccgtagccgggcgtcccatgctggagcacgttattttaaagctgaaagcattcggctttaccgaaattgtaattaatattcatcattttggcgagcaaatacttgaattcctgaaagtgaatgacaattttggacttactatccacatttccgatgaacgtgatgtgctacttgatacagggggaggaattcggaaagccagttctttttttgagaactccgatgagccttttcttgtacacaatgtagacattctttcaaatgtggatctgaaagaactttatgattatcatttgcagactgatggtttggctactttattggtaagccaacgtaaaacttcacgttatctgcttctcgatgcggagaagagactttgcggatggataaacaaagatacaggtcaagtgaaacccgaaggtcttcactatgaacaatcattattccaagaatatgcgttcagtggcattcatgtactttcacctgctatattccaattaatggaagttcccctgtgggaaggaaagttctctattatggatttttatctcttcacttgtcgacaaacgaacttctttggttatccggtggaaaatctgcaacttattgatattggtaaaccggaaacacttgctaaggcagaggagtttataaggtctctcggcaagtaatattgttcgctgggacgaataacatgagcctggttaatttagtttttgtatttgtttgggattccaacatatttcttttacctttgttataatgaaaacagaaatagaaaaaggaggcgaacaaaatggcaagtaattatattcgtttcgattggacgatgaaacgcttattgcgtaataaagctaattttgccgtactagaaggttttttgactacccttttaggggaatcaatccttattcagaaattattggagagtgaaagtaattaagaagatgagtacgataaatataatcgtgtggatttacttgctaaaaattctaaaggtgagcttattttaatagaagttcaaaacaataatgaatatgcttatttccaacgtacgttatttggaacatctaagttggttccgaatacataaatcgtggagaaggttacgacaaagttcgtaaggtgtatagcgttaatatcgtttatttctctttaggtagcggtaaagatgttgtatatcatggtaaaacggaatttcgcggaattcatcagggggatgttttagaactgatttcattccaaaaacaaactttcaaagtggatactgtcagccaactttatccggaatattatatattgaaagtgaatgatttcaatcaagtagcaagaagtccgcttgaaaaatggatttactatctgaatacaggagatatttccgataacgctactgcaccgggattgaacgagacacgccagcgattaaatttggatcggatgacaaaggaagaactcaatgcttattatagacatttggataatattgttattttgagagataatatatttacagaacgtgcggaaggacgtgcagagggacgtgccgaaggggaaagaaataagcaaattgagattgcgcgtaatttaaagaaggcaggggtttcaatagatgttattttacaatcttcgggattgacagtagatgaaatagagaagttataaaagtattactaaaagtagaaataaaaaaagaaaaggcgggaatgctcaaaaagggtatttttgcctttcctattttgttttatatgcatatccaaaaatgtctaaacaactcgtattatccgatgaaatggacgattttagacaaaattggaagaatcgtagctaaaataggacacatacaatcttgaatcttctatacatttgtagcggagaatgacgataggaagtcattcctattattaaaaggtaatcttaattattaaacttatgagaagcaaattcctatttttttgtctcttcctctttggaatgttgacagcttgtaaagacacaaaatgggtggatgttccagctggcactcctcctgaaggttcagttgttggaaaaccgggtgataacgaagaaccggatgaaccggaccaaacagaaaaatcatttattaattgttcttatatacgtggtgatttttttgagataaatcgaatttccggagcaagtatgggtgcttgtaatgatttgatttatctgacagctcgtccttatgctgacggtgatttgacatttgatctgccggtgaatgacgcagaacttacaggagcatcatatatgtcttcttatgaaggtcgtaatggagtggtgaaatttgatggtgccgggaaaatgaatggtggagatggtttacttcattccccggatggggcttacaagaagtttacatttggtacttatctatatataactgaatgggtagatggtgcttatttatttaataaggtaaacaataactctaccattatatctttccaacttggtgcaactgaaggaattttaagatttactattggaaattctacgacaactgttgtcaatgataatttaaagtctggtgcttggcattatgtagcgataacttatagtggaggaaaggctaaattatatgtagacactaataatattcctacagaatttacaggttctcttcctgctgaaattcctaatactcgtgcagatttctttcttggagagaaactcaaaggatatttggatgagacattcgttagcagtttggaagtaggtacgttgggtaggaatcctatctcttttgatactgatatttggaataatacaaaaacacttgcttattggaaatatgatgattctgcacagctcggaaaagattctcatacttgggtcattcgtttggaacaaatacgtgccacattaaatggacaagtaggagaccgaaaactacgtttgggtatcgctggtggtgaatggttgaagatggttagtaatgaaactgcacgcactaactttgctaataatgttaagaatgttttggataagtataatatggatggggtcgatcttgactttgaatgggcttattcccctagtgaattaactaattacagcaaggccatagtaaaactgcgcggcgtattaggaaaaaatgtgttttttacggtttctttgcatccggtttcttataagataacttctgaagcaattgctgctgttgattttatctctttccaatgctatggacctcaggcggctcttttttctttcgaacgtttcaaatcagacggtcaaactgctgttgaatatggaattcctcaaaataaattggtgatgggagtacctttttatggaactactggaacagccggtgaacaagttgcttattgtgatctgataaataaaggtaatcttactaacacttctgtggatgaatggatgtataatggaaagaactatacattcaatagtcagaatacaattcgccaaaaaacacagtatgtgtgtgagaatggtttcggtggaataatgagttgggatttggctacggacgtagatgtgacaaatgataagtctttgttgaaagttgtgaaagaagagtttgattactatgctaatcctgccgtagaataacagtataatctaaattagtaaatataatattatggaaaaaaagaagttcgtgaaaaaacagggacgggttgttctttttctgatactcctgttattgtttcctcttggtgcattagcacaacaaaagatgataaaaggacaggtcgtggatgatagtggtgaggcgattattggtgcaacggtcatggtaaaaggcaacactggaggaacgattactgatattgacggtaatttttcaattcagggaaaagttggaagtatactttctattacatacgttggatacgcttcgatgcaagtaaaggttactaaattggaaggaaataaatatgtgatgaaagaagatgccaaagtattggatgaagtggtagttgtgggtatggatacacaaaaaagaaatacgattacagcagctgttgctacgttgaaagatgatgccattgtcaatcgtcctgttacagatgtcacaagtgccttgcagggtaatattgcaggcttaaattttgctacggacgcagtgggaggtggtgtcggtggtgaaaccggtgcagatattaaatttagtattcgtggtattggttctatcaatggtggagagccatacgtattggtagatggagtagagcagagtatgcagaatgtgaatcctgccgatattgctagtatcagtgttttgaaagatgcttccgcttctgctgtatatggtgcacgtgcagcttatggagtagtattggttaccacaaaaagtggtaaaaaggagagggctagtgtcacctatcgtggaacagttggtttcagttcacctattaatatgccaaagatgatgaactcgttggaatacgctatgtataataatcagcaatatgataatggtggagcgtcttccggtttacagagaattccggataaaactattgaaaaaattaaaggttttatgcagaatccttattcagcagaatttccgggtattgaggctaatacttccggtgatgattgggcaggagcctattataatcagtatggcaatactgattggtttgattattattttaaagataagtctatccgtcattctcataacttaagtgtacagggtggttctgacaaggtaaactactatattggtatgggatatacttatcaagagggtttgctggatcaagtgcaggatgatttgagtaagtacaatttgaataccaaattacagatgaagaccaataattggttacgatttaatttgaataataatattactttgcagatgattaaacgtccgatggcgaatcagacgattctatataataagattggtagccatcgtcctactcaggttactcagttgcctgttgattcagaatacaatttgccgagctggaatgaaatgttatatttgaaaaattctcattatcagaggaaccgtatttcagatgcattgtcactttctgcaacagtaactccattggagggatgggatatcaccggagaaatgaaaatccgttttgatatagaaaataacgatctgataatggaaaataaccagaagtatgaaactcctgtgggtacttttaaaccgggtgatgctactaatcaaagacaaggatttgcttatcctggtattagctggaagaatatgtatttcggatcttatactcgtgggagtatgttcaattattacttatcacctaatgtttcgagttcatatactcatcaatggggagatcacttcttcaaggcaatggcaggctaccaaatggaattaaaagaagattcacaggaatatatgtacaaagatggtatgctgagtaatgatatttactcatttgacaacgccagtggaaatgtaatagcaggtgaagcccgttcacattggtccactatgggattttatgcccgtttgaattggaactacaataatatttattttttggagttcagtggacgttatgatggttcttcccgttttgctgcggggcatcgttggggattcttcccatcattctctgccggttatgatattgctcgcacgccttatttccaaaaaatggcactgcctgtatctcagttgaaggtacgtgtttcttatggtcgtttaggaaaccaaaatggagcgggcttatatgattatatcgctcagatgcccttagatgcacagggtactaatgcttggttattaccgggtatctcttcttccacagcttccaaaggtacgattgcacaaactccgaaaatgattagtccttatattacttgggagaaagtggataatgctaacttaggttttgatttgatgttgtttaagaaccgtttgtcaattactgctgatttatatcaacgtacaacacgtgacatgattggtccggcagaatcaataccaagtatcagtggtatcgcttcggaagatcgtgcaaaagtgaataatgcaactttgcgtaatcgtggatgggaactttctgtcagttggaatgataaattgaaatgtggtttcagttatggagttggtttcaacgtttttaactataaggctgtagtgaccaaatacaataatccggaaggtattatttataataaccatacaggattggctgctaataaaggttattatgaaggtatggatctcggtgaaatttggggatatcgtgctgatgatctctttttgtcgaatcgtgaaattgatgattatctgagaaaagttgatctgacagcgttcaaatcaaatgatctttggcgtcgtggtgacttgaaatatatagatactaatggtgacggtagagtagatggtggtaaaggtactttgtcagaccacggagatctgcaggttattggaaatactactcctaaatattctttcggtattaatttgaatcttggatataagggtttcgaagtatctaccttgttacaaggtgtggcaaaaagagatttcccgattgctggaagtaactatatgtttggtggaaataactataactttaaagaacatcttgattatttcagtacagagaacccaaatggatatttgcctcgtttgactggttggaaagatgataaggattttttagtgaatactggatacaatacgacacgttatttgttaaatgctgcttatatgcgtatgaaaaatttaacagtggcttatacatttaataaaaaacagttgaaacatattggtatcagcaatctaaaagtgtatgtaacttgcgacaacttgtttactataacaaagttgccgaaacagtttgatcctgaaacactgaaccaggtaaatatgtcggcgggtggtgatgctaagaatacggctccgggtttaacttctccgatgaagcaaaatggtaatggtatggtatatccgatgaaccgtaacttcgtgttcggacttgattttacattttaattagataatgatgatgaaaaaattatatatattatttgcggtaggggcaagtgttatgatgtcggcgtgttccgattttctagatagagaacccatgacaacccccaatagtgaaacattcttgtccaatgcaagtgcagtgaacaattatattaatggtttgtatatagcacttccttcttttggtacttatgacatgggagtccgtggagaagaaaagaatagtgacaatatcgtggcggaggtttatgataaacgtcttaatggagagctgttggagacaggaggaggtactgccgaatggcagaacggataccaaaatctacgtaatgtaaattatttttttgaatattataaagttccagaagcagaggaaacaaaggatgtgctgtcactgaaaggggaagcttattttttccgtgcttattggcatttttacttactaactagatttggtagtattcctgtaatggataaattttgggatggaaacgctacagttgcaggtttgcaaattcccccacgcgatcgttcggcagtggcacagtttattattgatgatttgaagacggctaagaatttgctttattcacgtagtcagtataaaggcttgaggatttgcaaagaagctgctatcatcatggccatgagagtggcgctttatgagggtacatgggaaaagtatcataagggaacagattttgcagccgcagaggataaatctacagatcttttaggacaagtgttgacactaggtgacgaattgtttgctatgggactttctttaaatacaaaagataatgataagaaatttgtatctaaagaagatgcttatgcacacttgtttaattcgaaagatttgtcggatatgacagaggtcgttttttggaaaaagtattcgatagcagatggagtgactcataatttgagtagtaacttaggtgctggttatgtggacaacagtggagcggctggtttagctcaatcattgattgataattatctgaatgctgatggaagctttattgatcctaacgatgaaatttataaggatttcaatcttacatttaaagaacgtgatgctcgtttgttagcgacagttatgcattcaggctgtaaatttaagtctacatctcctgagtctaagtcaaaagctatgtttgtggatgaatattcggatgaaaataaacagaaagttcgtcctccttatctaacagaaagtggtccggcacgtaatgcaactggttatcatattcgcatgagtattgatacaacttatgtcagtggccagggtgagacctcacttccgataattcgttatgcagaagctttgttagcttatgcggaagctgcagaagaattagataaatgtgatccaaatgtattggaaaggacattgaaacctttgcgtgaacgtgcgggagtgacctatactgctcctgctgaaattgatcctaattttaccgattttggttatccaatctctgccaaattgcaggaaattcgtagggaaagacggtcggaactagctttacaaggattccgtttggatgacttgatgcgttggagagctcacaaattgattcagggaaaacgtggaacaggggcatattttggagcagatggtgtgttatataaagcatttgatcctaaaacagctgtagatttgaaaactattttaactacggatggttggcttgatccacagaaagaggttcttccacgaggctatcagtttgattctaaccgtgattatctgctgccaattcctccgagtgaattgtcactgaatcacgaattggaacaaaatccgggatggcagaggaaataagagaatagaacaatatttattgatgataattagataaataaagaggagttctataaattaaaatattg

SEQ ID NO: 11971 - DNA, 226 bp, Unknown
  gut microbiota DNA sequence
cagatagagcaggaagcgcagaaatatatccttaaccgtcctctaaagaaataacggttatggaaaatagaaaagcgacagaagctgggcaggacgtcactatgcagaaagaggatttcgcagttctttggaaaaccattcatctaaaggtgacggacacttacgaagtaccgcccgaaatactctgggtgaacggctctaccattggcacgctgggtaatttcag

SEQ ID NO: 11972 - DNA, 684 bp, Unknown
  gut microbiota DNA sequence
agtactgaagtattcggcatacctgccaccgaacaaacggaaaatcctctatgtcgatacagagcagagtaaataccattgccacaaggtcatggagcgtattttacgacttgccggactgcctaccgacaaggacagagacgattttgttttcatcgtgctaagggagcagacacccgacaagcggaaacagattatcggctatatgcttgaaaatatgcccgatgtggggttactcattattgacggaatccgtgacttgatgtatgacatcaacagccccagtgaatcgactgacctaatcaacctcttgatgcgctggtcaagcggatataacctgcatatccacactgttctacatttgaacaagggggatgacaatacaagggggcatatcggtacggagttgaacaacaaggctgaaaccgtcctgcaaattacgaaaagccagcaggacggtaacataagcgaggtaaaggcgatgcacatacgtgaccgggagtttgacccgttcgcatttcgtatcaatgacaacgcattgcccgaagtcgtggacggctatgtgttcaagcagcccagccaagaccggggctttccactggcagaactgacggaacaacagcacaggacagctttggaaaacggttttggcaaacaggtcatatatggttacgagaatgtcct

SEQ ID NO: 11973 - DNA, 536 bp, Unknown
  gut microbiota DNA sequence
aaattgctttagcctgttccgtttccgtcttccacttttcttttaaatcgagataagaacgattgttttctaattcacgaatacggatattgatggaagatatttgttcttcttcaattttgaagaatccttccggttgcaataagtcgtaaacaggagggacaaaataaggatgcagattcttccctgccagattgccggagaaagcagcgagataaccaatttcattgactgcttctttttttgcagtctcttgtttattctctttttgtacaatcagtaccccgaacatttttccgaaagctaattcttcttgccattcttctcggctcgcgatatattctttcacttcttccgctgccaacacgcacaatggatgaggcgtatagtggaaaggataagtgaatttatccggtaacgcaaggtgagaaatgggttgcttgaaaaaatgtatcatcggtttatatatatgaatgtgattacctttgcaaaagtaaagtaaatctgtgaattatcgaatgaagtaacatgaatag

SEQ ID NO: 11974 - DNA, 308 bp, Unknown
  gut microbiota DNA sequence
caggcttcattcttcactaatagcttttggatagccattgcgaacgacaggctgctttccagcaccactttatcggctgaaatcggggtgaagatatagtccatgcccgcaagggagttgataacaccctcgctgttcaccgtgccgggcaggtcgaaaaacactatatccggcacgtgtccggcagtggcaacatattcgtcagccgtgactatcgccttttcgggcgaactgcacagcaccgggtaggctttcttccccagccgggtgaactgttcatacgccatgcgcttgtaatcttcatccgc

SEQ ID NO: 11975 - DNA, 579 bp, Unknown
  gut microbiota DNA sequence
ggagcgttttcttgtcgaatgtgtatgaaagctggatgttacggatggacagataagaaccgtcttcgagatatcggttggtaaatttactcatttccgtagttggatgtacatcattggaggtgtaagtacggtctgctaagccgttacccggcgattcgggcgaacgccatctatctgctactttaatggaaaggttgccattgttgtttccgcgcagtgtctcacgtaatgtatagttgtaaatctgatttccgtattgtccgttcaactgaaaactaaatgaaaagtttctgtatgagaatgtgttgaccataccggcattgaaacgcggataaggatttcctataatagtacggtcattgtcatcataaagtccgtcaccgttaaggtcgtaccatttgcagtctcccggccgaacgttcgggtcgaaagctagtcctgaataagggtcattccgcaatgcttgaatttcttccattgactggtaaatgccgccaaatacatttccgtagaacatacctatcggatagcctactttagtaatgtttgattctgctactccatcgatgatggctt

SEQ ID NO: 11976 - DNA, 6378 bp, Unknown
  gut microbiota DNA sequence
tataccacagagctaagaagacaaagcatatttcccgtgaaagcatcggacgccaaatcatcactttgctgagttaaaatacaaaccaatgctcctatcagaccgatagaaattcctattatttttttagtggtcgctttttctttataaaagaatatcatcatgagaaaaacccaaataggttggaggctggtaaaaatggaactggaaacaggagttgttttactcaatccggccaggtagagaaacataaagccataaagtcccaaggcccccaacaggaaaaggagccatttatctttggcggatgatttttccggaggcataaaccacccgattacccaaaaggctgctgccgcaaacgtgcagcgaagggttgctcccgtcagcggactcatccacaaaggcagaagatacttcagggcattcatatttaacccgctaaaaactttcgagacagccatgctaagattggcttccagtttcttattcttcattttttattttaattggtcgttaaacaaaaaggtatgacggcgccggtatgcccagaaaagagtgacaacagtaatcagcagattaaagataaacggaaactcttgtgattgggtatgaaatatccattggaaaaaatcgacgataaaaggataaagtaagatggcaagatagttcatcatcattacaaatgccagtgccaatgtggccttttccggcaatgcggtatgcgtagtcttatcataaagcatgggttggatgacaccatagcccaaccccacaaacagacatccgggaataatcagccattcaagcggagctatccagatgagcaacaatcccaatgccatgaacagcaagctgtatgctttggtacgttctttcaatgtagccgcaatcttatccagacagaatcccggagccataatcgccagaaagaaaagagaaatcatcaagcccgaatttccacttgagaaatgatgcttctccatcaggaaaggcagattgaatatcaccgccaatacgatataagtcgtcactccgtagaagaacatcaattctatcaaatgcttcacatggataccatatttactaccgcctgtatctatcaccgcccgttcttctttcgaacttgcactatcagcagcggcaacttccggccggtctttcttcagacgaccgatcaacagaatagaaatcagcggaagcaaatagaccagaaaaggtaaatgccaactgacttccgccagataaccggtgacggcagtcgctatcaccaacgtaaaattagtgattgctgaactaaagccgaattgttttacccggtaagttccggtaaaatacctcgacaccagaccggtagacaacggaataatcagcccagccccgatacccaataaggcacttactacaatcaattgccacatcttattggaaaccagatacaacataccgctcaccgcaaagagccaaagtccgattttcaggatacggacaaagtcgactttctccgtcaacttaccacccagcagaatgaaaggaataatgagcaaggaaggaagcgaagtcaacatctggatatccaaatccgtagcttccggaaatatcttcgtaagatcgcccaatataggcgaaacggccagccccggcagagaagtcagtgccgaaacagaccagatggcaattaaagtgataagagaaatcgttcctcttcccgtctgtattttcatacgcaaattcgttaaaagtttaggtttgatgagaacaatactcatcgcataaagttcaaaacgaatcccccccttaataaacgccaaataatgtaaaagccgaaaactttcaaaacagcctgctgttgttgtgggaaattcgacggggaaaatccccatcgccctaaaccttttaaaaaacaaattaagtatgaaagatttaaatttcagaaaaggcgatgctaaaacagaagcatttggttcagacagaatgttgcaaccctctccggtagagaagatacctgatggacctactactcctgaagtcgcctatcagatggtaaaagacgaaacattcgctcagactcaaccgcgcctgaacctggctactttcgtgactacctacatggatgaatatgctaccaagctgatgaacgaagccatcaacattaactacattgacgaaactgagtatccgcgtatcgcagtgatgaacggtaaatgtatcaatatcgttgccaacctatggaattctccggaaaaagatacttggaaaaccggtgctctggctatcggctcctcagaagcttgtatgctgggtggtgtagctgcttggttgcgctggcgtaagaaaagacaggctcaaggtaaaccatttgataaaccgaactttgttatttctacaggtttccaggttgtatgggagaaatttgcacagttgtggcagattgaaatgcgtgaagtgcctttgacacttgacaaaaccacactcgatcccgaagaagccttgaagatgtgtgatgagaatacaatttgtatcgtacctatccagggtgttacatggacaggattgaacgacgacgtagaagcattggacaaagcactggatgcttacaacgccaagactggttatgacattcctatccacgtagacgctgccagcggtggttttatccttccgttcctttacccggaaacaaaatgggacttccgcctgaaatgggtgctttccatcagtgtatccggtcataagttcggtctggtatatccgggactcggttgggtggtttggaaaggcaaagaatatctgccagaagagatgtcgttcagtgtaaattatctgggtgctaacatcactcaagtaggtttgaacttctctcgcccggctgctcagattctgggacagtactaccagttcatccgtttaggattccaaggttataaagaagtacagtacaactctttgcagatcgctaaatacatccatgacgaaatagccaagatggctccgttcgtcaactactctaacgaagtggtaaacccgttgttcatctggtatctgaaaccagaatatgcaaagaacgctaaatggactttgtatgatttgcaggataaactgtctcaacacggttggatggttccggcttatacattgccttccaaactggaagattatgtagtgatgcgcgtcgttgtccgtcagggattcagccgcgatatggcagatatgttgctgggcgacatcaagaacgccatcacagaactggaaaaattggattatcctactcctacccgcatagcacaagaaaagaatcttccggtagaagctaaaatattcaaccacggcggccgtcgtaaaacagctaaaaaataaaagatctatgaataaaaaagtaacactcgctcaattgcaagaagtggtacaggaggcatacgatcaggtaaagacgaatacgggaggcaagaatgccgactatatcccttacttggccaatgtcaacaaagatctctttggaatcagtgtctgcctgctcaacggacagaccatccatgtgggggataccgactaccgcttcggaatagaatccgtatccaaagtacatacggctatcctggctctgcgtcaatatggcgctaaggaaatattggacaagatcggagctgacgcgacaggcttgcctttcaactctatcatcgccatcttgctggaaaacgaccacccgtctactccattggtaaacgccggcgccatctccgcttgcagtatggtgaaaccaataggcgactctgtcaagaaatgggacgccatcgtaggaaacataaccgacttgtgcggcagtgctcctcaactgatagacgaattgtataagtccgaatcggatactaacttcaacaaccgttccattgcttggctactgaagaactacaaccgtatctatgatgatccggatatgtctctagacctttatacgcgtcaatgttcattgggagtgaccgcattgcagctttccatcgctgccggaacaatcgccaacggcggtgtgaatccggtgaccaagaaagaagtgttcgacgccagcttgtctcccaaaatcacagccatgattgccgcggtaggtttctacgaacataccggcgactggatgtatacttccggtattcctgccaagacaggtgtaggaggtggtgtgatgggtgtgttgcccggacagttcggtatcgcagcattcgctcctcctttggatggatcgggtaactctgtaaaagcacagttggctatccagtacattatgaacaaactaggactgaatgtattcggtcagaatcatatcacgatcgtcgattaaaagactttcccgataaaaagtgaagggttactattgcgcgatagtaacctttttctattacaatctatttatcttacgatgttaattaacgaactttgaaagagattgcgggaacatctcgtacaaaatgttgttataacactgactttaaaatatttttcacttaaaaccttaacttatggcaaatattaaaaatgcagtgaagctgggggtgtttaccctcgctatcatgaacgttacggcagtagtatcattgcgtggactaccggccgaggccgtatacggaatgagttcggccttttactatctttttgcagctattgtctttcttattcctacatcgctcgtcgcagcagaattggcggccatgttccaggataaacaaggcggtgtgttccggtgggtaggcgaagcctacggcaagaaactgggattcctcgccatttgggtacaatggattgaaagtacaatctggtatcccacagtactaacattcggtgccgtatccatcgccttcatcggaatgaatgacgtacatgatatgtcactggcaaacaacaagtattacacgctcgtcgtcgtacttatcatctattggctggcaacattcatttccctgaaaggtatgagctgggttggtaaagtggctaaaatcggcggtttggtcggtacgattattccggccggattgttgattatcctaggtatcatttatctcgcaacaggcggacactctaacatgaatttcgacagcagcttcttccccgactttaccaatttcgacaatgtcgttctagccgccagtatcttcttgttctatgccggtatggaaatgggcggtatccacgtgaaagatgtagataatccatccaagaactacccgaaagcagtatttatcggtgcgcttatcaccgttcttatctttgtgctaggtactttcgcacttggtgttatcatccccgcaaatgatattaacctgactcagagtttacttgtcggttttgacaactacttcaagtatatccatgcttcctggttatcaccgatcattgccatcgcccttgccttcggtgtattggcaggtgtattgacatgggttgccggtccgtcaaaaggtatctttgccgtaggtaaagccggttatatgcctccgttcttccagaaaacaaacaaactgggtgtacagaaaaacattctgttcgtgcagggtatagcagtaactgtattaagtctgttgtttgtggtaatgccttctgtacagagtttctaccagatcctgtctcagctgacagtgattctttatcttatcatgtatctgctgatgttctccggagcaatcgcacttcgttataagatgaaaaaactgaaccgcccgttccgtatcggtaagagtggcaacggtttgatgtggttcgtcggcggactcggtttctgcggatcattgcttgcctttatccttagctttatcccgcccagccagatttctacaggtagcaacactgtatggttctccgtactgattatcggtgctatcattgtcgttgttgctccattcatcatctatgcagcaaagaaaccgtcttgggtagacccgaattccaatttcgaaccgttccattgggaagtacagcctcaaactgcgaatgtagctgccggtagtgtcagtacagcaacttccaatgcgacaacttctggtgctactccgtcaggaagttctaaggtttcaagcggaagtgcaacccctaataatacatctccggaaaccggaaataccaaaaaggagatacctaagtaaaaggtaaaggtatatctctgtatataaaaagtaatcccgtatcggctattcaggtagttgatacgggatatatattatctaaaaaatacaactattattctccatatcagaaattggcgaaaatttcttccaaagttattgcggtattaaaaaatatacttatctttgcacccgcaaacaagaaaggtgtcatagctcagttggtagagcaaaggactgaaaatccttgtgtccccggttcgattcctggtga

SEQ ID NO: 11977 - DNA, 506 bp, Unknown
  gut microbiota DNA sequence
ttgtctatcaacatggcgaaccaccccggacggaagtacaaggaagttttcttctcgctgggcggcacgcagtcggcggtgtacgccacagaagtttcattggaagaatattacaccttcacgacagaggaaagcgagaaaatggaactgttcgcacttgccgacaagctgggcggcaaccttgaactggctatcaagaggcttgcagaaagcaaacgtaatccccaatcatcaacaacttaaaaatcaggaacatgaaaagaacaattctccttatggcggtatgcctttgcttcatcggcaacgcatccgcacagtgggtggtgtcagaccccggcaatttggcacagggcatcatcaacaccaccaagcagatagtgcagacttccaccacagccaaaaacacgctggacggcttcatggaagcgcagaagattttccagcagggaaaagtctattacgatgcgctcaaagcggtacacgatgttgtcaagggcggcatcaag

SEQ ID NO: 11978 - DNA, 491 bp, Unknown
  gut microbiota DNA sequence
ccgaaacgcttgctacccaagtggcgcactttccggtcattgttcttgtagatgctctgcattatcagtttcaccaatagcgggctttcattccccagttcccggaaatagatgttcatccgggtatgtgagaagtcggacgtatcttcattctccaagaagtctttcatttcgatgttgagcatttccggttcacgggcgtacttggcgttgaacgaaaagaaactgccgtcctcgcagataacggagaagttcgtttctcccggaaagccctctgtcgtggctttcaccctgattacgttctccgcaccgtccgccttgcccgctatgatatggttgcttcccaaatcgacatagcggacggcggcggggaagatgatatgcaccgtcttggcaaaggtcacttccacgccgtagggcgtaaccatttggcggtacgggagtttccgggtaatcccccggtacaagtcgttgccagccgcatacttcac

SEQ ID NO: 11979 - DNA, 497 bp, Unknown
  gut microbiota DNA sequence
tatcacagcgaaacggcagagggcaaaccgtacacctacacttcatcggtggcagaacccatgtacggctacaagggcaaacagcacatcaagctgtaccgcccgttctccacgccccgcttcctctacggcggcagcttcggcgagaactacagtttcgggctggaacaactgccagccaaaggcgacacgctattcatcacgggcggcgagaaagacgtgctttcgctggcggcgcacggttttcacgctatctgcttcaacagcgaaacggtgactatccctcccacgctggtctatcggctgacgttccgcttcaagcacatcgtcctgctctttgacatggacaagacgggcagggaaagttcatgcaagcaggaaaaactattggaagaatttggcgtgaaacgcctgctgctcccgcttccgggaacgaaagaggaaaaggacatatccgactacttcaaagccgggaacacccgtgaagatttcctgaa

SEQ ID NO: 11980 - DNA, 194 bp, Unknown
  gut microbiota DNA sequence
ggaacgaaagaggaaaaggacatatccgactacttcaaagccgggaacacccgtgaagatttcctgaaactgtttatcgaatttttagacaacctgtatagcgacacattgattatgcttaaatcgtgcgagatagatttcaacaacccgcccgccaaagcgcaagagattatttcggcgggtgacgttccgct

SEQ ID NO: 11981 - DNA, 869 bp, Unknown
  gut microbiota DNA sequence
gatttccattgttccaccatttgctatgtcttggtggttgaaaaatggagtattcagagactcgccgtttagtgatatgctttcgatgtatttattctttttggaattgttttttactattatactgaatgtcttgtcttcgggcagattgatcactgctttgtcaaacacgggacgtccgatggaatataccggttttcccggacacacctgatagaaccccatggagttgagaacgtaccacgcagacatctgaccgcaatcctcattaccggataatccgtctacactgttggcatactgactgcgatagacactatctaccagttcttgtgtcctccacgggcgatttacgtaattatacaaatggatcacatgatggctgggttcgttgccatgtgcatattgaccgataagtccgctgatgtctgacgatgtcgtttcaccttcgagtgatgaatcggctgtgaataacgaatcgagtttctgggcgaatgcatcctcaccgcccatcagattgaccaacccgtctacatcatgaggcacaaaccaagtccattgccaggctgttccttcacaataatcatcgttgcggtgggtggatgcacgcggattgaacgggatgcgccattctcctttcgagtcaagtccgcgcatgaagcgggttgatttgtcgaaatagaattcgtatgctttggcaaaacgttcatatttggctttggattcaaaatcgttcattgcttctgcaaaaatagagatacaccaatcgtcatatgcgtactccaaggctttggctacagactcattttcacggtcgcagggaatatagccgatggaatttttataatatttcgctttcggcatgagat

SEQ ID NO: 11982 - DNA, 412 bp, Unknown
  gut microbiota DNA sequence
accctgaaagccaccgttatgtccgcatcctttgaaatgatgcagccgttctccaccgccaaaagggggaatttcctttccagcgtggtagcctttaacatatttctcatggtctttcttcctttctttttttgtaggtgaataatcggggtatcgcctttcggctgataatgaagcgtggatgccgtttgcgtgcggcggctttcatcagcccgtgcgtgccgtacttggcgttgagccggaacgtctgccacacgagcagcagcgaagccgacacgatgaaaccgatacatagccactggttcacgcccgccatgaacaggacgatgaacaccacgaagacggcgagcaagccgccgcaaaagataaagaggtactggcttttcagccccttgaactccaccggcttccc

SEQ ID NO: 11983 - DNA, 359 bp, Unknown
  gut microbiota DNA sequence
atggtctgatgccgcccgccgttcttctcgtagagttccacgaccagcagcttgtcgtcaggaatggtgaacttcggcagggcgtacaccgtgcgcacggtactttttcctgcaatctctatcacctcgttgtagctacgtaccgcatccagcaccgtttcctgaatagccgtgcgcttgggtactttcttatcggttatcttaaacttgatgaagtcggtatcgaaaggcacgttggaactgttctttgtctgcgtgtgtacatagagcatcccgttataggtgtaaatccccttgattaagaactgtatgccgaaacgcttgctacccaagtggcgcactttccggtcattgttctt

SEQ ID NO: 11984 - DNA, 305 bp, Unknown
  gut microbiota DNA sequence
gcggatgaagattacaagcgcatggcgtatgaacagttcacccggctggggaagaaagcctacccggtactgtgcagttcgcccgaaaaggcgattgcaacggctgacggatatatagccgccggacacgtgccggatatagtgtttttcgacctgcccggcacggtgaacagcgagggcgtgataaactcccttgcgggcatggactacattttcacccccatttcagccgacaaggtggtgctggaaagcagcctgtcgttcgcaatggctatccaaaagctattggtgaggaatgaagcctg

SEQ ID NO: 11985 - DNA, 7297 bp, Unknown
  gut microbiota DNA sequence
attgttacgttgaccctttgtcaaatgcacaaaaacccgctaaaattgcattttagcgggtttttgtcagtaaaaagctggtgatttgttgggctacctggattcgaaccaggaatgacaggaccagaatctgtagtgttaccattacaccatagcccaatgattttcgtttgcgggtgcaaagatacaaataaattgggaaatcaaaacatttcagctattttttttgcaaaaatcctcaaattagttttccctaagcaactatctccactaaaaaacacaaaaattgaagtataactttcttgtatccaataaatcagcgtatatttgtcaaaaatatcacgtttataatcagaaacaaagggtgagccttttttgttataaaccaaaagagaacatgaattattaatatcaaatgtaagaatgaacgatactaaagtattaatcgagaaaataaaagagggaattcaagaaaaaaaaggtaagaatatcgttattgccgatctaaccaaaatagaagataccatctgtaaatatttcgttatctgtcaggggaactctcccagccaagtaagtgctattgtagactcaatcaaagaatccacacgaaagggtgctgacagcaagccttttgcagtagacggactccggaatgccgaatgggtagctatggattatgcagatgtattggtacatgtatttttaccggaagcaagagccttttataatcttgaacacctttgggctgatgccaaacttactcaaatccccgatttagactaaattacgattatggacaataagaatagcaataacaataataacagcaacaaacctaacaataaggttaacttgccaaagttcaatttgaattggatgtatatgattattgccctgatgcttctcggcctctggtggggcagtgattcaaagggtgtcggaagtaaaaacgttacttacagcgagtttcaggactacgtaagaaatggatatgtcagcaaagtattgggttatgaagataagtcaatcgaagcttatctgaaacccactgctgttggcgctgtattcggagcagactccacaaaggtgggacgtaaccccgtcattaccagccggacaccgtctaccgataagttggaagaattcctgcaaacggaaaaagaagccggtcatttcgacggaacatcggattaccctcctaagtcggacatatttcccgctatcttgattcagatccttccgctcgttctgctagtagcactatggatatttttcatgcgccgtatgagcggtggtggaagtggaggtcccggtggcgtattcaacgtagggaaatcaaaagcccaactttttgaaaaaggaggagccatcaaagtcaccttcaaggatgtagccggtctggcggaagccaagcaggaagtggaagagattgtcgagtttctgaaagaaccgcagaaatacacggatctgggaggtaaaatacctaaaggagctttgttagtaggccctccgggaacaggaaagacattgcttgccaaagcggttgccggtgaagcgaacgtacccttcttctctcttgccggatcggattttgtggaaatgttcgtaggtgtaggtgcatcccgcgtccgcgacttgttcaaacaggcaaaagagaaagctccctgtattgtctttattgacgaaatcgatgcagtgggacgcgcacgtggtaaaaatcccgcaatgggaggaaacgacgagcgcgaaaacaccttgaaccagttgcttacggaaatggatggcttcggttccaacagtggtgtgattattcttgccgctaccaatcgggtagacgtattggacaaagccttgctccgtgcagggcgtttcgaccgccagatacacgtagatctgcccgacctgaatgaacgtaaagaagtatttggcgtacacttgcgcccgatcaagatagatgacacggtagatgtagacttgctggctcgccagactccgggattctccggtgccgacattgccaatgtctgcaacgaagcggcattgatcgctgcccgtcacggaaagaaattcgttggcaaacaagacttcttggatgcagtagaccgtatcatcggtgggctggaaaagaaaaccaagattactacagaagccgaaagacgttctatcgccttgcacgaagcgggacacgcgtccatatcctggttgctggaatacgccaaccctctaatcaaagtgacaattgttcctcgtggacgtgcattgggagcagcctggtatttgccggaagaacgtcagatcacaacaaaagaacaaatgctcgatgaaatgtgtgctacgctgggaggacgtgcagccgaagacttatttatcggccgtatctctaccggcgctatgaacgatctggaaagagttacgaaacaggcatacggtatgattgcttatttaggaatgagtgataagctgcctaacttatgttattacaacaacgaagaatactccttcaaccgtccatatagcgagaaaacagccgaacttatcgacgaagaagtaaaaaagatggtcaacgaacagtatgaacgtgccaaaaagatcctgtctgaacatcaggaaggtcacaatcaattggcacaattactgattgacaaagaagtgatctttgcggaagacgttgagcgtattttcggaaagcgtccttgggcttcccgttcagaagaaatcatggcagccaaagaaagccaggatgcggctaaagcagaaaagcaacttgctgaaaagctgaaaggggaagaaaaagagataaaagaagaggaagccaagaattctgcggaagaaaaagctgcggaaagaaaagttaccatagaaggttctaaagtcactgtagagaaaaatacatctacggaaccgactaccgataaagaaaaataagccactgtttaatcaattaaaaaacgagctgattgtgaacaattttataaaacgagccatcacaggtgtactctttgttgctattttggtaggatgcatcctctatggcgcatttagcttcggcatcttatttaccgccattagcgcactcgccatttatgagttcggacaactggttaatatgcgtgcggaaggggttcagataaacaaggctatcaatatgctgggcggtgcttatctgtttcttgccatcatgggattctgcattgacgcggctgattccaaaatctttatcccctacgtactgctattgctgtatatgatgatcagcgagctgtatctgaagaaagagaatcccgtgcttaactgggcttattccatgttcagccaactctacatcggacttccattcgctttactgaatgtattagctttccacaacgatccggaatacagcagcataagttataaccctattctaccactatctatctttattttcctttggctgaatgacacaggtgcttattgcatcggttcgcttatcggaaagcacagattgttcgagcgtatctctcctaaaaaatcatgggaaggttctatcggcggcggagtagtagcgatcggagtagccttcatacttgctcattatttcccagtgatgtccatgccggaatgggcagggctggctttagtcgtagttatattcggcacatggggggatttgacagaatcactgctgaaacgtcagttgcacgttaaagattcgggaactattcttccgggacacggaggaatgctcgaccgttttgacagttctttaatggctatcccggcagcggtcgtttatttgtatacactaacctggttctaatccaatcgctttatcggattatcaaacaaaccaacatcataaaaagaaaaggtcgggaacttcataggaagtgctcccgacctttttcacatacagcgaatcatagttagaggttatcggattgaagaagtggaatgcacatccttcgccttttccggcactcctaccggatggtcgaaatcaagaacgatcactcttccttctccattttcttttgaatttatagtaactttaaaacctttcatcgtagtttcaccatcctcttccgtcggatagaaatcttccagattataggaaacccgtccccatccccaataaccggtcacatcatcatacgtattataacgcaactccagatgaacataaccgtctttagcaacatttaccgtctccggtgctgatgggtcaccaggttcaccgggttcagtcgtatccatcagattctgaacaaggctgatacgatgtttcgtcgaacgaggcaggttctgatggaaaataacattcaggtattttccccctagccacatatcaccttgataaatcacaatcggatcatttccaaattcctcttcttcttccgtagttttcatttcttccacccctttagtcaagacatcctgaatgccttccatttttacctgaacgcccttctcgtctttcatatcagccaaaggattaaagaatgcaaccacccgttcaccatctaccggtctgtaccaaggaatggaagagctgaccggatcaatgattccccaacggtcaccctccaggaaataaccgccgccaccggttgtacgtacggtcgcccagtcccaactgaaatctccgatagaataataatcgtcgtcatcgtcacatgactgcaacattggcaccaatgccaacaatagaattcctaaaagccatttaaattttttcatgttagatcctttctttttcaaccttctgtcttataaataaaaaagccgtgcaaatattgcatcggctttacgtttattcagaaaaagaaagttattttttcaacagctccaacatcttgcgcgccgcatgacgaggagcgcctgccggacctagccgttcagccatacgctcatattccgccagcatttcactcctgcacttgtcatcttcaagaatcttttccagttcactctgcatattcttcactgtcatcgtatcagccaccaattccttcacaacctcacggtccgcaatcagattgaccaaagaaatgaacttcactgtcagaatatgacgcctcaagaacgaaatcacttttccaatcggagtgtgataacaaactacctgcggaatgcggaacaacgctgcctcaagggtagccgtccccgaagtaaccaaagccgcatccgcgtgttgcatcagacgataagtctgaccgaaaataattttcaccttcgactctcctatatgctgttcgtaatattcaggagcaatggaaggagcgccagccagaacaagttggtagtcagggaaagcagaagccgccttcaacatatccggcaagttatcttttatctcctgttttctgcttcctgccaaaagtgcaataatcggtttattctccaactgattatccgcaataaactcagccgtatttttcggatgcgcttcctgataggccgtcacttcatccactgtaggattccccacataatggataggatagtgatgctttccttcaaagaactcgacttcaaaaggaagaatggagaaaagctcgtccacatcacgctttatattcttgatacgatattctttccaagcccatatcttcggagaaatataataatatacgggaatctgcgtctttgcgtggacaaatttggcaatatctagattgaatcccggataatctaccaaaatgacaacatccggattccaggaaacgatatcttccttgcaacgtctcatattggcaaagatagtacgcagatggagcaacaccggaataaatcccatataagccaactccttataatgtttcaccaacgtaccgcctacggcagccatcagatcaccgccgaaaaaacgaaattcagcttgaggatcttccaccttcaaagctgccatcagatgagaagcgtgcaagtcaccggaggcttcgcccacaatcagataatacttcatagagttgagagttgagagttgagagttgagagttggtagggatagatgaccaatagagtgtcatgctttctttttcaactttcaattttcaactaattaaaccatttattaagttcatcaataaagtgatatgccgtcacatcgacagtcgtcggagtgatggccacgtagccgtttgctaacgcccaatgatcgttcctttcattttcaggttcatgatcggtaaattcacctgtcagccagaaataattcggatcgctcagacgagggcaagcagcccactcgttcgtccaacaccctttggcctgttcacaaatctttattccttttatatcagccgtatccgggaaattcacattcaagcaagtcaaaggaggaagccctttttccagtatcatcgcggcaattttgcgtatataaggtcccgcagcttcaaaatccgcatcgggagcatgattacacaaagagaatccaatggaaggaatcccattcagacaaccttcaaacacaactcccatcgtaccggaataatgtacattggtagccgaattatccccatgattaataccacccactaccaaatccggtgtccggtcgagtactgtattccgagccagtttaatgcaatcggtcggggttcccgaacatttgtatacagtcagcccaacttcttttttgaccaattgataatgaacaggttgtgtcaccgtaagcgcacatccgctaccggaacgcggtgaatccggcgccattaccacgatttctcctaatggacggagaaacttaatcagctcactaatacctttagccataatcccgtcatcatttgaaacgagtatcaacggcctcttattttccatatattcaatcctttcctttttttaattattcgcacaaaagtagcaaaaagaagccggaatgccaacattggtcaaatataatccattgaagtttcgtaagttcaaccgacaaactcaattcgcctgcggtcattttccggtcagaacgactttctcagccggatacaagccggacattgagttattcatgcggcttgtttaatacattatacagcttacttaatacatttatacggtaggtttaatgtatttagagggtaataataacccgttttacgtatatgagccattcggttcacgtacgaaaacctgaaagtccacgtacatcatccgaacgaatcacgcacgtgaaacgggaacgcaatgccttccaaatacattagcagtaccccgtctgtacgttacatctaccggctttggctttaaataccgcatcatatacagagaacataaccactaaacagtcaaaaaggactttcttaatacatag

SEQ ID NO: 11986 - DNA, 6750 bp, Unknown
  gut microbiota DNA sequence
ttacgcatcaaaacactaatagtcaatcatataatacacgcgaatgcccaaacagtaatggattaaggtgataataaaaggccttatttttcctgttatcaccttattatcaccaaattacatttaactatcagcatgttaagtctaaaaagtgacaataaaaagagagttttaaaactctatgaaagcaacggaatctcctcctctcccacccgtttacaaatcttaatcttctgcaagcgagcaaaaaaaggaatagatatccaatataaatatgtatatttgcaaactcataaggagaaaaacagatgacgaacctgcaagattttgtaactgtttcgtccgacagttattaacaaaacaggtgacttatcaacagaaattgcaaagtttctcttttttcgtaggcgctctaaggatttatcacttatttcgctgccaataaatttagagaatatgggaaaaattattgctttggccaatcaaaaaggtggtgtaggaaagacaacgactacgattaacctcgcagcctcacttgccacactggaaaaaaaggtactcgtgatagatgccgacccgcaggctaatgcctcttccggactgggagtagacattaagcagtcggaatgcactatctatgaatgtattattgacagagccaacgtacaggacgctatcctcgacacggaaatcgattctttaaaagtaatctcttcgcacatcaatcttgtaggagcagagattgaaatgctgaacctcccaaaccgcgaaaagattctgaaagaagtgctcactcctttgaaggaagaatatgactatatcctgatagactgctcgccttcattgggacttatcaccattaatgccctgacagcggcagattctgtgattatccccgtacaagccgaatatttcgctcttgagggtatcagtaagctgctgaacacgatcaaaatcatcaaatcaaaactgaatccggctctggaaatcgaaggattcctccttacgatgtacgactcacgtctgcgtcaggccaatcagatctacgatgaggtgaaacgccacttccaggaattggtgttcaacaccgttatccaacgaaatgtcaaactgagcgaggctcccagctacggtgttccgaccattctttatgatgcggattccaccggcgccaagaaccacctggctcttgctaaagagattatcaaccgaaataaataagagaagaagatatggcaacacagagaagaaatgcattaggacgcggacttgacgccttgctctcgatggatgatgtgaaaaccgaaggttcttcttccattaatgagatagaactggcaaagattgctgtcaatcccaaccagccccgtcgtgagtttgacgaaacagctttacaggaactggctgattcgattgccgaaatcggtattatccagccgatcaccttacgcaaaatatcggacgatgaatatcagatcattgccggagagcgtcgttaccgcgcttcacaaaaagccggactgaaaacaattcccgcttatatccgcactgccgacgacgagaacatgatggaaatggcgctgattgaaaacatccagcgtgaagacttgaatgccgtagaaatcgcacttgcctaccagcacctgcttgaccagtatgaactgacccaggaacgcttgagcgaacgtatcggcaagaaccggacaaccatcgccaactatctgcgtttgttgaaactgcccgctcccatacagatggctttgcagaacaagcagttggacatgggacacgcgcgtgcgttgatttcactgggtgatccgaaactgcaagttaaaatatttgaggaaatacaagaacacggatattcagtccgcaaagtagaagaaattgttaaatcattaagcgaaggagaagctgtgaaaagcggtacgcggaaaataactccgaagcgtgccaaacttccggaagagttcaacttactgaagaaacaactctcaggctttttcaacaccaaggtacaactcacctgctccgaaaaggggaaaggtaaaatcagcattcctttcggcaacgaggaagagttggaacgtatcatggaaatcttcgacacgctaaagaagtaaatgacaagaaaaagtaagaaatatcagttactcgtcatcaccctgcttctctgtattttacaggtggcagggattgatgtgtatgcacagtccactgtcaccccgatgaaaagggacacgactatcacgcaacgggaagccccgaaagcccgtgcccgcagacatcgtgaaccagctgtacaagattctttgaagaaagactcgatccggattgttccctccaaagagcttgtacccctcgacagcctgtcggccgccagtatacaaatagccgacagtctggatgcagccaacaagaaagaattaaaaaagattgagcagccggcatccatcatggttaagccagacagcgtgccgcccgcaaaggatatcaacaaaaagatattcatcccgaatccgaccaaagcaacttggctggcagtcgtatttcccggcggcggacagatttacaaccgcaaatactggaaactacctattatatatggaggatttgccggatgtgcatacgcattgagctggaatggcaaaatgtataaagactactcacaagcctatctggacattatggacagcaatccgaacacaaaaagttacgaagacttgttgccgcccaacgccacctacaacgaagagcagttgaaaaatacaataaaacgaagaaaagatatgttccgtcgttatcgggacctcagcatatttgcatttatcggagtttacttgatctctatcatcgacgcatacgtagatgcggagttgtccaacttcgatatcacccccgacctgagtatgaaagtagaaccggctgttattgacaataacaaccaattccgctctaccagtttgaaaaacaaatcggtgggattgcaatgtgtattacgattttaaaaaacacaatttagattgatcttattattgaagcatgaagaaattagttaactattgttcgatgattttccttttactagtggcaacatcgcaagtaaaagcgcaaagtgtagatgtagtgattcgtgaaaatggaactgagcgcaaagagagcattgacttgcctaaaagtatgacatacccgctcgacagcctgttgaatgactggaaagccaaaaactatattgacttgggtaaagattgcagcacagcggaaatcaaccctctgttcagcgattcggtttacatcgaccgtttgtcgcgcattccggctgtcatggaaatgccctacaacgatatcatacgcaaatttatcgatatgtatgcaggacgtttgcgcaaccaggtttctttcatgttaagcgcttgcaacttctatatgccgattttcgaggaagcattagatgcatacggacttccattggagctgagataccttccgattatcgaatccgcgttgaatccttcagccgtatcgcgtgccggagcttccggtttgtggcaattcatgatcggtacgggaaagatttacggactggagtcgaatagtcttgtagacgaacgtcgcgacccaatcaaggcgacttgggctgccgcacgctacctcaaagagatgtatgatatttacggtgactggaatctcgtgattgcagcctacaattgcggtcccggcactatcaataaagcaatccgccgcgccaatggtgaaactgactattggaagatttacaattacctgcccaaagaaacacgcggatatgtaccggcctttatcgcagccaactatgtgatgacttattattgcgatcataatatctgcccgatggaaaccaacattccggcaagcacggataccgtacaagtcaacaagaacctgcacttcgagcaaatagccgacttgtgcaacgttccgttggaccaaatcaaaagtctgaacccgcaatataagaaacaaatcattccgggtgataacaaaccgtataccctccgcctaccgatcgaagccatcagcacttttatcgacaggcaggatacaattttcgcacatcgtgcggatgaattgttccgcaaccgtaagaccgttgccgtgaaagagatcagtccttctacacgaagggctacgacagcagttgcaggtaaagggaaaccaacctattacaagataaaaagtggtgacactttatcgtccattgccgagaaatacggagtcagagtgaaggatatacagcgatggaacggaatgtctaacacgaagattgcagcaggaaaacgattgaaaatatacaaataaacagtttcccgcttgcaccgttcggaaatttgcttatttttgcaaaactaagcaaatgagaggataacaattatggataatctgcccccaaaagaaatagctgatgaagatatgatcaatcaggcgttccagcaactactgaatgattatctcagcacaaaacatcgcaaaaaagttgaaatcatcacgaaagctttcaacttcgccaaccaagcgcataaaggtattaaacgccgttcgggtgaaccttacattatgcacccgattgccgttgcaagtattgtatgcaacgaaatcggtttgggctcgacctccatctgcgcagccttattgcacgatgtggtagaagataccgactacaccgttgaagatattgaaaacatcttcgggccgaagattgcccaaatcgtagacggactgactaagatatccggtggaatatttggcgaccgcgcctcagcacaagcagagaacttcaaaaagttactgcttaccatgtcgaatgatatccgggttatccttatcaagatagccgaccgtttgcacaatatgcgcacactcggttcgatgttgcccaacaagcaatataagattgcgggtgaaacgctctatatttacgctccgctggccaaccgtctggggctctataagataaagactgagctggaaaacctgagcttcaaatacgaacatcccgaagaatatgcagagatagaggaaaagctgaacgccacagccgccgaacgcgataaggtctttaatgatttcacagcccctatccgtacacaactcgataagatgggattgaaataccggattctcgcccgtgtaaaatcaatctattccatctggaacaagatgcagaccaagcatgttcctttcgaagagatctatgacttgctggcggtccggattattttcgagccccgcaatatggaagaagaactcaatgattgttttgacatctatgtatctatctccaaaatatataagccgcacccggatcgcctgcgcgattgggtaagccatcccaaagcaaacggctaccaggcattgcacgtgactcttatgggtaacaacgggcaatggatcgaagtccagatccgtagcgaacggatgaacgacgttgccgaacaaggctttgcagcacattggaaatacaaagaaggaggaggcagcgaggatgaaggagaactggaaaaatggttgaagaccattaaggaaatattagatgacccacaaccggacgccatcgacttcttggacactatcaaactgaacttatttgcttccgaaatatttgtgttcacacccaaaggggaactaaagactatgccgcagaattcaacggcactcgacttcgcattctccctgcataccgacatcggtagccattgtatcggcgctaaagtcaatcacaaattagtgccgcttagtcacaagctgcaaagtggagatcaggttgaggtattaacttctaaatcgcaacgtgtgcaaccgcaatgggaagtttttgcgaccaccgcccgcgcccgcactaagatagcggcaattctccgcaaagagcgcaaagccaatcaaaagataggtgaagaactactgaatgagttcttgaaaaaagaggaaatacgaccgggagaagctgtcatcgaaaagttgcgcaagttccataacgccaagaatgaagaagaactgttggcagcgattggcagcaaagcaatcattctgggggaagctgacaaaaatgaactgaaagaaaagcaaaccagcaactggaagaagtaccttactttctcttttgtcaacggcaacaaagacaagcagcaagaggagaaagaacctcaggaaaaagagaagatcaacccgaaacaagtgctcaaactgacagaagaaagtttgcagaaaaaatatatcatggcagaatgctgccaccctattcccggtgatgacgtattgggatatgtggatgagaatgaccggattatcattcataaacgccaatgccccgttgccgccaagctgaagagcagttacggcaaccgcatattagccacagaatgggatacccacaaagaactgtcattcctcgtatatatatatataaaaggtatagacagcatgggactgttgaacgaagtgacgcaagttatctcccggcagcttaatgtgaatatccgcaagctgaccatcgaaaccgaagacggtatatttgagggtaaaatacagctatgggttcatgatgtggaggatgtaaagactatctgcaacaatctgaaaaagattcagaatatcaaacaggtgagccgtgtagaagagtaaattctatttttaaacgagaattatcgcagattaacgaacgcaaagagaatatgaacaatctgcgcaaatctgcgtttgggatattcctaaaat

SEQ ID NO: 11987 - DNA, 161 bp, Unknown
  gut microbiota DNA sequence
tgatgaaaggacaacttttaatctgaaacttgactccctaaatcaatgatgaaaagagccatatcattactcaaaaacagagtttgatatggctcttttataattgttagttacaatctgtaactttttagagtagtcattttagttttgacacaccctca

SEQ ID NO: 11988 - DNA, 281 bp, Unknown
  gut microbiota DNA sequence
gatgtgtgggcgtgggggcgcaaaatagacgagttcggcacgctgcaccatttgcaactgttggaggataaaccggactttcagataatgacggtagttttcggcgaaccaatcagccggatagaccgcagtgtttttgaagatgttgcaacgtggggtgtctgttccctgcaaggctgggtaaacagctatgaaagtgtccggtttgtagctatagacgaccatacggcaatcatcacgggcgaatataacatggagcaggtaaaggtgtggttagagaa

SEQ ID NO: 11989 - DNA, 257 bp, Unknown
  gut microbiota DNA sequence
atagcggaacagacaccgcacgtccgtccggtcagtttttcttttccccagcgtaggacagaaccgagtttccagcatttggaagtccgtgacttgacccatccggcattgctccgttacttggagggacggggtattaatgtcgaactggcaaaaagagaatgtaaggaactccattttaccaataacggcagaccgttctttgctatcggtttcccgaacatggcaggaggttacgaggttcgcaattccttttt

SEQ ID NO: 11990 - DNA, 7456 bp, Unknown
  gut microbiota DNA sequence
atattaatttttagtttttaaaaggtttgtactctttaccgcctccttcgtatccggaattcttgaaaaactcgacaaacgtcagacgcatcgggtgaaccattgcaccgagtacattcataaagatattgatggcatgaccgataacgaatatcagtaccatcacgataggacctgctattacattatccggactcatacctactgccagactgttgaacactcctgccagaatacctccggaaagtccgagagcaaacagacggacgtatgacaggacatcacccaacaaaccggtagccatattgtacgaatcccacaaccccagtccgatattcaggaaaatgttctttcccggactgttgtaaaggaagatcatagcagccgaaattcccagaatgataaggtgcactgtgcctcccatcggcattacttccggtaacagagccgaaacagccatcgaaaccaacaaaataatccatcctattgtcgccaccgcatatttgaagccaaactgaatcgtctgatttaccgctttcagcaccatgccgaacaaaatctggatagcacccaaaatcaacgacaactggaacatatcattgttatccatcagaacagcgtgtttcaaacgttgaacgataggccagtccagatcgtaaatattcgctccgaagaacgtacccgtcagcaaaccgcagaagaaggtcgaaacagccaatacttgtatcaatgacaagattgattttgtagacggagtcagtttcttcgctatcaaccgatatgccgtagctcccaagaacagaaataaaccatatcccgaatctcctagacaaagtccaaagaaaatcataaagaacggagcaaagaacggtgtcaagtccagctcattatatttcggaagcatatacaatttacaaatcggttcaaaccaggcaaagaatcctttgttgttcaatcggataggaacattatcgcccggaaccggatcagtaatttcataatacacatgtgcgtcattcaggtaagcctcgatttccacttgactgaatgcaggagcccatccttcaatcaacatcagtttatcaccggcggcctgttcggaactcagcacgactttagagaattcaatctgtccctgcaattctttcaaggcagccttcaaagaaggaatttccgtctcagacaatgcaacgagcttcttctcattctcttcgatcgcctgttccgtcgtatcatacatcgtttcaaggcgtgccaaagagtatgctggaagttttgcctgctccacatccaagtccacctcctgtccggctttcgttaccgtgacaaagaatactttggaagaaatacggttcacaatcatcgcattgtattccgtctcccactcttctttgtagtttccttccgagcagctataaaaaccgatcacataaccaacatctttcaatttctgaatatctgtcggctcaaagtttccccacgcttccaacgcttctttttctttcgcatagctttgtagctgttgagacaacttcccgtgttccgtttgcaaagtatccacttcatccaacacttgcatcccgcgtccggctgttccaccttccgttgcaatcacggcattcttctcatgcttctgattctggagcaacttcattgtagctgccaagcggttggaaagacggatattctcctgcagttccgtgttatcggcaaccccttgctgtttttccacaatgtggactacaccaagttcacgcagactgttcagaaaatcttcgtactccttgtgataaaccaggaatgtgagtttcttcattttcgtaatcatgcctctacctccttccttttttcctgatgggacttcatgatcttttgcgaagacttcgacagattctcttcatcttccataaatcgcttgatctttcgcaatgcatcctgatagcccggtatctgtaccttctcaaaaagattcactttctgagtggtctttttccttgcatgttctaacaaattcagcttggcgagcataaattcacgttcaatggccgtatgtgcaagctcttccaacaagtgtataccgtcggcataccatttgggagcgttaaacatactgtacggacgtatctcgaactctacattttcgagcaacggcacgcgcacacccgcaattttcttcacgccaagatgaacatcattcacctttattaatgaagcatcaaactcattccaaagggcgaacatggcttcataggcttgaatctgttcttcgagcctatcctccagatcggcagcttccgttttacagcgtttcacttccatgcggagggcgctttccttattcttgatgataggaagcgtgcgcacccgcactttcagttgcttttcgagctgctgaagagaggtcttgttatattgaaactttatagccacgttgtcaattactaattataaattattaattacaagtttattattattcgccttttggccagtattgatccaccaagtctttcttgatatttacttcttccggacggaagtacttaccaaacaagccccaagccacatccagcatttcagtagtatccagattgacatcgatagccaacaactgattggaataatcttttgcaaaagccagcgtacgctcgtcgtagttcgtcaagtcgaaaccgttttccatctttgtcttagcgttagcagcgtcggcatacagacgtacagcggcattcatcacctgtggatggtctttacgcgtcttttttccggtaaccaactgtttcaaacgagacaatgaacggaacgggtcaacaataaccttaccgatatcactatcacgacgcaagaacaactgaccttcggtgatgtaacccgtattatcaggtacagcgtgtgtaatatctccaccggacaacgtagtcactgcgataatagtaattgaaccaccggaagggaactgcaccgctttttcgtaaatctttgccaaatccgaataaagcgaacccggcatagagtctttcgaaggaatctgatccatacggttggatacgatagccaacgcatcggcgtaactggtcatatccgtcaacagtaccaagactttctcattattgtttacagcgaaatactcggctgcagtcaatgccatatccggaatcaacagacgttccaccggaggattctcggtcgtattcataaaactcacgatacgatcgagcgcaccggcattagagaacacattcttaaagtacaggtagtcatcattcgtcatacccataccgccgagaataatcttatccgtttcggcacgcaacgccacgtttgccataacctggttgaaaggctggtccgggtcggcgaagaacggaatcttctgaccggacaccaacgtattgttcaaatcgataccggcaatacctgttgcaatcagttccgacggctgtttacgtcgaaccggattcacagaaggtccgccaatctccacttcctggccttcaatttccggacctccgtcgatcggatcaccgaaagcattgaagaaacgtcctgccaactgctcacttactttcaatgtcggtgattttccgagaaacactacttcggcattggtcggaataccttccgtaccctcaaatacctgcaaagtgacatcgtcaccggcaatcttaaccacctgcgccagtttaccatccacagtggcaagctcgtcataccctactcccgtcgctttcagcgaacaggtagctttggtaatctgagtaatcttggtatatatcttttgaaaagcttttgttgccatctttgataattaaaaattataaatttaagattatgaattgatacttctttcggcaatcagttctttcagttgttgccggaatccttcatactgctcagacttgaacttagaatagttcatctgcttacagatattaatcatcttcttgaagtaatccattacttcgttgaagttatcaaattcaaactccgtatgacaaatgtcaattaccatgttcagaatatcttcctgacgttccatcggagttaccgcatcaatttcgtcgaatgcatcctgctgcagaataacaaagtcgatcaattccgatttccagaaaataacgtgatattctaccggtacaccatcgtcaccaagaatattgatctgctcggcaatctctttaccacgctgcaaacgtgttttcagttcattgaccttaccaatccattcaccgttgatgtgctctttgatgtatgcttcaaattccggatattcgatatatttagaataagaatcgatcggattcacagccggataacgtttcttatcggcacggtcctgttccaaagcatagaaacaacgtgctactttcttcgtattttcagtcacaggctctttcaagttaccaccggcaggagataccgtaccgatgaaagtaatcgaacctgtttcgtcattgttcagtttcacatatcccgcacgaccgtagaagttggagatgatagccgaaatatccatcgggaaagcatccggaccaggcaactcctccatacggttggacatctcacgcagagcctgcgcccaacgggaagttgagtcagccatcaacagaaccttcagtcccattgaacgataatattccgccagtgtcattgctgtatatacggaagcctcgcgggcagccaccggcatattggaagtattagctatgataatggtacgttccatcaacttacgtccggtatgcgggtcaaccagttccgggaactccgtaaagatttccaccacctcattggcacgctcaccacaagctgcaataattacgatatccgcttccgcctgtttggaaatggcatgctgaagtacggtcttacctgtaccgaagggtccgggaataaagcctgtaccaccttccacaatcggattcaatgtatcgattacacgtacccccgtctccaataatttgaaaggacgcggcttttccttatagttcgtcatggcacgtttcaccggccatctctgaatcatagtaacaggaatatcgtttccttcctcatctgtcaagactgcaatcgtatcttctatcttataatcaccttccggcatgattgttttcacggtagccgttcctttcatcgtgaacggagccatcatcttcaacggctgaaagttctcgtccacctgccccagccatgcggaagcctgcactttatcacctgcatttaccaacggtacgaagtgccatacacgctctttatccaatggatatgtatattgtcctcttttcaggaaaacgccatccattttgtcaaggtcattttgcagaccgtcgtagtttttcgataacatacccggacctaacgtcacttcgagcatgtgtcctgtaaattcggcttcagcacccactttcagtccacgtgtactttcaaacacctggacatacacatgtgaacctacaaccttaatcacctccgccatcaacttatcgccgccggtcgagatataacaaatctcattctgagctaccggtccgtcaacgacgagggtcaccatgttggcaataacgccactaacagttccttttgttgccatatatttttaataatttattatctgaattctgcaggaatctgcacttcgttctttagtgattcgatgatactcctgaacaattgatttcctctttccttatccaatgaaatccaccgttcaatcatttccagctttaacaagaaagcgaaaatacgttcaatggtgaaataatcgaagaaggtagcatcttccatccagttccaccgcaaagtgtcgagcttcttctcacgttccaccaattctgtaatctcactgattttcaccaacgactcaaaaacatccacctcaccggacagtccgaaatcacgggcgctcgatgtacgtaatgcctcgcatacctccgtgtttcctacaatattggaggcaatatcccacttgaatttacgacaggtaaatgcaacaagaatattattgatgttgaggttgaattcaaaccaggcggaaacaaatttatttccacatctcatagcatattcgtaatacaatgcagccaaataatcttcctgcaataccgtactttcagccggtgtattcaaataatcaacgataaatgtagaaagataagccggaaaatctttcggactgatttctccgccttcccttagaatagaaatatattcgataagttctccggcagagtagtttccccgtttgtctatttccgcttctttatctttgagaagtttcaacacattagcattatcaaacttcagataaaacaagtcgatcaacctccggtctgaagcagacaatccgttgtagatttcagttttaaaatcagctactgtgtagctcagtttactgtcttccagcgaaagctccggcaaacctgctactaagtaatagtacttactactcatagtcgctttttttaaaatagcatttctactaactggggacgcaagaaagctttgaagtaattcatgaattcttcttctccgaagttcactttataagaaccgtccgccggagaaacagtgaataaagtcttgataccgttcacctgctgtatagtcactcccttatccaacaatgcttttgcgtgagctgcaaaatactttttcagtgattccgcatcggcagtggaaataacaatgggttcatccacactccattttgaagccaatgcaacgataaacgcattcagataatctttatcctgagcgaagtccttcacggaagcagttactaacttgtcagttaccatagtagcaacctcagatttgagtgcatttacagcctgaccggcaaacagttttaactctgattttgtattttccaccaattcgtcagcagatttacgagaggaattaacgattgattctgcctctttgcgtgcatcctcaataattttttttgcttcttcctgagcattcgcgataagtctctgcgcttcttcgtttcctttttccacgccttcacgataaatcttatcggtcaactcttgaattttgttttccatatcaacaggagtatttagtattattactatattaattgtgtacctttcttagattctcgccaaatttacaaaaatcaatttgataaaaaagagaaagatggaaagaaaaaaggtaaccttgcaaaaaaatcacagttatataccaattttattccattttttcccttttcgtataacaaaatgacatttatattactcaaacgagaaagcaaatatagtgaatctaaaagagagatgaaaacaaacaaataccgaaacggacaaacgggacactcaaacggatatatcaaagattaaaaaacacagaaagccccttgactcgttgctgaatcaaggggcttcttaaaaacggcggctacctactctcccactgttacgcagtaccatcggcgtgacgaggctta

SEQ ID NO: 11991 - DNA, 302 bp, Unknown
  gut microbiota DNA sequence
agttcttccaagttgcttccccttaccaacgggcggctggcgggaaagagcgtggagcggaacaccgcctttttatccgccaccagttcctttttgtagcgtttggtatcggggataaaggttttcatcagcggcagttccagttccttaatggtcttgtcgtaggcggtgtaaaggtctgttttctccctaccgtccaccatgttccaaaagaggtacagccctgcaagtcggcaggcttcattcttcactaatagcttttggatagccattgcgaacgacaggctgctttccagcaccac

SEQ ID NO: 11992 - DNA, 299 bp, Unknown
  gut microbiota DNA sequence
gaatcgttttatccttcaacaaagaaaaagtatcactgatagaaagttgttgggttgcggcactggaagcttcccgtttaacaggtgtagccatcagccaaatggcagacaataacgtgataaagcctaatataggaaaacaataataccatttgtcatctccaaaatgtgctacagccagcaacacaatctccggcccgacgagagaagacacagctttaatcacttgtcctgctgtcaaactacttgtcagcaaacgttggctggttaccacattactcaataacggattcaatgaa

SEQ ID NO: 11993 - DNA, 3608 bp, Unknown
  gut microbiota DNA sequence
atttcagcctaaaatgtgcatcacattccgcagtgtcaagttcaccatagaataaaaatctataaaaattctctgcaatcccatgcaatttcaaaaggtcactcttgcagagtttcgcttcaaaaaggtcacctgaaggtcacctgtaaaagaaaaagcacctacagaaactctgtaagtgcttgattattaaagtggaccagcctgggcttgaaccagggacctccagattatgagtctgttgctctaaccaactgagctacaagtccggtgtatccatttactggatgcggtcacaaaagtagtgctttctgtcgaattatgcaaattcttttgataaaaatctgctattctttgccttcaaaacttgtatttgcgtttcggattcttgggaaaccagcctttccgtacccgttcttcctgttcaaagacctctttaatggtccagaaggaagagaaagcgaatacgcctagcagggaggacagaattacattgtcaatgctcaatgacgctatgacaccgcctataccgagtatcaggaatatccaccaacatttagtgccccaataatattcggcctttaccacaacggggtgaaaaaggccgataatcaaaaaggtacaaattccgataaatagccctgcaaggtgatattcattcagaaactccatcgcttgttatttttctatgcgaatggggatttctttcttgatgctctgttctagagaaatcaatgtctcggtggctactacacctggtatctcttgcattttgttattcagcaaatccatcagatgctcgttgtcacatgcgtacaatttggtcagcatagtgtatggtcctgtagtgaaatgacattccacaatttcgggaatcttctgaagttctgccacaacagctttgtacatagagcctttttctaatttgataccgacgtatgtacatgttctgtagcccaaagatttgggattaacgtggtagcccgagcctacaatgacacctaagtcaatcagtctttgcacacgctgatggatggctgcacgtgacactccacattcggctgctacgtctttgaaagggatacgggcattctgggaaataatttctagtatctgcctgtcgagattgtctattctttccataataataaattataatttccagttgttatcaaatagtaagcaaatatagagatttattttaattattcttcttttttgagagaaaaaataggcaaaagcaaaaaaaagagatgcaaacgctttgcacctctttcctttttctatttagaaagaaactttcttatttcttatctttttcaatgcccaccagctcaacttcgaaaatcaaagtagagaacggtttgatttggccgcctgattctctagcaccgtatgccagttcctgagggatgtaaagttcccatttagaaccgacaggcatcatagtcaatgcttctgtccaacctttgattacttggttagcacggaaagtagccggttctttacgtttgtaagagctgtcaaattctgttccgtcaattaaagtacctttgtagttaactttcactttgcaagtgtcagcagggatttcacctttaccttcagtgatcactttgtattgcagaccgctcggagttgttttcacaccttctttagtcttattgtcggcaaggaacttttcgttttcagctttgtagtcagcgtatttttcagccaaagcttttgctttgatggtttccatagctgtacgggtataagtctgagcttcttccatagtcatcatgccgcctttttccaaagtacctgcgatgaaacctgccatgaagttagctttgctgattgttttagtagagtcgccggcaaataactcctggttgatacctttcatcatttggttgctgatctgttgaccgatttgcaaacctgccatgtaagcgatatctttcttgctggttttgtttgcaccttcgttcaaacctttgatgaaatctgccatgtaagcagtatcaacatccaagcggcctgtcaggtagcctttcaaaccttgagtctgagccataccgatagaataagacagggagtcgagttctgttgacagatttgctttaggagactgagctgtgcaagaagcaaggcttgcagcagcggcgattgccataaaaatactaacttttttcattttgctttgaatttttttatttataatacttcgagtaattctacttcaaatacgagtgtgctgtggggaggaatcatttctccggcacctcttgcgccataacccagttcagacggaatatacagtttccatttagaaccttccggcatcagttgaagtgcttcaacccatcccgggattacctggctcacgccgaatactgtgggctcaccacgctgaacagaactgtcgaacagtgttccgtcaatcaaagtaccttcgtaatggcattttacctgatcggtagcctgaggctttttgcctgtaccttcttttattatttcgtattgcaatccgctgggcagagttactacacctgctctttttttgttttcctcaaggaatgctttcccctgttcgatagcggcggcgcccattttagcttccagttcttcgaaatacttgtttactatttcgcgggcttcctgatggctgatagccgtctggttgccttccaatacatctttgatagcttgtgcgaagtcgtctaccgaaaggttggcgattcccatacttgataagttttggccgattccgagaccaatagagtaactgaatttatccatataatgttttttgttggcgattgaagcgtatttcatagttttagccttcaatcaattgcaaatttatgaatcgcaaaagtacgtgttttatttgaatgatttagcatttggtatttaaaaattcttatatctgtgaaagttagccgtttttttacaaaagaattagttcttttattcgatgattctgattacatttgtgtggctattaaaaaagaaggaggaatagtaatgaagaatctggtagttttgacgggtgcgggtatgagtgccgagagtgggattagtacatttcgcgatgcaggcggtttgtgggataaatatcctgtggagcaggtggctactcctgaaggttatcagcgtgacccggctttagtgattaatttctataatgagcgccggaaacagttgttggaggtaaagccgaaccgtggacatgaattgttggcggaactggagaaaaactttcatgtaacggtggtgacacagaatatcgataacttgcatgaacgtgccgggagcagccgtatcgttcatctgcatggcgaactgacgaaagtgtgttccagtagagatcctcataatcctcattacataaaagagctgaaaccggaagaatatgaagtgaagatgggagacaaggccgacgacggcactcaattgcgaccttttatcgtatggtttggagaagctgtgccggaaattgagacagccatccaatatgtggagaaggcggatattttcgttattatcgggacgtcgcttaatgtatatcctgcagcggggttgcttcattatgtaccgggaggagcagaggtgtatct

SEQ ID NO: 11994 - DNA, 700 bp, Unknown
  gut microbiota DNA sequence
aatgaagaagtctctaatgattttataatatctttgtagtaaattaaaaatgatatatcatgattaaaaacattgtatttgattttggtggtgtgattgtggatattgaccgtgacaaagcggttcaagcatttatcaaactgggactggcagatgccgacacccgtctggataaatatcaccagactggcatctttcaagaactggaagaaggtaagctaagtgcggatgagtttcgaaaacaactggggaatttatgtggccgttcattgacgatggaggaaaccaaacaggcatggctgggatttttcaatgaggtgaatctaaataaactcgattatatattagaattgagaaaatcatatcatgtgtatattttaagtaatactaatcctttcgttatgtcatgggcatgcagccctgatttctcgtcaaggaaaaagccgttgaatgattactgtgataaactatatctgtcttatcaagtcggtcacacaaaacctgcaccggaaatattcgattatatggtgaatgattgcaatatcattccttctgaaactttatttgtagatgacggcgcctcgaatatccaaatcggtaaaggactgggatttgaaactttccagccgaagaatggtgaagattggcgggagaaaatgactgttatcctgaagtaatgcaaaaagtctttcatagccat

SEQ ID NO: 11995 - DNA, 21433 bp, Unknown
  gut microbiota DNA sequence
tttttgatttgaatatcttctatgtgttctagatcaattcttcggaactaattctaaaaacatggtagtagtcagcaacacagccagtccgatgcaaacgcttatcaatagccaattgatatatttggctttcggcttggtgtcggcatgcagattgttcaggaaatattctctgaagaaaagatacaggccgggaattgtggcacttgccaacaggaaatcttccggaatctggaagaaataagttttggataatccgatcaatgaccagtggcaaaggaaaaggactagaaacatattcactttgtgagcaaacagcaataatagcccaatggtaaacacaaccacagaacaaggcattaccggagaagtcatttccggaaaggaaagtccgcgcgctaatgatactaaaggatatatgaatggcattgccaacaagacataggacaggatgtcgtatttgtgggtacgttcgaaagtcgtgtatcccgtaatcgcatcccatatccaaataatagccattactccccagaacatagccatcactccattgtaactacgttcttcgcaatagacataatagtagattaccgaaatccatgtataaagtcctatcatataaaacttcatcgccatcttcacccatgtgcgcggtttactgataagcaatccggtcaatgcaataccaatcagaatgatgactgtctgtaaaagccaagtagctgaattataatatgcaattgttctccaaaaaatctccataaaagtagttttaatgtcttgttaatgaaaaagctctatgtgggaataggaacatcgggaaagtggctcctactgccaacatgaaaataaccgtgcttgctaccaggctgttggagaagaacattgacatgaacttatccagattttccgggtcattcacgttctgcaaacacatgataagtgaaaataccatgttgtatgcaaatttgcccggaatcatcggaagcagagccggaatataaagtactgtcatcgggcaatatacttttttccctaaccataaactaccaaaaccgatcactaagccggcaaataaagaagctgtagcaatatctacccctaaataagtcatcaggcaaaaacggcaagcgtgtcccaatgccgccaataaggcaatcatcttaaatgcccgcaaaggaggatcggaaatcgcaccaaatcctatacctgccactgctgcaaaaaatccgtcagtaaaaatgtcgagtgctatcatattaaattaaaccgttttttaccattagtaatgtgaaagaaagtccgatagcaatgctgacaatcagcaaggaggcttctgtcagacgggcaaatccggtcagtacatatccttcgactatatcaatcactccattaatcaaaggaacaccgggaacaagataaagtacactggtagccattgctatctctgaagttgtatcgaaaatcaaggctgtagaagcgcaaagggaagcaacaaaagctgaaacgataaaaacaatgtaatgattcagctttttcttctgcatctgttgtttcagatagaatcctgtgatggtagcagaaaagacaattcccatagatattaaatcgccaccgaacaatttgcagaatgatgcattggcgaatccgactaacaataagacgaagagaggatgtatcatcggggcggaaacgattttcttgtatttggctgtcagttcctccaatgacagatgattgtctaccgcttcccaacttaatgcgcttaactctgagttgtgttcaaaactaatgggatgtgcggggatatcgataacttcattacaagcttcattcgtctctttatctacaattgtcaaaatgatgtttttatgaaatacgcctaactttacatctagtccgaaagcttctccaatacgtttggaattgcgcactacccgcgaagtatgtactcctgcgcccattaaatgggccgaatattctgctataaatttacctatcgataataaagattcgcttgtcttcatgaatgtgatatttttaattgggcgcaaaagtacaaaaaaaatagcaactacctaacctaattataaaatacccgaaaaatcttttatactactaacaatcctatcttttaattctttgctttcagccattgtaaaatcacaggcaacatctgtcggagccattaatactgccttggcttcttccgcgtctgccagttcatccggatgttccttgaaataagcctcccatttggaggctgactgtggaaccacccccagcacatagttgataaagtcatcatccgtcaaaaaatcttttaccttagaatacatatcacatcctttttaagcgtttacgtaaataggacggtgttatcctgtatatgtactcaataaagcattctttttaccataattaacttgccaaatcacgtaactttgtcaatccgcgatacatcaagttgcgtacagactgataattcatgttcataatttcgcagatatcttcatatttcttttcttctatataatatagagtgagtgcttcgcgctggcggggggatagttggtttagtaaacgcttaataaggaaaaactcatttttgcgctgttctttttccgcataatcattttctacatctgtaggagccagcatattgacttcttcaatagctgtatcggacatatacatacgtttacgaagttcatcgcacaacttgttctttaatgagatgaacatataggatttcagattatcaatagttcctagttcatctttcttagtataaagcttcacaaaaacatcatggatgcaatctttcaataactctttatccaaagttagctttagcccataattaaaaaggatattgatatataaatcatatagctgagaaaaagctgccatattccccgcttgaaatgaagcgaataaagtttcggttgaattattagtttgtcccatcatagcattaattcgattgatttgatgttgcaaaactaggcagtatccgtcacaaccttaggtaaaatctggtttgtggattgaaaaaataagtatcatgttttataacactcttttattagaatttacctatataaaacaaaaatcccgttgaagatcattcaacgggattttctatcttatagcttatgaaaccaataaatgccttctttcttatctggtacctttaaagtatatagtccttttattttcagcgatttatttattgtgttcacttccccggaatcagggtgaatgtactttaatacatattttccggacgataaatgaatgggaatttctgttccagacttggaataaatgatatttcctgtatcagattttaccaatttcttatattgatcagtattggtctcttccacttccataactgccgcatcctttaagaaagccttgtctttacacggaataacaggacacgagccacttgccatgaatactgcccatcccatagaaggataattttgcgcatagaaagttactgctttctgaggaaacttccggcggtattcgctcactgccttataagcttcattaaaggttatctttcctactttcatcttacgcatatgctggcggggagccatgtttttcccaccttccggcgcaaagattccatctttcttataatgccaataacgaatatcaataacatctaccacagcagcccgtttagggtctgcaagaatagcatcctgcacatcctttgtcgtactcaatgctactttagctttctttccggtttcagcttcccactcggctatgacatccaaccagaactgtacgaagtgcaatggccctgtaaattctgcacttgtcagttgaatgacattcgaattatctgagaagttattgagacattggcgaatgtattgcctatgcaactcgcggcgtaccggatgactgatatcgtaaaacatatctgctacgaaaatacgtttgtctccggcaaatggaacgggttccggaaatccggtctcattgatattattactgcttctccacggacagtccacccaatgtgctccggcttccagaatattatgctggaagtagttttcgtggaatagaagcagtccatctttgcttcctttctctgcaaattctttcaagcgcgaccagtaccaggcattggggcgtttcaaatcatatttgcttaaaccttcccaagctgttccctgaccactacgtccgaatggctgttcgtaaaaaggaccccatacatctccatcccggcggcggatacgttcatggtcatcccgacggcggtcataccacagtccatagttctggtcaaaaacaagtatgttcttctgtttcatgaagctgactacagagtcgatacggtcagtcagtcccaatccttcgcgtcccggcacaaagcgggtgatggcagggcttgcttttttcaaaaagttggttttaagttttccattccaccaaggagttgtatgactgcctcctacaagcaatacaccatccatttgaatacgtccgttgacgatacttatttccggttgtgtccgttgtttgtttgaaatagtctttttctctttaatatcatcgattgatttgactcctgttggcacgactgaagggataaatttattttcttcgatccaatgctccaatgtcaaacgaggattataagcttcttttgccaatgccatagctacttctacggtagggctacttgttgcacttgtgtttctaggcaggatacgtgcccgttctgcgcattctttttgcaggcgttccgttaattgggcataaaatatactgcgcggctggacatgattattggactgtgcccattctccgtctcccgagaactgtgcccagcaaccatacgcacgattttgtgcatcttttgccggagtataacattctatttctgcagcggtacattgccagaacagactgttgcctgtattccaaccggctccattcttatcctgccctaaatttttaaaagtgagattatgtccgtcgatattgacgacatcaaacagtaaaccacacgcccaagcatcaatagaaccactgaatcctaaagattggtacgaatcgcattgaacgaaagcattagggccggcagcgcagaatccggccgcgaaatcgtgaatgccttgttccgaataacaacgttggaataaagtctgctgtcccaatgtgtggaaagtacaacggcgcatccctcctatttcggaaacgggatctttcgaaatacaatcctcgacagtgattttagaaccggtccgttgaacgattacagcgcttcctgcaaaatgcctgaaattaacttgccttacccagcagttttctgcagcttcgatggaaatccctgtccaacaatgatcctcgtctttcggatagtgtttatcataatctgagaccaatgtcagattctctacaccgcagttttcaatacgtccgttccattggtatgtcataatggtagatacaccgtatttggcatccaatgccacagtcaacggtgcatctaaggtaagcaggttaccattaatatcgctaacaacccggtcccatgttaaatccatatccccttctttccatcctaaggcgctgattcctcctccaaagatgttacaacctaaagaagcaatccactccttaccggaaggacgggttaccataatccggtctccttttttcagagaagtccccaaagcgacttccaacgtttttgtattcaccggaacatagtttgagagtacttgtaatgtatcttttattaccaagtcgttttctccttccatatagataagagaaccccgatccactcctttctttaataatattgtactttctttatccattccccgtaatacgattccggatgtagcaatgcggatacttccggacagggaaaactcgcctttatccaataacacagcaccgcggaaacctgaaatatcaggaggcaaggaggctacatagtctatggcacgttgaattcttgttgtattgtctccgggtttccaagatacaaatacgacattccgaacggagggaatatcctgttccgaagcctgataaccacacgttgagaaatcgagaatcctatttcccaattcgtcattaaggtaagtaatccggtcgtcttttacttgtaaagcaaaggtttgcgcatgactctgcgcaaacccgatacttaataatcccaaaaggatagttcttatttgtatattcattacaataaactttattatcaatttatttggctaaaacagacttttccttttagaaagtgtatcatgattgtttttcaaatctgtccaatccactttcttctttgtatcgataccattgatatatttctcaatgttagtatagccgtccccattacaatctttcactgcgtcggaaggatcgttcggattcagcccgttagcaacttcccaaacatccggcatcccgtcattatctgtatcggcatacggttctcctttatattcgggaagtccgcctacttgacggatgtctgtaataattccttgtttataagagtctgccggtaaacgtctctttacatatggtgacacaaattccggagcgtcttttacataaatggctttacccattcgtactgttttgatcacacgggaatcgactgcatcacgttttggaaagttagctcctgcattgtccaatacaaagctataggcttttggagtatccattatagtgacaggaggcattttgaatgcttcgtccgatttaatttgcggaaggaacttttctgagtctacgccatccttaagctgtacaccgccatcccaattgttctttgtcacttttgcatttccatgaatgatatttccgttgacataagcttttccaaaagataaaggacggtttttgtcacgtccggcttccggtttaaggatacgatatgagatcggtttgtctaatggagtaatggggcccggtttgaagtaattattaatcatgttatagaaacttttattatctcctccgtccacagaacgattccaccaattaaatacgacattattaacaaaattgaaatctccgtccatccctaccgaactgttacggctgatattggaagcaaatagattacggcagaacatactgttatgcccgccgatggtagcgccgaaagcatgattgtaagtgtccaacgcttcggagaatatagagttctgaatagtgatatttacagtcggaagtttcagtccgtgtccatctgcacctctattgtatacgtgtcggtagatagacatattttcatccagtccccaacttgccgaacagtggtctatcatgatattcccgactgcatttccgcctaccgcatcatcacgaaaggcaacatcctgtgcaccacgacggaaacgcatatgacggataacaacatcgtgtgtatcaatcagaaaagactgtcctgccacacatatgccgtctcccggagccgtttgtccggcaatggtcacatacggtgcacgtacactgataggactcttgagatgtattacgcccgatacattgaaaacgataatacgtgccccccccgtttcacaagcttcacggaatgttccgggaccggaatcttcgagcgatgtgactacgattactttccctccacgaccaccgggagtatacattccccctccctccgcaccgggaaaagcggggatattactttttaccaaatcttccggttttgaagcccacggtttatagggacgtcctttttgtgcctcttccaaaactgtcggcagagctttttcccatgctacatttgattgatgttcaaactcggcttcttgttttgcccctcttgcctttacagagtccggaatcaccggatactgcgctgccacaggtaatatacaggcaaccagcatccatgctgataatactttcttgatgttgttcattctttcgaatcttaataggttttctaaaaagacgattaagaaagcgttttgtaaccggttatttctctcctttccgccattcattcatatattcgcggggagtttggttatatttcttccggaaacatttactataatagccggaatccttgaatccgacagcaaaagcaatttcagagacacttaaatccgtactcttaatcaattcaatagatttgttcagacgaatttctttaaccaaatctacgggggctaacccggttaggctcttcaactttttaaagaatgccgaacgactcaaacctataccggaagctattgtatctatattgaaatcactatcatccatattctcttcgatcacttgatggattttctcgaggaactgtacatctttctttaccaggtactgttcataactatcctcttccgtcgttgtctggttctccatttgctgccggatacgttcacggaataattttcgctcagacaataactggtcgattcgtgccaacaggtattctttgctgaatggtttagttatataagcattggcacccaaagttatggcttttgtcttggcaccttcatcattctttgcagtcagtattattacaggaatatggctgatttggaaatctttacggatagactgtaacatttccaacccgtccatctcaggcatcatctgatctgtcaccacaatgtccggatggtaaagatggactttcttcaaaccttctactccattattggcaatatggatgttgaatttgtcttctaattgcaattttatcagttgacaaagatctctgttatcttctactaataacagggtcggtagtgaagagtctatttccggttcttcttctgtagtttctaccgaagaaatattcgtaacagcttcttcttcggaagcggttggagcagtttccgtgtcgctgacatagaagtcgacttccgacggacgatagtgttccttatccatcagaagttcaactgtaaatacggctccctgtccttcgggactttcagcataaatagaaccatgatgcaggtttacgatttctttagaaagtgccagaccaatgcctgtaccttgatagtatggattcttagtattttctccttgtgagaagcgttcgaatatttcagtcagcttactttgtggaatgccctctccattatcttctacccgtacgaaacagcgttttccgtcatccgtcaatccggtagtgacgtagatacttccaccggaatgcgtgaacttaaacgcattggatataatgttgcggatgacaatacttaatttttccttgtctgcccataccataatagattcgtccggtaactggaaagtgaaactaacttcattctcttctgaaagtacacggaattctttctggaaagaagctatcatttcattaaaatcaatcaaagaaacatgcaagcgcatcttgccattctgaatcttccggaaatccaatatctgattcaccaattgtaacatttgattggtattcttctccatcagatcaacatactgcaatcctttcggggataatttttcccgttctttcagttcctgtataggtccttttatcaatgtcaagggagtgcgaagttcatgggaaatattggtaaagaacttaattttcatttccgatactttttgctcgatatagatatcattcttcattttgatcatgaagaaagccaggcgcaaaccgaaataaagagctgccaatccaagtatgacataaataatcattgcccaccaactcagccaccagggtggaagaaccgtaacggctaaagttcggctcgaaacaagttcgggattggcttcatccagcgtttctacacggaaagtataatcaccgggaggcacattagtataagaagcaatccggttctttccattataatgccattctttttcatatccttcaagtatgtaacgataagataccctgttctgattataaaaattcagagcagcgaattctattgtgaacatggactggttgtatttcagttgaatcgcatcggtataaataatggattcttttagaatggggcaatcctgaaaactccgcagatcgcgattggatactttgaaatcgacaatacgtgtatcatagtccatgtgttgtgtttccaacttatccggagaaaatgccaatataccttgtcgtgtaccgagccataaatctccgtttaatgtacgaagtgtacttccctcttccaattctacgtttaggaaaccgtcatatttatcataattgcggaactgttcggtagctttattaaagcaggacaaaccgatttctgttgtaaaccagagatttccgtttttatcttctacaattgacttgactacgtcattattcattccttcacgtatgccgtatgatttaaagatcggttcatgcttttctttatcatatcgaataagtttgttcagacctccaccaaatacgcttacccagatttgcgagtcagtgtccttatatagcacataaatatcattatcagcgacattggatcgttcgctgacttgacggtaagtctcaaattgtatctgttcgggtgttgcaaaatgtccgtcgaaagacattaaaccatccattgttcctacccatatccgaccgtcttcatcttctgtcattgtgcgtacctccatatatagtccataaggaggatactgtttcagtccgttgtatttatgtttgaaaacaacttctccgttttcttcggcaatcagatttaatcctcctcccaataatcctacccaaatgcgttcctgactatcttggtaagtaaagtatacgtcattattactaatggagtttgaatctttcggatcattcttgtaacgggtaaaacgcagtccatgaggtgagttcatatccggttcagctttcaccaatccattacctttggtagagaaccatagatttccgtctttatcttccataatatgatagactgctcccaacaggtagttatggtccgagaaaatctgcttcacttgtccgttacgatcaagacggtatagagcctgccatcgggttcctacccaaatatctccgttttgtgcctgatagagagcacggattccttgattccaggatgtctgtttttctgtagaaactggaacgggagatatatcggtcagtaactggaattgttttttggggaaattcactcgatacaccccgctaccggtagatgctaaccaaaggattccatctttatccaataacaaatgaaaaaaaagttgattgggaagatcctcagagaaaggtttcatttgattgatacgggtcatttccagcttatccctgtcgaaaagaagaatttctccgcccggagtgagaaaaaacattccttgctcacctgcatcctgcatctcaaaattgccaatggtattctgattgggaaaagtaaaacgatgactacttttattcagaggatcataatatatcaatgcgtgattgccttcctgaaaccatattttatcatatttgtcatagaatatgatgccactatcctcttgggggattgtaaacggtagtttggttagctgtttgtaaccgatgttgtattcgtatgctccgtcattggtagttatatacatcaagccggactcggtgaccagtaaacgagagatagcctgtttgatctccggtatctcgtaacgattcacaaccccattttgaggatcaatgctatagatatgcccgttttgatctcccagccacaggaacttggaattataagaagcgcaagtgaacaatttgggatcggcagaaacttttttttgtataaaatcggaaggtttatctttcaaggcacttccttttctaagagacagaatctggtaatccatacctatccaattaataaattcagcagtttcacaaaacacattatgtttcaaacgcatatcatatacgttcacattggggcgtgagtcgtgcaactgcttcattgtaatcttgcctgttttatcggtatgtgcacgcaacaaacttttatctttagtcaacagtagaacgtctccgtcttctgtcgtttgaatcttgataatctgaatattctcggagtattcttttacatcatcatagacggcatgaaaagtttcatgcttcttgtcaaataaatatagtttgcggtcaatagtcttgagccatagaaaaccattcttatcttctacaatacgctgaatcttgcgaggaggaatatctgcagaataaaaaccgtcccgattatcatacgaacggaatttagctccgtcaaagctgcataatccgtaccatgtgccaaaccagacaaatccatctgtcccttttaaagtgcagttgacgatgttattgggcaaaccacgttcagccgtataatgttctacaatcatatttggataggcaaaagcacatacacccgccaacgataataatagtattagaatattccgttttctcatttatgataataatagaggttttaatgctcccaaaggtagtcttttttttgaagatagtgactggaatcactatcttcttattgtttcttgtgctatttttcagttccgaattcggtctgttggcgttctacttcgtccaatactcgttggcgttcttcttcggtgagctgtagctttccttccgatttcctttccgacaaaccggttttcattgtaggtgaagtgattgtttgttctttgtagcagaaaggaaattcggccgggatactttcaaactccaattcggcagccataggagcctgtgttccttcaaattgtacatgagctttcactttaatctttccggctttccgagtagaccggaccaacaaaggagccgaaccgaattctacagtacgaggattggcgccaatggtagcgtcaccaataatttgtccttctccttctacagtgaacacaatattttcttttgccagacgacgcacattaccgctatcatctgtcacttcggcaactaccacaatgaaatccgaaccgtccgctatcaaatttactttttgagtatctgcatacaaacgaagtttggtagaccgacgggaaggcattttcttttgtgtacacaccacttttccgtcaatgataccttcagcaaccatatttactttctgccagttcttttgtgtatagctatatccgcgtgcttcccagaaatcccatacatcttcgaatataacaggtgcattcggcatatgccctttggcatgaattacaggcttagtccatgatttcgtcccatcatagatagaaagacgcaccgagtcgcagttactgaatatcactacatctttatcggagaactgtgacatttcatgagcaatgaataccattggtccacattctgtcagcggatggtgaagattggcgggtgattgactacggaacatttcgtaggcatatttcttttgtcggaaagcatcatatatacctccccaataaggatcgggatgataaccgcgctgatgatcgaacggatgccattgtgctccaccgataaactgaccggtagtacggtacatctcatcataacttttagccaaagacagcgcctgtacgagcagcggacgttccccccaactgcggctcgcacggttattgttgttgtgagcgtaccaatcgtctacattctctccgaattcacgggtgaaaatacattgctccggcctatcagtcttttcgtcatctcccggccaaccgtaaactacgtcataatgttctttcacaccggcggaatgcacatcggcagcagctacgggacgtcccggataaggaaattcttctttggttatttcgagtgctttcaaggcaaagtcgagcggatagcgggtttcattcagaataggttcccacatcaaaacagatgggtgattacggtcacggcgaatcatttcgcgggtgttttgatgaaccaattctccgaatttcacatccttgttccaatattgccatcccggagtagctacgataacaaacataccgagttcatcgcaagcatccataaaagcaggatcttgtggatagtgtgctacccggataattgtgcaaccggcatcccgcaggcgttttgcatcccgccattgctgagaattaggcagggcattgcctacgtatgcaaagtcctgatggcggttggcgcctactaattgaccgaagggctttccgttcagccagaaaccatccttaccacgaaattccgcttggcggattccgatacgtgtgatgcctccgtcaatggactgattaccttttttaacccgtgattgcactctatataaataaggtgaatcgggtgaccacagtttagggttctttatctctatctgctgccggatcgttttcttttctccgggttttaggaaaagcttgccggaagctcgtctgataacctttccatcagtatctgtcagagccgtttccacagtaacggtttcggaatgctgatccttattttgtagttccgtatttacataaacttgtgcgctcttttcactgatcttgtcgaaatgaacaaaaactccaccacctgcaatagtttgggactctattgcgtcagtaatggataccggtgatttagctatcatccatacatcacggtagataccgccatgataggcaaaatccaacgtatattggggcttgccgggaggaaaggatttatcattgctattgtctacaaaaacggcaagcagacaagagtctcctgcctgtacaccattggctgtcaaatccaaagtaaaaggaagataaccgccaatatgttcttgaatacgctttccgtttaagtaaaggatttgctttcccatcgctgcctcaaagtggagcaggacctgttttcctttggtttccgcaggaagtacgaaatgcttgcgataccaggcagggccttgatagttacgacagccgctagcttcggcaggcattaactctactgtatgaggggtggaaacaattgtccaggaacaatcgtcgaaatcaacggattcggctccacaaatgtcccccttgaaaaatctccatcccggattgaagttatacacttgtcgtccgctaccggggagctgaatgaatccggcaactgatgtttcggggcggtaagtttctattgtccaccctttctctatcagtgagaataacaatagaaaagctgataaaattaaaaacagtcttttattcataatacttttatttatggcttctttcatttcataatatagggatgtagactttttaaatcattattattatgtcctttttccggctttcgggaagaactttcaagtctgtaacttttccgtctttcaaggttgcttctactgtcgtttcacctggtgcatgaagtttgaaatgtatatcccattctttagaccatgcgggaaaaaggagtatttgctcaccattcgtctgcaataacatttcttgaagtcctatcataccgctacctccccaattgtgatcgggtgtccagtcatatcccggtccccaaaaagcaggaaaacgatgtggtccgtttgacagtttggcgagggtcaacctcttggcttcttcggtcaatcccagacaagctgcccaaatgttatcttgtttccacccgacatgagaacggaatttgattgcttccggatcatagaaataagtattacgggccaattcaagattttcttttcctactccgtagatgcgccagggaaatacaggatacaattgcggagtttctacattattgattcgttcccagcttacagcaggagaaatcgtttgcttcagttcgggtgaagctgtgggattcaaggaatccttgatttctatgtaccgcaatggaatcggaggaatcgttttcagcatttcatctttcttcccataattttccaatacagtccgcaaagcggcaattgtactgctggcattgttagtcatcttatatgtttcacaggcagagcccggaaacaggacaagctgtccgttaccatccagcgctttccgtcctcgacgggaagcaagttggcgataatgttcgtcaaagaatgtcagcgagctttcaattaaaggcagatatggagtaatgtctgcatttgcataattcttggtttccaatatcatttgacagaattccagtatagtatcccactcatactccagccatgcattatattccactcctttgtcaaaccattccggacgtttgaagccatactccgcaggattaggcaaaccatagttctctatttgctcacagaaacatgctccattgtgttgccaatatacttgggtacggagttctgcattttttagcattcggttgtagaaatcgaattgggaagacatcatatcgaagtctccgcttttcaacatcggccagtatacaagtcgctgattctgtgcggtcattgtacctcctccccatttgcggtaatcaggagtgaacgcctgtttttcgtctatatgacagggatcaaaggtaaataatccaccattgaatttggtcgggacactaccgtaagcattgcaacctagcatatagcggaaaagagtgtagtttcgggtaatttcttttatatcgctatcatttttgttttctgtatctccaataggttcgataaagctacgttgccaaaaggcattccaccacaggcgagtttgttttttatcctgtgatacaatttttgacgaaatctttccttgtggggctattctttgcagattgatttgcaagtcttgttcccattgttctactgttgccgtctgttctgtgtgcaggacgatacagaactgctccttccgggaaacttttgaggagcgaaagttccaggcacggtagtctgtaccggcatagatattatctgttgtacctgtatattccagattatccccgaaaagatagccaccaaaagtcagatgctttaaaggattcatcatttgagatttgacattttccattccttgttgcgctacgacaatgtcaaaaactgtttgttcgggattgcggtgatagaataaaagcaagttttctttttttgtcattcctggtagttcccttttggaagataaagaaacaaagtcggcagtggtaacagctcctttcgggggtgcccatttgtaagagcattgttgcccctctccttttctgatcattcgttccttataccgccagttctcataagagacttctgtccgcaaaggttgtgcgttggtgatttccacatggactaccggatgatagacatctgcccacaactgtatctgtgtgcctcctgccgatacttctacatacccgtctttcaatttcagttcctgtcggaaatcttttgcatctttgaatggactaggaaacagacgaatcctaaaacgtccttgtttcagttggcagttattctcgtcgaatgtaccgctacgactcagatagaatagtatatcaccttcctctacccatatattcatgccgatatcaccaccaccgcagggcatggattcggaggaattccgactgggagtgttccaaatgacattagcatgctgactccaaagagctgacacgctaacaaatacgaataaaagaacaaaaatgtgacgtaaataattcataaatttatcacttcattagtttgtttcgctcaccacagtgtggtgagcaggatcaccaattgtccgaacggaaagatcccaaaggcagtccgtcacaataaacatctccttctacataattcttgaatccgtaacgaacggctaccggatgcgggacatgctcgcttttcacaagtatcttgctgcgttcaatccatgctttggcaggatagaatactctgtcttcaccggctacttcaaagttcttcgattcaaagcaattcttgccgctaatccacatttttgcccgttcaaagctcacaatgaccgtatcattctttatttccatactcttataatatggactttcaccgttcaccccttctattccgtaggtctttgtcagcgccagcagtgccagccgctctcctgctatttgtttcttggcgggatgaatccctttctccatgcctgcatccagcaataccgccatgccactgttaggcacacgatgttctacttttgcctgcgcctcccgaagataagcagaatttatcacttcttttcctttttccgtaataattccataatcatagggagctatctgacaataatagaaaggaaaatcgccttgtttccattcggcacgccatccgttaatcaaggtagtaaacatatccgcatacgtgtgcgcgcgattccagttatcttctccctgataccagataacccctttcatcgtcatgccaatcaagggatgcaacatgccgttgtagaggacagtcggcgtccggtttttcgatttgatatccgcttcggactggggtatctttgcgtcggggaacgctttcagccagtcggctgtcatccatgcctcgcaagccgaaccgccccaagcggcgaccaccaatcccacaggaacatccagtatttcattgattaatctgccgaaataataagctgtcgcactgaaatcgcggacattcgccggtgtggcttctttccatgtgccggctacgtccgtttgcggagtgaaggtagaagtacgttttaccgtaaacaaacgaatattcggattcttgctacgaagaatatccatgttggcattctctacaggctgattcttgaatcctttcatgggcatttccatattgctttgtccggaacatagccacaattcgcctatcaagatattatttaatgtttttttgcttccatcgttgaaagtaatggaataaggacctcctgcttcgggagtggaaacagaaagtttccatgcgccgttcttgtccgctgttgccacatattgttttccattccatccggtagtaaccgttattttcttattaggggtggccgtcccccaaagattcgcttttgtctgttgctgcatcaccatcccatcggagaatatagcgggcagctttacttctgcatgtgcgcataagcaaacagccaacataaagctagccagccatgtgccttttttaattactgaacttctcatcattctatttatataagttttcaagtctatcctaattttctattgtcaatatgcccagtaaacctgccggaagcaaagtatcttctttttttcggtatttggcatttgtccagataccgtcatacggtgcttttccttcgtccactcctttcagcgcattcgcccatgtattggtgacttctatctccagttcgttcgttccttttttcaaagcggacgtaatgtctgctcgatacggagccgtccagacagtcccgcaatctattccgtttacacgaaccgtagccagattgcagactttccccaggttcagatacacgggttgtcctttcttgagtttatccttccagcggaaagtggccttataaacggctgttcccgaataatagcggatctgctcgtcttcttctttactccaatcgaaaagatctttcctgaccacagtctttcccgtagccagaaatgttacggtatattcttctgtttccaatgtcctattcaacggttctctcttatctgtcgatgtcctctctttatcagcagcttcttctgtcggaaagacaatgaatacggattcattcggagccaacgtcagcgtaacctctgtccggttgtcgtggatgcgataagaaggatgagtattcatttcccccgttactggattccagcattcgggctttcttccattaatacgcatacttgccgtaaacgtacgtgtttcttctcgctgattggcaacgaaataaatatcaccgagttcgccactccgatgcatccaagcgacatcttccggcacaatcatatcccgttccagtccgtatgccgagaaatcttcttctgtataaggaagagcaggtacaatgactcccgcggcttttaattcatccatctttttccgcactgccggagaaagcaccggctccggattcatagggcgtgaaagcggcaggacgaccaccttataacccattccctccgccaacttcattctgccattctccgcctttgccaaacggagtaacgcatccttattaaaactgtcgtaagcatatccacgaagcggattcacccatttttcgggatcagccatattagcggaatgagtgacgcctaccggacgcacacgcaaaggttgaccttcattcgccaaacgaatacgttcactttctacccgttccgtaccgaaaagtcccggaagtgaggaaaccaaccgctccggcaatacggaacgtcggggaacctcttctccagtaaacacagcaatatccgttaccggatgaccatattgtaacaacgactggcaacgggtagcatattcggaaaatgcttttgctcctttatcccaccaagtctggttacgttgaaagaaaagtccgataccatccaaagtcatgcccggctgacggtccagccaaggattatgtacgtagacatgatagaaaagtcggttgatacctagcgcatagttacggtccagcaatgttttcaacatagcaggatattcgtcccatgttccacgcacttcggtgaatccttccgcctgaataatattctttccatagatatgcgctccgctgatggcatcgagcatatcattcggtttgtcatgagtgggactgttcaaccagaactctcccataggaagatctactttctgataatgcagtagaccatcgcttaccatcgtcggagctacacattctgccgagaactggcaatcatattctttggcacaatcagacaacacctgatagaatacatccactaccagttcagcgatagtcgtacggacatctctcagaatctcttcgctacgtccggcactctccatcggaatgcctgccaacaaaggcaaataaggtagcaggtcatacccgcgacgtgtacggaactcctttgcaaaactatcactccaattctgactgccacactcccaactatctacgtgcatgtatttcagtacccgacgtgccacctccggatgagtctttacaaaagcctgtgcaaaccagttgtcaaactgtttccggacggtccgaggattgagcttatcacattccagtccttttcctccgccgcctgttgcattggtatgcccggtagccgtatgtcccatgcgtagtaatttccattttcccttggggagagtggcagtcaatgtttttccattcaaatgaccggtatattgctctgtcagattaatgacttgtgaaagtgaatagcaatcctgtttcccgacttcctcttctttagtagcttgagcgacacgccatactagtccggcttttccttcccattggttcagacgggcttcccggtgcaggcgtaattcttttattttcagattgggcttccatttggcag

SEQ ID NO: 11996 - DNA, 1361 bp, Unknown
  gut microbiota DNA sequence
agccaatagcgcgaccaccagtaaccgaacgcatagcggggtggcaacggcacttttccggcaaaaagagtataatctttcagagctgctttataatcatgtccataagccatgaagtaccagtcctgcccgccattagccggacgctctttcacccaatcccaatccttatcattatcaaacagaagtccttgcgaatcatcgatgaaagtccagccgtccgtagccagcagaccatcttccagtttcagtttttcacccttctttgtatcagccacccaagtctgtgtctgcgtatcaccatccataccatccaatgtacgataagtacctttcaagttacccttctgttgcataccgggtttccaggaaaaaggcagcatttctttagctgcggtgataattaagttcttatccgtaaactgtccgctgtttttcttataacgcatcttcatcttagaagtcgttatttcaacccatcctcctcttgttttcagtttgtaatctacttgaggatacaggcgattgatagccatgtgcgatctgtcgtctacaaatttcccatccagagcatattccaagcggagagccccgtcggagatgactgtgaatctcacgttatcatccgtatatgcgatattccgttgtgtgttttgtgcttgcagtgcaaatagaacactttgtaaaatgcaaagcaaaattagcagtattttttttttcataacatttttaaaatctataaaattaaaatccgagagcaaaattaggataattgcagctatatagctgcaattatcccataccaattacttattatccttgaaagcaggtgcttccgccttcacaaccggaccatctcctacgagataaggccatccgttgtcatcccaatacactctatcaagcaagactacgcgacccaaagacggatcggcagtgcggtaagcgtgatagattatccagtctttaccttcatcatcttgtactatttcagcattgtgccctgtacccaggaatgcatcattcttatgtatcaacacctcatgtttgttatcgttcatcttttcgcccgccttatttacataaggaccgaaaagattcgtagaacggcataccaccgtctgataggtactattcgcaccttcacagcaggtaccggtagaacagaacagataataataatcgcctcttttcaatatataggacccttcgtaagcattcgtgtttccggtgttggcagcaacttggatttttgttgctttcgcattctctattccacctttcaacgaaaggccatcctcgctcaactcaactccccaaataccataccagcttccccaaaacaggtacttcttgccgtt

SEQ ID NO: 11997 - DNA, 206 bp, Unknown
  gut microbiota DNA sequence
ccccacacggtattggtgcggcatttcttctccgtgcgcaaaaaatactcgaagtcgttgatgaacgtaaggttgagttcctttaacggaatatcctctcgcttgtaggtatggggcaaaaactcccgaatatggttacagaccgtccgataacgggtaaatgtaccctgcgccctgctgtgcccgactttcttctcaaattcggc

SEQ ID NO: 11998 - DNA, 8933 bp, Unknown
  gut microbiota DNA sequence
cggaaaagtcttttttcgggagtgcagaactctataactcaagcacaatattgaaaaaacgaaatcatttcaccatttacaatgccttgccaccttatattcatattcgcgaggaacagaaacctttttctgacggacaaatcacattaggagtagttagccgtttggaacggattaaagggatggatttggttgtccccgcatttgccaaattgaaaaaacaatatacggacattcggctattagtggtgggggacggttcgcaaaggagtataatgcaagagcaggcgatagaactgggagtgaatgatagtgttgaatggatgggacgacaggaacagtcttgtctgcaatcattgtatgaccggattgatattctcttaatgccatcacgtagtgagggatttggactgactgctattgaaggtatggctcgcggttgcgtggtagtggcttcagataccggaggattgccggaagttgtaaaagatggagaaacaggacttttgcatcaggtagaagatgtcgaagatatgactgccaaaatacaatccttattggaaagcaggatgaggactatccagctttcccgaaattcagtttcgtatgtatcacaattcagttttgcgaaatatgccacggcattttgtaacttatacgaacgtataaaacatataaattgatttatccggatgtatctattgaattatttttatttcattattatcacaggctttggcattaagtttctgtttcagcgtgcaggaaaagtgcgccaccctttaaataaggagcaaatgcttagtttcgatggtccggagttgttttggacgttaactttctctaccggcttgttagcgctttctgctccgggagcactcgacttgatggctatccggcttttagtacttgaaagcctttgtttgataggtttgtttgtggtgaaacggaaaccggtatggagtgcggtgagtattttctatttgctttatatcgcttggttactgataggactttcttattctcctgctccttcctatggcttccggattattctgaaatatctgtacccattgtgtattatgctgtttgcttcggctgtggtacgtgacggggaagtgtttctaaaagcaggattgtatgctcgatgggtagcggtagtttgccttatttttgctgtggttccaggaataggtattctcgtacccggtgtgttctggtatagtaccgctagtgctattcacttcatttctatgtgtatattttcgttggctcttttttaccatagtggacataagaagatcaatttctatttagctatattatttatgattccatgtatactatgggtatttcgtacaagtattatgggaactacattggctttgatggtctttttcttttttcggtataaactgaagtctatacctgtcattgttggctgtctgtttttattcattattacaattttctttattccaagtatcaaagaaaagatgttttataaaaatgataataaaagtatccaaacactacgaagtggagagattagtatagatgatataaatagtaatggacgttttgctatgtgggagtggtcattgaataagttttatcagaatagagagttgtacggaacagggaccggaaatttgcaagagacattttatgcattaagacatccgtttggtactattagaatatgtcataatgattatgtacagatcttatgtgataatgggataataggaattgctctttttggggggagttttttgtttctgattttccattgttttagcgtttatcaagataaacgttatggaatagccgtgcatatctgcgctattacagcaggagcttcttctgccggaacattattgactatgtatacagataatgtgattaattatacaatggctacactttcttatccttgcggcttttatggaatgatgttgggattgattgtaggtactaaaatgaaaaaagatgttgtttaatactcctcaatatttattgtttctcctagtgatattagttatgctgtggataactaataagtgggcggggttactttttagaaataccttgctcttagtagcatcctattatttttatgccaatttacatataggatttgttggattattagtttatatcactttagttaattattttgggggaatatggattattagtgagcagaaaagaggatcaagtggtaaaaaagcagttgcagtcagtattttgctatcattattggttttgatttttttcaaatatgcttatttctttaatgattctattttattgccgataggactgtcttttttcacttttcaagccctgtcatatagcattgatatttatcgtggaaaaataaaacctgaaactagttttattaatgtggcattatttgttgcatttttcccaacattactttccggtcctatcgaaagggcaaggaatctgttaccacaattgcgagagaggctattatttaatgaagataatattatagcaggagcaaaattatttatatggggacttttcaagaaagttgttattgcagacagacttgcagaatatgtgaatatgatttacggtaatccggaggctcatactggaagtacgctagctataactgctgttttttacagttttcagatttatgctgatttcagtggttatgccgatatggcaattggttcaggtcggatgatggggattaaattgatggagaactttaatcttccttattgcgtcaattcttttaaagaattttggagaagatggcatatttctttaacctcttggtttaccgagtatgtatatatatcgatgggaggaaatcgcgtcaataaagcacgttggatcttaaatatttctacggtctttcttttaagcggagtttggcatggagctacctattctttcattttatggggaatgattcatgcgttactctatttattggagtattattgtggtcctaaacgtccgaatattatttaccatttgtatgtatttataatgataacatttgcctggatattcttccgtatagaagatagtggtactgcttggaatacggttgtgcatatctgtacaaatttaatctctcctttttattggggaagttctatgtttactactatgttgactatggctctattgcttatttttattttgcgggagtatttgtcttataaagaaataggtaaggagaagagcaattatgaagttataattctattattgagtattgctctgtttggggtaagtagtgaacaatttgtttatttccaattttgatacaaatgaagaaaattctattatgtttttggtatataatagcgtttattgctgttgatagggggttgggaatatttataaatgaaggtttgaatcgctattttggtctcaatcaacattcggaagtgctgttgatagggcattcacatctaatgttagccactgataaagcaaaattagaaactgcattgaattgtagaatttcaaaatattgcagggaaggtgttaatgtagctgaccgttaccagatggtgaaacaatatcttgaatccctttatagtgattctttgaaaatagtactttatggcgttgaccagtttatgtttacaggaacaggattaagtagcaattcctataaattattttatccttttatggacgaaaaaaatattgatcaatatatttatgataatacagaccgatacgattattggctacacaagttgttttgttccactcgctattctgatgcacttcttaatagttcgataaggggatggcggcatgattggagtaattataaaagtggattcttaaaggtagaggatttgagagaacagataacgaaagggcaacaaaggcatatagcttttgaaccggaattgatggaaacttttgaacgaactttgcaactattggttgaaaaaaatataaaagtgatattggtgaatactcctattgcgaatttattaaatcaatatgaaccagaacaatatgaaaagataataaactatttccatgataaagcgaagagttctccttttatttattattgggatatgaatccggagtattcagagcgatatgaattattctttgatcctatccatttaaatcctcaaggtcaaaaagtggctagtgacaaaattatagaattgtttgaatgtgatttatgatatcagtagtaatacctctttataataaagaaaaacaaatagtaaatacactacattctgtattgcggcagactttccaaaattttgaaattgtagtagtagatgatggtagtacagataacagtgtacaggaagtagagaaagtgaacgatattcgtattcgaattgttcatcaaaagaatgcaggagtctctgctgctcgtaataaggggattgaagaagcacgatatgatttaatcgctttccttgatgcggatgataaatgggatcaagagtacttgcaaactcagtatggattatatgaaaaatattcagattgcagtgtttatgcttgtaattatgtatttcaggacgttagtggaataatgaaaaatacgataattcgtaagttaccttttcaggaagaagaaggaatcttgactaattattttgaagtggtaagttgctcgcattctccaatatggacttctgcaataatggttaagaaagaagctatacaggccataggcggctttcctgtcggtataaaatctggagaggatttgctgacttgggcgcgattggcaattcacaataaaatagcttattccaaacgccctttagcctattatattgaaacggcttcagatacagatgttagtaaaataaaaatgaggtcaggaggggaaaaatatatattgaatgaactgttacgtttatatgctgatatgaaagaaggaagctttaaacaacagtttaaggcattcattataaaatggtataaaatttacgcagtgactttaattgaagtagagaaaggacatcaggctattagcgttgcattccatgctgttgtatttggaggaacattgaagtccttttttcctatagtctgtttaggtttattgcccaataaactttctctttatttgttttataaattaagataatatgcatattgtttttgtttgccgagaatatccacctactttgcgaggtggagggatagcttcgtatatacatgagatggctataaatttgatacgtcgggcacattctgttacagtcatttgtgcttctgatgatacacgtgttttcagtgaccggaaagaggatggaataagagtgatccggttatccggtggagattttatattaccacaaatagaaaaatcttctttaatcaagaaaatgcgttgtttatatcggtttttctcttacagaaagaaaatactacggcagatagaacaattgaaagacgtagatataatcgaagtggcagaatatggtgcagaagcatattatttgtcaaagtgccatgtaccggttgttatccgccttcatacaccaactttgcttgacaggagtaattttagtataaagaagttcaatattcgaactttttatgattattggatcggtaaaagggaactttctattttatcccaatttaaatatgttacctcttgttctgccagtctgaaagattggtttttaaaatatgttcccgacatgaccggcaatatagaagtcatatataatcctatcgaaatttcaaagtggaaaacggagaaaatagattatgtcgaaaattcaatcctatatgtaggaaccgtaatggaagggaaaggggttggagatttaatcgaagcttgtcgtatattgagagaacgaaatattccggtgactttgaagattgtcgggaaatgggggacttatgcgatgaagttgcaaggttatgtgacagacaatcattttgattggtgctcttttgaaggaaatttacctcgcgaagaattacagaacctctattcaaaagctaaaatatcttgtttcccgtcgtggtgggaaaatatgcctttagtttgtttggaggctatgttggcgggtaatgtagtaataggtagccgaaatggaggaatgactgaaatagtaacagataaaaaagatggttttctgattgaacctcatgctccgaaagaattggcagagtgcatttataaagcattgatgatgaacaaaaacagtgtgactgagatgaaaaagaacgcattgtacaaaatacaggggaagttctcatttgaagctgtaatgcaatttatggaaaactattatgtgagtgtaataaaagattataaaaatgaaaaaggtcctttgggttaatccttcttttttagactatcgtatacctttgtatgatgagttgaataaattatatcaaaataattttcatttgatatatagtaagcaacgagtacctcaaagatgcattgacaagatagaaagtgttttaaaaggaaatgctttaggtttattgaccgaaaaaaatgtatctattgggaaaaaggatggttttgcaaattccggaatatctttaccttttccgaaggggctgtatcggttaattaaatcagtaaaagctgatattgttattgcagaaggctttttccagtttaccccatgggctttggcgtatgctatttttaatagaaaacctatactgatagcttatgaacgcactgctcatacagagagaaattgtccggcatggagacgaatgtatcggaaatttgttaacttatttgtagatggttatgttgtgaatggaattttaaccaaacaatatttggtatcacaaggagtttctgaaaatgtgatctttacaggagcaatgtgcgcggatagtttgcatctggcggaaaaggtaaagatgataaaacccgaagaacgattgttttttaaaagggaactacatatcgaaaagaaagaaattatatatttatacgttggtcgattaataactctgaaaggagttgcttatttattggatgcatggaaagagcatattctgagccatcctaatgaccatcttctaattgtaggagaaggtcctttgtttgatgatttcgtacaaggatatggctttatgaattctatatcttttgttggaaatattgattactctcgaataagtgaatattatgccgttgctgacgtctttgtgattcctacattggaagataattggagcttggttgttccagaagcaatggcctgtggactccctattgcgtgttctgtatataatgggtgccatccggaactagtacatgaagggaagaatggggtgttgtttgataccttgaacaaggcttctctattgtatgctttgtcttattttcattcagttgatttggaactttttgggaaagaatctatgaaaattgaacagaaatataatccacagaatacagcaagaaatatatttaaagccattgaaactgtggctgaaaaataaaaccatatacccttaaacttttaatgaaaattcttctcgtccacaacaactacggtaaatatagcggtgaagaggctgtagttgataaaatggcttcaacgttccgtgagcatggacacgaagtgtgtttctatcgcttaaccacagaaaggagtcgtgagagtttatccggaaagataaaaggtttcctttgtggcatttattccccatcaggggtgaagggcttgcgggagatattggaacgggaaaagccggatgttgtgaatgtacacaatctttatcctttcattagccctgccgctttatttgaatgtaagaaggcgaaagtaccggtagtaatgacggttcacaatttccgtttaatttgtccgacggggctatttatgcgtaatggcaagccttgtgaggtttgtctacaaaagagaaatgagtggagctgtatccgatataactgtgagcattcctatctcaaatctgtgggatatacgttacgaaatgtatacgctcgctggacgggggcatataaagataatgtaaatacatttgcttgtattacggagtttcagggagagaaactgatggaagccggatttgataaaaacaaaatagttgtgattcccaattcgatagatgcaccatcggggtatgaagcaaccttgggaagctatgtagcatatatcggcaggttaagttacgaaaagggatatgacttgttggtggaaacagctcgcaaacatccggaaattcaattctgtttagcaggggcaaagagagaagatactaatatcgctttccctgagaacgtgcgattaatggggtatttgaaggggaaggagttggaatcttttataaagaacgcccgtctggtggtgataccgagtagatgttatgaaggttttcctatggctattttggaggcggcacagtttggcaaaccttgtatcggtcccgatcatggtggatttactgaaattataggcaaaggagagagtgctatcggacgattgtttgaaccgaataatctgaatgacttggaaaaacaagtcctgactttgtggaatcaacctgtattaacagaggaacttggacgtaaagcctatgaaaagctccggaaagaatactcatcggaagtcgtttataggaaatgggatgaattgtttactaagatactttatggataatatgcccttagatttagatattagtgagcttttgccaatggatatacacgaatgggataatttgcgtaatactccattgccttattgtttttctgacgaagaatttgaaaaagaaattgaagaatcagaaaagagtggatgggcagaagacaatgatgtgaatacatttataattaagtggaagaacttaaaataaaatccctaataaatcaatgaataatgaaaatgaaaacacaaacctctgtaactttgagggggggg

SEQ ID NO: 11999 - DNA, 1878 bp, Unknown
  gut microbiota DNA sequence
tatttgtaatagccggacacttttttgtcttacatactccgtttcgctctactaattttgaaggcttatccttgttcctacaagcagggattatccctttgtttcaaacgggagttccattattcattatgctgaccggatacctgaatacaaataaagtatcagagaaaaaatactatcggggaatatggaaggtgctgattgcctacgttttcttttcaatattgacccttgtttttagaaaatattatttgtatgaggatctttcattattcaaatcaggactcaaaattcttgatttctcggcaatcccttatgcgtggtatattgagatgtggattggtctatttcttttcactccatttttaaatcttttatataaggctattcccactcaaaaacagaaaatggtgtggatagggatattgtttgcgatgacagctattcctgatttgtttaatcgttatggctttcatctggttcccggattctggcagacttgttatcctttgatgtttttctttattgggagttatgtaaaagaatatcagcctaaaattaatccattatgtggatggggaataattataatatgttgtttgattaatcccgtcttcaatatattgttcgtccataatcgtccgttgattcatatagcgggagatccttccggtatgtttgggaccatcatagccgttatcttctttttgttagtttatcagcgggatattcaagttccgttgatgaggaaaatatttaccaaagtttctttattgtcactggacgtttatttgtgttgttatatattcgatgcaatttattatccgtggtttaaggaacattattttatcaaccagtctcaattcggaatgttcttttttgtgattgttcctttggtatttatttcatcgttggttttggcgcaaataaaagaatggctgtttaaactatccgaatcccatacatcaagaaaacggattgcttatcggtgaatacctatgggatatacgtaactatatacttttttctttatggaaaaatacttcaacatcaactacgaatttgacaaacaaagcgttttctcttccatcgaccgccaactgcaaacttcctctcccggctacatctgtgtggcggacggggttatactgaacacggccaacaggaagccggactatctggaagtggtgaacggcagtatgttctctatttgcgacagcagttatgtgccgctttatctgcgctggctctatggaattgagcggaaacagtattgcggaagtgaaatctttatggacatcatccggcagaaaaagtaccggatgtttttcatggggacttcacagggcactttgcaagggcttagctatcatctttcacagattgacgaacgtatcaatgggatgactttttatgaacttccgttttgtaatgtagaagacttcgattatcccggaattgcacggatgatagatgaagatggtgcggacatcatctgggtggctctgggtgctccgaaacaggagatattcatgagccgtctgaagccttatctgaaaaggggagtgatgattgccgtcggagccgcttttaagttttatagcgggacagacgtgaagcgtgctccccattggatggttaagatgcatcttgaatttgtctatcgtatctttagtgaacctaagaaacagttgaaacgctgcggatggattgtatatacacttcccggattgttgtatcgggaatggagaaaaaagaaacttgctaccaatttcattcgataatcacccaacaccctgatttattactcccttcacgccttatataacctgcgtcacgaagttccttgattttcttttcaatagcacgacgtgtcac

SEQ ID NO: 12000 - DNA, 5094 bp, Unknown
  gut microbiota DNA sequence
gtcagctatttcgtcaagtgttatgcttgagttatgacgaatcaactcaataatttgtcccgaacttatcccgaatttaacccgaactttatcccgaacttcagagtattcgctctggggcagaggacttccttgatgattttttaaagcatccagaatctcttgcagcataaagtcaatgaaaggtccggaattggctgctgctgtgctggcttgaatagcgttataataagcctcttggttggcatacaccatattttccacagggagatgttcaaatagagggtgtaatttccctaatatgagtgattgccataatctgccggttcttccattaccatcactaaatggatgtataaactcaaattcataatggaatacacaactgcgaatgagcaaatgatcttttgcctctttaagccattcgaacaaattgattatcaattccggaactctattggcaggaggcgccatatggaccaatcctttctcagagaatacaccaacgccaccacgtcggaatctgcctgcatcatcggtaagcgccatcatcatcgtaccatgtgcttttaataaatcgtctacactgaatggattcaagctgctatataactcatacgtctttatcgcattctttacctcttgaatctggcgtagtggcgctataacagtcttgccttctatgatatccttcacttcatcttcggataaagtatttccttctatggccaacgaactgtgaattgttcttatccgattagcttttcgcaatttcatcgcatcactctgttccaaacggatggcataacgttctatctgtccggatatttccgcaatcagattaatggcatgagcagatatggtgaaaggaggtgtatacatatcagttgaatgattcggttcataatagatggaacaaaaatacgaaaaaatatcagtttatacaaaataaaaaggcggttcatccatccgaaccgcctttattatccacatacctcttattttaagaggaaccgctattcctacaaatcttcatactctttcctcgcatcgaagcatgggcacgctttatgaacattcgcgctcaactgataatgccctacaatcttagcttcgggatacagtcctttcaactcacccaatacccggcggagcgtttctttttgcgaagcggttctggtatccgtcggcttacccaattcatccagtccaccttcatagcaaatcgataaactgtgcaggttgaatccgagcgcgtgtgcgccaatctcactcattgggcgggtgtgatgcagcgcgccatccttcgtcacataaaaatgatacccgatacatttgaagccacgtttcagatggcattggagcaactgctcctccgtgaagggaatattcgcacgggtagcactgcaatgcacaacgatatacagaatgctgcgcggcacatattcctccttcaacgagaactctttcaactctttcattcgatccggccgtttagatatgtcccatacaagacgttacacctagagcagatacgattgaagtagctactgtaataatgatctgtaaaatttgtttccaaatagactttttcataattcttgaatttttaaattaataccaccaaacatcctagatcttattctgccggatccggagcttctccattattgccgtcgtccgggtttccactgccaccgtttccgccatccggcttcccgtccggatcggggacaaccgcttcatcgctttccccttttttgaccagcgtatacttcatcgccttacacatatccagcagcatattgcccggacggaagcggacacgcgaggtcttgatacaggtggccgccttaaatttttctgccgtttccgttgcattgccggtggcaatcgttacacggaaactgcccatatcgcccagaaggacaatattacccaacgccaactgattcttcatctccaacaaaaactccgtaatgcaacccttcaactcaccgatagaataagaggaacgctccgacacacggctgattacctcgtccgtatccactctgcggttgctgcgtgccatcgcataaaacttagctgcttcttgtggtttcaacggattcttacgctctaccactacatacttctgtgccataaatctaatttttttaattgataattttaatagttctgtaatcgattacactgcaaagataccacatccgaaagggggagtggacgacaccgaacgacactgaacgatggttattgtttttgactgaacatttgcttcattgcataaaaaagagtacctttatggcattaaccaaagaataactcaatagaaaatggaagaagaaaaatttcgtgtgagatgttacgataagaatgagttggcgaagatgtatttccccaagctgagcgatcatgtgtctgtggcgaaactccgccgttggatgcgcaactgtacccctctgatggaagagctcgcaacgggagattttcatcccaaactgaaaatgttcagcgcacgggaagtacgcctgatcgcgcgctatctgggcgagccggatggatatgtaccggcacagggacatccggacatcaattgactgcattttcagaataaaacgactgcttcttccggataagacaacggtacttcccgaacgatacgaccgctcttttcacttgaaaggagcggtcgatttgttagataaatacggttgatttcaagcaggcaaccgctcgatcagacacaaagatacggtcgtttgcgcatagtcgatttcccggctggccgacacctaacgggtggtatttttcttcatccattccaagtcgggctcgtaatccaccagcttcgtcatactcttgtcgtggcggaagtaaatctcaccggtaggtccgttacgatgtttggcaatatcgattactcccaatccttcagtcgggtaaccgcttctacggtctgtctcacgaccggacaggctgggacgggaaagcatcagtacgaggtcagcgtcctgttcgatagccccgctctcacgaaggtcgctcagagcgggacggccgtcgggatgtccctccacgttacggttcaactggctgagaagtatcacggggatatgcaactctttagctatcattttcgctttccggctcgcttgagccacctcctgttcgcggttacggttgtgctggtcgctcttcatgtcgcagagttgcagatagtcgatgaaaagacaatcgcaatctcccttactttgtagcagtttggcggacgtgcggacataatccatgctcaccgacggattatcgtcgatgtaaatagggaggcgcgacagctccgtcgatgcctcatggacctcccggagttcggacggagtaagcgccccgctcagcaagtgggcgggagaaacctccttcgtagccgccagcagccaacggtctcccaagcgttccccttgcatttcgagactgtacacggcaatgtgataaccggcggaagcggcggcacgtgccagatgcagcgcaaaagccgtctttcccaccgacggacgggcggcgacgattatcaggtcgcccggttgccagccgcacgtcaggcggttcagctcgttgaatcccgtcggcaagccggtaactccgttcttgttcgaggcgacacgtgtctctatcagttccacagtatcctccatcaattgcagcatggaacggagatgttcggacatcccgcattccttttccaattggtcgagaagggtatgcgcatccgccagcgtgtcggctatgtccgttgtctcgtcggcagcctgtgccagcagtttatggaatcccaagatcgcttcacggcggatatacttctgttgcaggatacgggcatggtactccagatgtgcgctggacgctacgcgtgtggtaatgcttaccagtgcataaggacctccgatgaagtcgagtttgccccttcgtgtgagttcttcctttacagtcataaggtctatgacctgccctgcacggtacatactctgcagggcggcatagatttcacggttcttctcaatgtagaacacttccgggcgcaatattccggcaaccaatgtgatcgccttgctctctataaggcaggcgccgagtacgatttcctcgagctcggcgtcctgcggatttacaatgtcatccatgaatcgtttcaataatcatattcatccagaaacgctttgtccgacagataagtgcttgcctgcatacagtatttcgtatccgtcagatgatcgtaatactcgtcaatctgccgtatgctcatactgcgttcgcggggagaaagtttcttccattcccgtctggcacggccgatattgaccctttgtttctgggttacctcgtgatatttctcccagaaaacctcgaaggtgacaccacccgtttcttcacgtgccgcctcacggcgtctctgtccgatcagcaagtcatagtcggggatacggatgtgcgtgatgtacggattgaccactctttcaatgatcccttcttcgtacatcctatcgaagaaacggcgtgtgcggctgagtttccatccgaacactttcgcccagtgggtgagggagatcaccgattctcccctccggcattcgaaggtctgaccgttgacgcgacacgtcacagtgctgtaattgacatgggttaataccaagatgaacgcttcgaaactgcccgttgcgtttttagtcatcttcatttgttcctcgaataagactttagggaagaggatgtagccctttttcagcatttctgctattgatttgttcataactgaatattattaattcggctcaaaggtataccgtttatttgaaccgggcaattgtgcggttcattccggttcaaagtgatgttttcggctcacgcccggaggggctttatgccatacgtgggaggggttttcggggccatatttagcggcacccctcgcggcaccccttgaaaatctctcaaacgccttgtaggaaggggaatccggacgcacgttttttgcgttccggcaccccatccggcaactaatatatataataaataaagaatgtattaaaatacattata

SEQ ID NO: 12001 - DNA, 8536 bp, Unknown
  gut microbiota DNA sequence
cctcattttggggatggcaagatagggattttctttaatcatttcatataccagcgcaggcgttccccaacatctcacgatggcggcaatctgttggggagtaagtgtctgggtgtgcggggtgaatcccgcttccgtcagttgttgcggcaatgccgggtgttctgttatcgtccggcgaaaagctcgcaccgctgaactgttgtactgaaagttcggaaaataagcgattgccacttcggacaacgcatggcagccacaaagcagccagtcataggatttaattttcatgttcctttattcatttaattacggcgcaaaagtatgctttctccgaatgatgggataaactgttatttttattgtcggtaatttcaatatgaaattagttggaaaatatttaaataaaaatctaattatttaaacaatcttttctatatttgcacccggtattagattttatatggcatttctgttctcttatagacagtagtgcccagtttaaataaaaataaaggaattaggatgtcgaaaagaacaaaagaggcacaaaaacatttacagcagaaaagggaacaatatcatcgtcaggaagagaagatagaggaaatgaaatgtacaatgcaacatacggaagaggagatcaagcaattggaatatgtgctggaagtaatgaaaagcgcggaaaaaggccgcaagcggagagtgatcactcatgataagataaaggagtactttgcttctttcagccgtttcttcgactttctgcagcaccgcttgaatctgttcgtgcattatgaactggtgtgcgagatcatctttgcgcgctaccggttccgaagcaggtcgcgcactcccggaagggaatatctcagtttcgctaccgtactgacttactttaaaaatgaaaggagtatggtgagctgatagtacgaataaaatagaaatctaaagataaaagcatgaaaaacaaatgttttaggaacagaaatgactaaattgatattttttccttatttttgtatgtccatttttgaatgatatgatacagataatacaattaaaaggaaaagacaaacgtttatatcggctgctggcacctctggttatggatcctgacgtgatacgtgccaacaacaattatccgttcaaaacgggtgaagactacgtctggtatatcgcggtcgatggaaaagaagtgaagggatttatcccggtggaacagaaaagcaagaaaaaggctgtaataaacaattactatgtaggagctgaaaatacggagcgggaagagatcttgtctgatctgctgcctgctataataaaagatttcggccctgagagctggctgcttcattccatcacacttgtacaagacaaagaaatattcgaaaagttcgattttacatccatggataagaaatggacacgttacgttaaaatgtatagataggaggcttatggggaaaaaagttgcaggcgctaaaaatgtatatgagctggcacaagaacgattgaaagtaatatttagcgagtttgataatatatatgtatcattttccggaggtaaggatagtggggtattgctgaatatgtgtattgattatatccggaaaaataatttgaaaatacgtttgggggtcttccacatggattacgagatccagtataagatgaccatcgactatgtagaccggatactggaggccaataaggatattctggatgtttaccgagtatgcattcctttccgggtgtcgacctgcacatctatgtatcagtctttctggcgtccgtgggaggacagcaagaagaatatatgggtacgctccatgcccaagaaggcgatgacaaaggaggatttccctttttataatacgtcaatgtgggattacgagttccagatgcgttttgcgcaatggctgcataataagaaggacgcggtgcgcacctgctgcctgatcggaatccgtacccaagagagtttcaaccgctggagatgcatctacatgagccgcaaattccagatgtatcataagtataaatggacttcaaaagtaggtaacgatatttacaacgcgtatcctatttatgactggaagacgacggatgtatggacggccaacggaaagttccaatgggattacaatacgctgtatgatctgtattatcgggcaggtgtcaatctggagcgccagcgcgtagcgagtcctttcatcaatgaggcacaggagagcctgcaactctaccgggtgctcgatcccaacacttggggcaagatggtcgggcgggtgaacggagtcaacttcaccggtatgtatggcggtacccacgctatgggatggcagtcggtgaaacttcctgaaggatacacatggcgggagtttatgtatttccttctgtccacgttgccggagcgggcacggaagaattatctccggaaactgtcggtaagtgtgaatttctggcggacgaaaggaggctgcctgagcgactcgaccatccagaaactgattgacgccaaagtgccgattgtcgtgatggacaacagcaactataaaacgttgaagaaacccgtgcgcatggaatatcaggatgacatcgacatcccggaattcaaggagatacctacctacaagcggatgtgcatctgcatcctgaagaacgaccatgcctgcaaatatatgggattctcgcctacaaaggaggaaatgagcaaaagaagtcaaataatggaacaatatagaatcatagtatcatgagtgtagataaaagccctgtttatgaggtaaaggcggtgcctgtggaaaaagtgtatgccaacgattataacccgaatgtggtggctccgcctgaaatgaagttgctcgaactgtctatctgggaggatggatttacgatgccctgcgtatgttattatgataaggaggccgaccgctatatcctggtggacggttaccaccgctatacggtactgaagacatcgaaacggatttacaaacgcgagaacgggctgcttccgattgtcgtgatagacaaggacctgtccaaccgtatgagctcgaccatccgccacaaccgtgcgagaggtatgcacaacatcgagttgatgtgcaacattgttgccgaacttgacaaggcggggatgtcggatcagtggattatgaagaatatcggtatggaccgagacgaattgttgcgtttgaaacaaatttccgggcttgccgacctgtttgccaatcatgagttcagtattccggacgaagttgccccgacggaaacggagcgtaaagtgttgtaaccaggcaattagatatgtatgctattgttaatttgtcttttttagaaaataacctttctgaaaattgtatatattaatcaaatcggttacatttgtaaccataaacaaaacagagacagcatctatattagtaaacaatagaatacataaaatgaaaagaattctggtaagtggaggggccggctttattggttctcatctttgtacgcggctaataaacaacggtcacgaagtgatatgcctggataatttttttacggggtcgaaagacaacatcgctcatctgatgggcaatcaccattttgaagtagtgcggcatgatgtcacttacccatattctgcagaggtggatgaaatatacaatttggcttgtcccgcgtctcccattcattatcagcatgaccctatacaaacggccaagacgtcggtgatgggggctatcaatatgctgggattggcgatgagactggatgcaaaggtgttgcaggcttctacgagcgaggtgtacggtgacccgattgtgcatccgcagccggagtattattgggggaacgtaaatcctgtggggtaccgttcctgctacgatgaggggaaacgctgtgcggagacattgtttatggattatcatcgacagaatgatgtacgtgtgaagattatccgcatattcaatacgtatggtccgcgtatgctgccgaacgatgggagggtagtttcaaacttcgttctgcaggcattgaacaatgaagacatcacgatatatggagatggaaagcagacgcgcagtttccaatatatcgatgatctgatagagggaatgataaggatgatggagacggaggacgattttaccggtcctgtgaatctcggcaatccgaatgagttctcgatacaggagttggcgaaaaagataatcgccatgacgggttcttcttcgaagatagtgttcaagtcattgccgaacgatgatcccaagcaacgacagccggatataacgctggcaaggaaaaaactcggttgggagcctaccatcgaactggaagatgggctgagccgcatgattgagtattttaagggatctaaaacgaataaataaggtgataattatgaatgtaaaaattaatccttccgaatataaagtcctcattgtggacgatgtcatttcaaatgtactattattgaaggtgctattgaataatgagaaatttcagattgtaaccgccagcaacggtacggaggctttggcgcaggtgaagaaagaaaaaccggatcttgtgctgttggatgtcatgatgccggacatcagtggatttgacgtggcgaagcagatgaaagctgatcccgaaatgtctgatattcctatcattttcctgactgcgctgaatagcacggcggatatagtgaagggattccaggtgggaggtaatgactttatttccaagccgttcaataaggaggaactgatcatccgtgtgacgcaccagatttcgctggttgccgccaaacggatcattgtggcgcagacggaggagttgcgtaagacgatcatggggcgtgacaaactgtattctgtgattgcgcacgacttgcgttcgccgatgggttctatcaagatggtgttgaatatgctgattctgaatctgcccagcgagacaatcggtgaggagatgtatgagttgctgacaatggcgaaccagaccactgaggatgtgttctcactgctcgataatttgctgaaatggacgaaaagccagatcggtaagttgaaggtggtttatcaggagctcaatatggtggaagtcgtagagggtgtaagtgagatctttacgatggtggccggtctgaagaacattaaaattgtgcaggatatgcctgtggtgcccgtggttgtccgtgcggatatagatatgcttaagacggtgatccgtaacctgataagtaatgcaatcaagtttagcaatgagggctcggaagtgctggtgtcactgactgaggaggacggtatggctatcgtcagcgtgaaggatagtggctgcggcatcgatgaggagaaccaaaagaaactgctgcatacggatacgcatttcagtaccttcggcactaacaacgaggaaggttcgggactgggattgctgctgtgccaggatttcatcgtcaagaatggaggcaaactctggtttacttcgaagaagggagagggatctacattcagtttctcggtgccgctgctggagaagtaagtgttataattatacagactaaaaataataaacagggcataatttgcatagatatgtaaatcatgccctgttttattggtatattctactttcgtctatcgcttacagattgccttgaagtcgcaatacgcacatttctttatgtcctctgtctgcgtgaaaagttctttctcgtcaaatatttcttctaataaagcttgcagacgttcacggaactcgtcttcaaagaaagcgaagttgttcaccggtatcttcggtttgcggggttctcccatttcaatgacaggcgaatagctctctgaggcggcacgatgaatataaagcaaggcgggagctaccattaaaggctgtttccggctcatgatggcggcatacaggaacgtctggaagatataattgggacgcgtttccgaaggagtgaacagttgctcgatattggcaggaatcttcgggcttcctcctgttttatagtctacgatacgtaatgtaccttctttggcgtccatgcggtcgattgttccaccgagacggagcgttaaagggcctaaggcagtctgtatggttatcttctccgatacctttttctccatagcgaccatctcgaaaggagtgtattggaggtcgttacgaagcaactgtttcaagtaagaaacgattactttggaattgatgagctgcacaccgttgtattcgggcttctcttccggtgcgactttgaacagttcctgcttgaaggcttggtctacataaccttgcagctttatttcgtcacgcagcagacgttccaagtcctctctctgaatcatttttccgttggctgtcaggtcagtgtaagccagttgggcggagaggtggaagatcgttccgaacagggcggaatcgatttccgcacttacttcatccggcgttttcagtccggcaacgtatcggtaatagaacctcagccgacaatcaagataagtgttgagagcagaaggagaaaggatgacggattcgggctgggcagtatcgtaggcacgataaagccgtctcagtatttccggagttttttctatttgtatctccagcgtgttttgcggagattgtccggcttccagatactcgcgggtgatctcgtgcggaccttccaccagcagttgcagcatgaaacgggactcttcgccacgattcagtccgtccgaagaggtgttgtagagcagcgtgatattctctgcccgttgaatcagacggtagaagtagtaagcgtatactgcgtttttatgttcgatggtcgtcataccgaaggctttgcggaggttgtaggggatgaaggaggactctccaccggctttcggaagttgcccctcgttgagcgacaacatgataagattgcggaaatcgaggttacgtgtctccagcactcccatgatttgcagtccgatagccggttctccgtggaaggggatattggaagcggtcagcactttagtaataagacgtttcagggtatcggtacgcacgcttaattctccgctttctatcaggctgtataatctgtttattttcaggtgactctggaagatggattcccgatatagctggttgaaaatatcgtcatattccccttctttgcgatagaggatggatatgcttttgattaatcggagcaggtagtcgcataactccctgatattgctttgcggagtgaaaaggatagtcagaaaatcatcttttttcagttccgacgggagcggatagaaacggttggtctttgtcagctcgcgttccagacgggtggcatgatccgatagttgccgggtgtaggggtgttttaatatttttgatacggcttcgtaggtgaaacgtccggtatccggtcgatagccgttggtctgtaattccatagctgcgttgatgaagctgtacaccggagtttgcgccaatggaaatcccatagtgatatttacgttttgcacatcctgtgggatggagtgaagcacggggaggagcagggcttcgttgcagagcacgatggcattttccttttcgctgactatctgcgttgtgtgagtctgggttgcttttacccattcgggcaggaagcgggcttgtgcattttcggtggaagcagagatataacgtatctttttcggcttccggaagatgtcgaaataactttccggcagttcgttggggaagtcgatgaggttgcgtttgataaattctccggcttcgtgcttggagattcgttgggtatagaagaggtcgtaatcccaataaaacatggctttcccggctttttgcagcttttggaagaattctttctctactttgttcagtacgttgaaaccgacgaatacgtatttatcgtatttgagccggtcggtatcgagttgttcgataacgttccggtagagcataccttcgtaggcaatgccaagttcggcaagcttctcccgataacgatgatagataatacccagtttgtcccagagggatatgaatttttccttgagttcggtacgccgttcgatggagaagttctgaaagaattgccggatggcttcttcctgttcttcatcgaggaattcgtagtcgtccatcaggttcttcaggtcttgcagattgctgaacagtttgtctgcatccaccatatttttgtctacgtcgtcgaaatcgctaatcagcagttcaccccagaagtagaaatcgtccagcgtctcccgactttcggtttcttctttgaatactttataaagctcacagaccaaacggatcggatcccctgccttttgtacggatagtttctgcaacaggtcactgatactcatggcggcaggcgaccagataggttggtcggattcttctgccaggtattcgttaaaaaacaggttagcgcgtttgttggggaaaacgagcacggtgcgcgacaggtcgtttcctattttcgtatataagtcatgggcgactagttggagaaatggttgcatatcggatatataattgtgggatgtatattgat

SEQ ID NO: 12002 - DNA, 1544 bp, Unknown
  gut microbiota DNA sequence
aattcctttttcaaaggctgcatcgccccgaaagacatcacccatatacggcagcagggagagccgagggagaagtgtttggtgttcgagggtttcatggactacctctctttccttacgctccgcatgaggaactgtccgaccatacccgaccttgacaggcaggattatgccattcttaactctaccgccaatgtgtcgaaagccattgacgtgctgtacccgtatgaacgcatccactgtatgcttgacaatgacaaggctggatatgaagcgacacgggctatcgaattggaatacccctaccgtgtgcgtgacttctcgcacaattataggggatattcggacttgaacgattatctgtgcggcaggaagcaggaacagaaaaacgcagccagccaagtgcaggaaacgaagcaggaaaccggacaacgtgccgccccaagacaaaagagaggcaggggcatttaatccggcaggactaccaacggctggcggtttatttggagagcaaggttatgtttcggtaaaccgaaactaccttgctttgctcaccgcaaagaaaatttctcccgttggtcgcaatttttaagataccatttaaatgtaaaaacctatgacgaatataaaggataagccggggggacgtccggcaaagaaacggatagagaagcagcaacgggttgtcagcacgaagctgaccgagttgcagtattacgccatcaggaagcgagccggggaagccgggttgcgtgtcagtgagtatgtaaggcaggcggttgtttcggcagaggtcataccccggctgaacaggcaggatgcggacaccatccgcaagctggcaggggaagccaacaacatcaaccagttggcgcatcgggcaaatgccggaggtttcgcactggtggcggtggaactggtgaaactgaaaaacaggattgtcgaaattataaaccagttgtcggatgattggaaaaataaaaaagggaagcgggtttaagggctgcgtaaactatgtgttgggcaaggaacaggcggctttgctccatgcggacggggtactgacagaaagtcagggagatataatccgcagcttctgtatgcagaccgggatgaatcccgacttgaaaaagccagtcggacacattgcactaagctattcggcagtggatgcacccaaattgacagacgagaagatgatacagcttgcgcaggagtacatgcgtgagatgaaaatcaccgatacgcagtatatcatcgtgcgccatcaagaccgggagcatccgcacgtgcatattgtattcaaccgtattgacaacaacggtaagaccatttcggacaggaacgatatgtaccgcaacgagcaggtatgcaagaagctgaaagccaaacacgggctttattttgctggtggaaaggaacaggtaaagcagcaccgcttgaaagagccggacaaatcgaaatacgagatttaccacgctgtaaagaatgaaatcgggaaatcccgaaactggcagcagttacaggagcggttagcggaaaag

SEQ ID NO: 12003 - DNA, 210 bp, Unknown
  gut microbiota DNA sequence
tacagcacccgcaacacttggtgcaggttgtcaaaatccaccgctgctaataacataggcataccgatttatatgttaccagtagcgttcatccgccgagccgtaaagagccagcacccggtctgtgtcgttcttcttctttgcccgcaggtaggacacggatatgttctttcgggtgtagtagttcacgaggttgcggtagttgagcag

SEQ ID NO: 12004 - DNA, 1182 bp, Unknown
  gut microbiota DNA sequence
attattcctccgctggaagaaataaatccggataatgaaaaacctgatccggagaaacctgatcctgaaccagagaaacctgatcctgatcccgaaccggagaagcctgatcccgatcctgaaccggagaagcctgatcccgatcctgaaccggagattccgcaagaatgggccggaaaagtggtatggacacatggtctcacaggtatgccggatccacaaatgtgggagtatgcgtacttaacaccaagcaaggtgcgggggctgaaatggaataaagcatacggttggtttgattgtaataaaaaagatgtatggggagagcaacccaatagtgataataacctttgttgggctgcttctgtatccaatatcatttattggtggttggaagaaaacaaggaatatgtaaataggtttggatatgacgggccatcccgctataatggttcgttggattgtgaggtgtttgatttttacaaaaaaaatttctcgaatactggtaataatgtggctgctgcattaaactggttcttcaccggaaagttccttaacggagctaaacaggaagccggtttctttaaggaagtgcttggtgaaaattgctcggtatgcgaaacgtgtcaatcttttcgctatcgttttacggaaatcataaaagaagctctatccggacaaaaagccataggatgcgcccattcctttggaaggcagacacacgctattaacatttggggagcagaatttgattctcaaggagaaataacctacttatatatcaccgataataatgacacggacttggaaaataatctagataatggaacgccgactaaagctggtatgattcgtaaaccaattcagatacgagacggaatacctttcatggaaagcagtgtgcctggttgtttcactatacaaattctggaactgaattttatgggattgaaaaaagcagaatggaagaagtatttccagtaatttttttgctaacattcaagaagtcgtctttaacttctctgttgtaagtactactggagtatatttttggaaggttatagtcggtttgtttgttgtgttaactatagcctttttatatagtcaagcaggattaacaggccttttcgaatatcctcttgtgctatataatgctcactaaataacgtgagttcgaaataaaat

SEQ ID NO: 12005 - DNA, 316 bp, Unknown
  gut microbiota DNA sequence
tcgtggagatactggaaatcatcgaccgggacttgggtttggggctggcttccggcactccggtttccgttcccccggcaaccgtccgccgggcagtgccggacaaacccgaagaaacgtccgaaaagcccgtcaagccctaccagttccgggaacagaagttcccgcttgccgaactggtgtactggcaacagtacggcatcacgcccgaactgctggaacgttacaaggtctgctcgctccgggagtatcacagcgaaacggcagagggcaaaccgtacacctacacttcatcggtggcagaacccatgtacgg

SEQ ID NO: 12006 - DNA, 866 bp, Unknown
  gut microbiota DNA sequence
gtcggaatgttgctgctgaagttgattgacagcaaacgattgttacagatttcgggagtattgacgattgtgttgttgctttccgctttattcggaagcaagggaattgctttgattgctttccctgccgtaggattcagcatttcaatgatgtactccatcgtgttctctctggccttgaattccgcctcacaacatcatggctcctttgccggtattttatgttccgcaatcgtaggcggagcaggcggtccgatgattgtcagcacgatagccgatgctacgtcgctgagaacaggtatgttgtttatcctggtctttgtaggatacatcacgttcatcggcttttgggctcgcccgttgattaacaataagacagtgaaactgaaaaaactgtttaaaaaagcatgattatgaaacaacgaagctatattctccttttgttttccatcctgttatccgcaaacggatatgcccagaaaggtattatgcgccttagccaacagacattgatgcatgaggtacgcgaaactccttcgccactggatggacagcatattgcagttaatccgccacgcttcatgtggccggataagtatccgcatctcggcgccgtactcgacggtgtggaagaagaggatttcaaaccggaagtaacttatcgtatccgcatcgcacgtgatccggagttcaagtcggaagttatcaccgctgaaaggaaatgggcattcttcaatcctttcaaattgttcgggaaaggaaaatggtattggcagcacgcatacgttgacaaagacggtaaggaggaatggtcgcctgtttaccatttctatgtagacgagcagacgcgtactttcaacccgcct

SEQ ID NO: 12007 - DNA, 15351 bp, Unknown
  gut microbiota DNA sequence
acatcatcgaacggaataagaacaacccggaagcacaggcgtatatcacaaaggccaataaatgtttgaatcacccgctgaaacatttggaagaggaaattgatacgacacaggttgtgaaactgacgaacatcgtgcaataccgttctgcactgattcgggaaagccgaaagattgtagaccgtgaagaagcgaacattgaagcaatggtacgcgcttatctgctgactaaagatgaggtgtattataaggaaggtatcaaacgcctttctgaaattctctcatggaaaaacagcaagtattttgcaggagatttcaaccgttccacgattctgtcgatgagtacttcggcatacgatgcatggtataacctgatgaaaccggaagaaaaaaaactgctcttgagaacgatccgcgataatggcaagaagttctatcatgagtatgtcaatcatctggaaaaccgtattgccgacaatcatgtctggcaaatgactttccgtattctgaatatggcggctttcgcaacgtacggcgaacttccgatggcttccacctgggtggattattgttacaatgaatgggtatctcgtctgccgggacttaatacagacggaggatggcataatggcgattcttatttccatgtcaatctccgcacgttaatcgaagtgtctgctttctactctcgtatcagtggattcgatttctttgccgacccgtggtataacaacaatgcactttatgtcatctatcagcaaccgccattctccaaatctgccggacaggggaattctcatgagacaaagatgaagccgaacggcacgcgtgtgggctacgcagatgcactggcacgtgaatgtaataatccgtgggcggcagcttatgcacgcacgatattggaaaaagaaccggacatcatgaagaaaacattcttaggtaaatccggcgacttgacttggtaccgctgtactactaaaaaatcattgccgaaagaggaacgttcattggctgagctccctatgacaaaagtattcaacgaaacgggaatagcaacgatgcatacttcattgggagatataggtaagaatgccatgctttcattccgttcgagtccttacggttccacttctcatgcactggctaatcagaatgctttcaacacgttctatggtgggaaggctattttctacagtagcggtcatcgtaccggttttacggatgatcattgcatgtacgcctaccgcaatacacgtgcgcacaatagtattctggtcaatggtatgacgcagaagataggtacggaaggatacggctggattccacgttggtatgaaggggaaaagatttcctatatagtgggtgatgcgtccaatgcgtacggaaaagtcactgctcccatttggctgaaacgcggtgagctatcgggtactcaatatactccggaaaaaggatgggatgagaacaaactggatatgttccgccgtcatatcatccaattaggcaatagtggcgtatatgtgatttatgacgaactggagggtaaagaggctgtaacatggagttatcttttgcatacggtagaacttcctatggaaatgaaagaacttccgaacgaagtgcaagttacgggcaagaataaggcaggcggagtatctgtagctcaccttttcagttcggctaagacagaacaggctattgcagatactttcttctgtgctccgacaaactggaaaaatgtaacgaacgcgcaagggaaagctctgaaatatcctaatcactggcatttctcttctacaaccgttccatgcaaggttgcccgtttcttaacggttatggatactcatggaaataatcgcccggatatgaaagtagtccgtaacggtaataccgttcaagtcggagattgggttatcaactgcaatctggccgagaaaggaaaagccgctatcactgttaccaacaaatctgaaaaggtttctttgaactatgatgcaggtaaaaaggaaggtgcaacaattgtaacagatcagataaaaggcaaacagatcagtaaagtactgacggattatttgccggactttgaaatataaaaagaattaattaaaagatacaggagggtgttcgaggacactctctgtattctccacgatgacaacccaatacaattcacgaaaaccaacgaactaacatgtatggatttaaaatttcaaagcccttcaccttttcgccataacgtcctgttcatcgtcgtttgcgggtgaagggtcttcccctcatcagtctttcacctatcatagaatctcggaaacgcttacatagaatcgcagagacgcttacttacatctcatccgaatagcgttccgtatgaatagggcgcatactcagccatgttttactaatagacaacttcttcttccctatagccaaacttctcttcatcagtaactaaatctcggtttgactagtcgcaatctataaacgaagcctttgattataaaaacgaaggttgcatttatataaatgaagcctttgtttttataaacgcaatcttcgtttatagtttcattgccgcaaaacggaagtttagatataatcataaggaagttaggatataagagaacacaagttttactacaataaaaagcattcaaagctacgcacaacgggagcagtttcaaactttattaaatatattcctatattaaatatattcattacctttgcaatcatagccaacataatcatctcatacaattatagatataacaatgaaaaaaataggagcacatgtaagtgcatccggcggggtagagcttgcccctgtcaatgcgcatgaaataggagcaaacgcgtttgctttgttcaccaagaatcaacgccaatgggtaagcaaaccattgacggaagaaagtatcgctctcttcaaagagaattgtaataaatatggtttccaaccggaatacatcttgcctcacgacagctatctcatcaatttgggacatccggaagaagaaggacttgccaaaagccgtgccgcttttctggacgagatgcaacgctgcgaacagcttggcctgaagttattgaattttcatcctggaagttctctcaataagatatcaatcgaagactgtttatcccttatcgcagaaagtatcaatctagcgttagaaaagacaaaagacgtgacggccgttatcgaaaatacagccggacaaggcagtaacttgggaagcgaattctggcaactaaaatatatcattgaccgggtggacgacaaaagccgggtaggtatttgtctggacacctgccatacttatacggccggttatgaccttgtcaacgagtacgataaggtctttgatgaatttgacaaggaagtaggtttcggttatctccgtggaatgcacctgaatgattccaagaaagcattgggcagccacgtagaccgccacgacagtataggcgaaggcctgataggaaaggctttctttgaaagactgatgaaagatcccagattcgataatatcccactcatactcgaaactccggatgaaagcaaatgggcagaagaaatttcatggctcagaagcattgaataatccggtcaataaatatttgccatgctgaccaaaggttcatatagtttctcgatatcttgtgaatccatttctatctgaacctggtcacccggcattaacgtttgtcccttaggcgcaaaatctttcttatcccgatggacattaatgataatgcaacgttccggcagacgaagttcatctacaattttcccgtctaaataagaaccgctcatcacctcaacagacaaagtatagcgtgtttcctccttaaatgcgggcgaatgaatcatatcttcatataaagtcacattaaggggttttatctggagcatttccgtgaaataataagttaatcctcctacaacaatcgatggatagaatacttccagatgtcctgttatctccgttatcaagacgatagcagtcaaaggagtacggacgactgccaccagaaaagcagacatacaaatcaacatgatataactaatattctcataggcaatgactccctgttgaaccataatcaaggctataatttgcccaagcagtccgcctgtcactaatgtaggaatgaaacttcctcccggcaatcccgaagaaaaggaaaaaatactaaagaccaagtgtaataacatcatacctacaatccagagaatatgcatatccggatgcatagcctgcgaaagcaagaactgttcccctcccccagtcagattgacttcagccatagaaatcatgaaagcaatgaaaagcagatacagcattttcacgtattccgggtgcttaatggcaggataaatacgtttcacctgaagagtagttatagagaacagttttccgaaaacagaaataacagcagccagcaaaagaaacagtttcacttgcgaccaaaacgtcatgcccggcactatcgcatctatctggaaataaggattaatcggaaaaatccaactggcaaccccaccggctactacccccgccaaaagagttgtaatggcggttttcggagcgtcaaaccgctctatggactcaataaccaacagcgatgaagccaacggcgcagcgaaagcagccgccaacccggcacctgcccccgcagacagcaattgtttccgctcaccggcaagcactctgccccatttggaaaccaaacagcctacataggagccgatctggacggaaggtccttcacgccctaaagaaagtcccgtactcaatgcaagtattccacccacaaatttagagaccaattcaatcagaggatgtttatattccaccctcccgttaatgacacctcgtgtctgcggaatacctccccctgttatcaaaggcattttcttgaccagccaagaaacaaataccagaatgccccacatcaatagaaaaaggaggatataccaataccatttggggtgagagttgaaaaagtcgtaacgtagattgaagaaatattgaagcaaataatgataagggacagcaataagccccgtcagcaatccaacaaagatactgacgaagtaaagccgagcatcaatcaatttcagtttgaaaattcgccaacggccgtcatcttttattttttccatcaatctaaacatactaccactcttcaccgttttatacgcatgacatacaacaaccaaaacagggtagtggtttcagacaaatgaagatttaatttccattcagcgtcccatcagattcaagcgtagaatagcgtgtaccataaaataagaacccaacgcattgtaatccgtatcacggatagcggtagcggtaatggtacgtatcattgaaacatcctgacggagcatatcatatatcttgaaacggagcaacaattgtttccgcttcaagaaggctttcgacaactgacaattccacatcagattctcccgagcataaccttcgtagccatagccggaacgttggaaataggtaagatcggtatacaattccattccccaagggagataatattgtacttccgtcccgaaacgataatcatacgtttccgtacgcgtctctttcacattgttatgcgaattattataaagcaactcggcacgtgcgctgatctccatctgctttgtccgatatgttaattgcagacgttgacgggcagtaagatgtttcacagtacttttcacgggagcttctttattgatagtggtatacccgttctgattccggtattgcagatacgagtaggtgcggaatatccagcttcggtttctaaaaggagtgttgagggagaaagagccccaagcccgccaattcccgttcagattgagtggagtcgtagtccgtacccccgtttcgctatcatacgtcacttgattggttacgctattaatcgtgttttcaaccaaagcggtggcaaccatattccgttgacgtttcatattgtaggaattgaaattcaacgtaaatgtatttatataagaaggtttcaaagaaggattacccacccggatgttcaaaggattggtacgatctgtcacaggctgcagatcacgtatattgggttggcgactctttccccgatatactatttgcaaacgggtgcgcttggagaacttataacggaaattgacggtaggagagaaattaaaaacagatctttccaattgattttccggatcatctttcaatacggaatggctcacagacttctgaggttcaaagtcggcacctatattatagttatatttctttcgggaagtgcgaaccgcaacattaaacaagtgattgctatactgattttcgaaacagttgcttgcctcttcatcataatcgggagtaaattcgtccagatccttatcccaattgtaaacgaaatgatcggaattattcgcccgatactgataactgtaacggaactgaagaaaatgcaaccaaggtaacggctctacatagaccagttgcacccgataattatagccgtctatttcgtcttctatcttttgattctgaactttttccgtattgttcttaaaataatgcgtggtagaaagattctttctgtccgttgaagaggcattacttccataatccactttcaaggctatatttctccccatccgactcagtttacggctgagttgcatcatcatcgttacattgtacgaagaattatgattggttccggatgactctttctcattaagcaaaacatcattcccccacccttgctggaaactaccgttacgtctgtcattcgcggcagtacggtattggggccgaaagattaaggttgtaacagaatccatcttccattccaaaaacgcatttgcgatcagattgtcatttttcaggcggttgcgccccgtactttgcgttatcgacttatcttgacggagaaagttatcgattgtcgtacggctatcttccagcctgtccgtacctacatactgaatattcgaacgaaatttaacgcgttgccaatcgtatgtagcgttaatacctaaagaacgggaagtagtcagtcctttttgtgtacgcaggttaccgctggagactgctgattctttttgcatctcagagaatccctgattattcgtattattcaggtttccgataatagtcaattgggagttgtctcgaaaacggttcaatgtattggccagttcataacggtctttgcttccatatccacccataaaattctccatccagccgagtttcatattctttttcacagacagatcgagaatcatttcttcctctccgtcatcaatccccgtaagacgtgccaaatcagacttacgttcatacgctttcagcttttccaccatttccaccgggaggttctttaatgccgctttcggatcgtcggaaaagaactcctttccatctaccagaatcttcttcacttcttttccatgaatcaacaattttccgtccgcatctatctctccaccgggaagttgtttcactaaatcttccaacatcgaaccttcgggagtacgaaaagcagacgcattaaagacggttgtatcttcttcggttaccgccataggcgcttgtcctaccacaacggtttcatccaaagcaattacttccggagctaaaggtatatcgcccagattatttttatgaccgcccgctacaggcgatacttcccgataaaccgcagtgtatccgataaaagagacatgaagcaacaaagacttatttttgggagcggcaacggtcaatcggaatttaccttccgcatcggttgcccctcctaccaatagggagctatccgataaagccaaaagccggaccgtagcaaacggtaccggctgataggtttccgaatcaacgacacgtccggagaaacgctttccaccggactgcgcataagcagccaaactgataatcagcaagaagacataacaactaatcaaacgccgctgaaaaaaacaaatatggctgcctatgttcaattttgtgtcgatgtagtaaaataaaactctaataatgaacctaatctttatttttcaccttgacgcggagcacgaggcttctgtccctcatggtgtccttgtcccggtttacgtcctttttttctacggtcaaattcttttttgaatttattcgcattgcttttctcctgttgatagatcttcataatctgcttctgagaaagtatcttgctgaactcgttataatacttttcacgaatatccaacattttgcgactctgagcaaattgattcttcaacatcgctgctatctccgcatcagtcatagacggccgttgaccttctcttttagcatttgcttccgcaccttgtgctttttccgctctgggcttacggttcatcatgcgacattcacgcaattcgttcagatatttctcgtagacaggagtaaacttagctgctgttgcatcatccaacatcaacgttttaaccatctgattggtctgcatctgcaccatttgttcctgcgtaggacgctgtttcttttctctgttatcattgttttgagcagaaaggctcatctgactccccaacaggagagcacccaaaagtacataaataaatttcatcttcataatctttacgttttaaataattgattgagttacttaatttaaaaatatatcgttttcagagaagctgacgagctcttccaactcctcatccgacaattctttaatccacttatctaccacgtccgtgccattacttctatcgacagccaatatcgaagaaggcgacttaacgtcatttatctgacgcaaggacggaacgaataagaatccggctaatattgccgccatcgtaacaactgcagaaacaatcagtttcaaatgtgacttccgccgttgctttactcccgcacgctccatcactctccgttgcatatcttcgaaaaagccatcaggagtacggtaaggggtacgttttccaatatcgtcaaaatcaaaatcctttttcattcttctatctgtttaatatgtattcctttattttctctttagcataatggtagtttactttaagtgtttccactttactgtccaagattcgtgctatttcttcgtattcgagttcatcgtaataacgcaagttgaacacaagacgttgtttctccggtaaactcaaaatagcttcctgaaatttcacagccaactcattctcgtaatcaatgtaatcagaagcttgcagcttgtttattaattcctcttgaatctcttcggaggcaacgtttctttcttctttacggtcattcagtaaacgcagactttcatttgtcgcgatctgataaatccacgtactcaaagaactttcactacggaactggtctaagtgccggaacacgcggataaacacttcttgaagtacgtcctctgcatcttcatgggatacaaccagtctacgaatataattgtatatcggttcctgaaaaacgtccatcaacatcttgaatccccgtccgcgattcgaggcacaagtttctctgattttattctcatttatcatcgattctttttctgaactttgtctattagaacgcataaaagtgtggaagttaaatacagaatcctgctttttgcttttattaacgagtgaaggatatgaaagagaataataatatgataaaaaaacgtctccataagctctaccaagagcatgaagacgtttcggatatccggatagattgttagtctgtaaataaaagaaaagactgttaccagaatttattgtgttctgcactatattcaaaacctgcggcttttaattgacctaccagctcttccttatctacatccatatcttcacaaagttcatcaagcgaagaatagcaatcccgcaatttcatattgataacgctaaacagcatcatcggatctttaggtaactccataatatacaatctttttaaaccggacgcaaagttacagtaatctcattgaacggcaaaacaaatggtatcgatatataaaaagaatgcagtgattttaaccgattattcagttttatttttatctttgtaaacaatattggggctatacccaaacaataaaaagatacagatatataataaattcaattataaaacaacttatttattggatatatgtcaatatggagcagacttataggaatcggaaaagatgaggacaccaaccatgtaatcaacaataaaaatacatctgtgccatttgatgtcatacgttatgccatagtagatgttgaaattggtttgaaagatcataaaatccatgatattggggcactccgtcatgatggtgcaacatttcataaatcttcgaaagaagagctgttcaaatttcttggtgatacagactatatctgcggacataatatcatccatcatgatgcaaagtatctgtttaccgataaaacattccactgcttctttgtcgatacactttatgtatcacctttattatttccggaacgcccttatcataagcttgtaaaagatgacaaactgatcagcgagcagatgaacaaccctgtgaatgattgcgaaaaagcaaaagctctgctactggacgaaatagcacgttggaattcgctgccggacgaaaaacgtacgttatttgcatcgttactaaaaggcaagacagagtttgaaggatttcttagtatggtaggtgcgaaatatatcaatgaaggagtacccgatctcataagaaaactttacgtgaataagatctgccagcatgctgatattgagatgttaactgaacggcgtccatgtgaattggcatacgctttggctttaattgacaccaccgactaccgctccatcactcccggatgggtactgcacaattatcccgaagtagaatttgtcgtaaaactcctgcgtcataacagttgcagcgaaaattgcgtttactgtaatacgcaactgaatgtgcttcataacttgaaaacattctttggatatgaacaattccgtacatacgaaggcgaaccgcttcaagagcaagctgcccaagcagcagtaaaaggcaaatcactattggcaatatttcctaccggtggaggaaaatcgcttacttttcaattgcccgcacttatggaaggacgttctgtgcacggactcacaatcgtcatttcgccactacaatcattgatgaaagatcaggtggataaccttgctgatagaggtattactgatgcggtaactatcaacggattgttagatcctatcacaagagcactatcaatacaaagagtgcaagacggagaagcttcacttttgtatatatctcccgaaatgcttcgttcaaaaaccattgaaaagattttaatggcacgccatgttgtgagattcgtaatagacgaagcacattgtttttcttcatggggacaagatttcagggttgattatctctacataggcaaatttatccgagaataccaacaaaacaaaagatgtaaaaaaccaatacccgtttcctgcttcaccgctacggcaaaacagaaagtggtacaagacatttgtgactatttcaaacaaaccttgaatttagatttagaattatttgcatcaacggcttcaaggaccaatctgcgttattctgtcatacatgccgaaaataacgatgacaaatatttaaaactgagaggacttgtagcagaatccgattgtcctacaatcgtttatgtatcacgtaccaaacgtacacaagaattggctgccaaattgactcgtgacggttataaagcattgccattcaatggcaaaatggattctgaagagaagattgccaatcaagatgcatttatgaatgaccaagtacgcatcatcgtggcaacatcagctttcggtatgggggtcgacaagaaggatgtcggacttgtggtacattacgacatttccgactcattggagaattatgtgcaggaagcaggtagggctggccgtgatcccagcctcaacgcacgttgctatgtgctttatagtgataatgacttagacaagcattttatactgttgaaccaaacaaaactaagtattagtgaaattcaacaggtatggaaagctgtaaaagatctcaccagacaacgcatgaaagttagctgctctgcactggaaattgcccgacaggcaggttgggatgattctgtatccgatattgagacccgcgtacggacagctttagcaactttggaacaaagtggatacttggtaagaggcaataatgtacctcatgtatatgctacaggtatcacagttaaaaatatagacgaggcaagaaaacgcatatcagcgtcactactatttggcagtgacgagatagagaaagccgtcagaatcatcaaatcactgatttcacagaaacatattgccaaagcccaagattcagaagctgaatcacgaattgattatctggcagatatactggggataagcaagagtgaaatcatatctgttgtggagagaatgcgacaagaaggtatattggcagacagtaaagacatatccgcctatttgttagataccggtgaatcggaacgaaaatcgcgcacgctcctcgaacgttttgcgaaacttgaacaatacatcctcaatcatattcctgacaaatctttacggacatcatgcaagcaactgaatgacgatgcaacaaacgacggtatcaatacatctaaagaaaaagacatccgaacgttactctatttcctcacagtcaagggatatatccgtaagaaagaggatgcggttcataatatggaaatcagccgtcaaacagatatggaatcaaccatcaaacgttttgaaaggcgattggaaatcagccgtttcacagtggaatggctatataagttgaccgctgatacagaaaagcaaatctcacaaaacaaagctgttcagttttctgtagtagaacttctaaatcaaataaagtcaaatccccagtcccttttcagcgggcttgacaacatacaattggaagacgtggaggaagcacttctttatctgtcaaaaattggtgcgctgaaactcgaaggaggtttcctggtcctttataatgctatgaatattcaaagaattaaggacaataaatcgagatacaagcaggatgactaccaaatgcttaatgaattctacaagcagaagattcaacaagttcatattgtgggtgaatatgccaatctgatggtaagagattacaattcggctttacaatatgttcaagactatttccaaatggactacaagaagtttatcacaaaatacttcaagggggaaagggtcagtgaaatacagcgtaacctgacaccacagaaatacaagcaattattcggtcaattatccaagcgccaaatggagatcatttccgataaagattcacgttgcatcgttgtcgcagcaggtcccggcagtggaaaaacacgtgtgctagttcacaaactcgcatcactcttactgctcgaagatgtaaaacatgaacaacttctgatgttaacgttttcaagggcagccgcaaccgaattcaaacaaagactcatggagctgataggcaacgccgcccactttgttgagataaagacatttcactcttattgctttgaccttttaggaagagtaggaaatcttgaagataccaaaaacgtcgtcgcagaagctaccgaaatgattaatcagggagaagtggaacctaacaaaattggtaagacggtgttggtcatagacgaagctcaagacatgagtactgacgaatataagcttgtaaaggccctaatgaccaataacgaggagatgcgtatgatagcagtaggcgacgatgaccaaaatatctatgaatttcgcggatctaattccgaatatatgcaccgactgacaaaggaacccggaagcaagtttttcgaaatgactgagaattatcgcagtgcgcaccatctagtgaatttcgccaacgaatttgtgaaaagtatcggtaaaagaatgaaaagcaccccaatcacctctatgagaaaagagaatggttgggttggagtaacatactatcaatcaaaatatatgtatcagccactcgttgaagaattaattcaacatcaggcgaatggcacttcgtgtgtactcacccaaacaaacgaagaagctgtaatattagtagctctcttacgaaaatatggaataaacagcaagttagtacaatctatggatggtttccgtttttggaatatggccgaaataagatatttcctgaggtatatagacaaacgggcaaaaacacccctggttccggaagaattatgggatgatgccaaacataccactttttccacttacaacggaagtcaaagtttggtgtatgtaaagcgttgtgtggaactatttgaacaaatcaacaaagtaaaataccttagtgacttcaaagagtttgtatttgaatcatcggtagaagatttctgtaacgtttcaggtacagatgtcgtgatatcgaccattcataaagccaaaggcaaagagttcgacaatgtatatatgctcatatctgacaattatttgaaagatgctcacttgatgcgccgatactacgtgggaataacacgtgcaaaaaacagactgtctatacatacgaatagcaattgttttaatcatttaaatgtagaccagtattttattgactccaaagagtatgcaatgcccgaagagattgttctacaactctctcataaagatgtctatctgggattcttcagaaaacttaaacgagagatattggcattaagaggcggagatcttttaaactacgacaatttcgtcttgtatgattcattaaccaataaacctgtagccaaattatcacaaaatatgcagaatacattggcggaatggaaagaaaaaggatatgaagtaaaatctgcctctgttcgattcgttgtagcatggaaacctaaagaagcaccgaaagatgaaccagaaacagcggttctattagccgatttacttctttcccgataataccaaatataaagaaaagtaccgcaagaaacttctaaacgcaaaaagcgtgcaactcgttgagctgcacgctttttgcttattgtttattatctgtatccttatcggaatcatttgactacctcaaatataaagtatattgataatcagttagttactgttatcaagatacaaatgatatgcaaatgtaagtataaaaccatatagaaaaagtacaaatggacattactttgtatgataacatccttttctacagattaagggttaacacaatgttatactactgatattcagcatattgaagctgttcttcctt

SEQ ID NO: 12008 - DNA, 2398 bp, Unknown
  gut microbiota DNA sequence
actcgaactcgcgaccctaaccttggcaaggttatgctctaccaactgagctatttccgcattttttcgtttgcggttgcaaaggtaggcattttccgtaaacctgcaaacattctgcacacttttttcaaagaaatctgctcaccttgcacccgatgcaaaacaatcaatttgattatcaactcattcggtcacgataatcttcataagaaaattgcttgtatatttcagctttcccctctttggtccagatagcaatggcaggatgatgaattccgttaaacatattcgttttcaccatcgtatagtgaatcatatcttcaaacacgatacgctctccgatttgcaacttgtgatcgaaactccacagtcccatatagtcaccactcaaacaggaatttcctccaagacgatagatgtatttcccctcatttcccatctctgcaccactcacggcaggctgatatggcatttccagacagtccggcatatggcaggtgaaactgacgttcagaatagctgtcttgattccacgactttccacaatatccaccacctcggaagccagtacccctgtctgccaagtaaaagccgatccgggttccagaattatctgcaagtgtggataacgcgttctcaattccttcaacagttttatcaaatgctcagtgtcataatctttgcgtgtcatcagatgtccgccccccagattcaaccatttaatctgcggaaaccaacgggaaaacttgctttccagatgttccaatgtacgttccagctcatacgaggaggactcgcaatgacaatggcaatgaaaaccttcaattccctgcggcaatgtttccggcagcaagtctgccgttattccaaaacgggtacctggcgcacatggattataaagttctgtttccacttccgagtattcgggatttacacgaataccacatgagataccgcttccttcggtaaccgtcatcgaatagaaacgttcgaattgggccatcgagttgaatgtgatatgactactacaacgcatgatttcaggaaaatcctgctccgtataggcaggagaatacgtatgtgccttgctcccgaactcttccagcgccaaacgagcttcatacaccgaactggctgttgaatgacgtatgtattcacggaatataggaaaagaacgccacatggcaaacgacttgaaagcaaggataatctccactcccgccctgtcggctacgcttttgatcaatgtaaggttctttcttaagagttcttcttccataatataacaaggagaagggaactgtgcaaaatctatcatcatactatttaaattttatctaaaattccaaagtaacgcctcaatgacgcggatgcaaaaatacaaattcaaaagcaaagagagattgttttatttttaattaagatattgcttttcgagaactttttcctatttttaagccttatattatttataagtagttgtatcatcctaaataactgattgaatatgaataaagatttaagaaaagtagtgattctgctggcacatcccaacattaaagcctcacaagcgaacaaggcattaattgacgctgtcagtgacatcgagggagtagcggttttcaacctttacgaattgtcggaagatatcgctttcaatgtcgacgaatggagtaaaatcatctccgacacttcggccgttatctaccagtttcctttctattggatgagcgcaccgtcattattaaaaaaatggcaggacgaggttttcacattcttatccaaaactccggccgttgccggaaagccattgatggtagtgacaactaccggttcggaatacgaggcctatcgcagtggtggacgaaaccgattcactacggacgaacttttgcgcccttatcagggaagtgcaattcactcgggcatggtatggcagacccccattgtgatatatggaatgggaaccgcggatgcgggaaagaacattgccgaaggagcgaacttgtacaaacaaagagtagaaatgcttattaacagcagtaatgcgggaaataattggtaaaaacaaaagcgtagctttatccagtctaaagctatgctttagcatacctaaagcacagctttagaggaggtaaagcatagcttcttcttcagtgtcagtacgggaaaaaaaacactccgacactgacattatcaacccgccaatagtgcctgccgccaacgggaaccagaattcctccttttccgctcctaccataaaaggaataaatcccaaaacgatagaagcaactgtgaggaagataggtattatctttgtattccatgccttcacataggtccgtaacggtgcaagacacggaaaacgcttacgaactgcattatattcattcaatat

SEQ ID NO: 12009 - DNA, 388 bp, Unknown
  gut microbiota DNA sequence
attttcccaaaaataaatcctatatatttgcacacaaacgattaacatatatcattatggagcagaaaaagacagaatatattaccttgcatctgattgttttcggaacaatcatcatcattggtgttttagcccgtcagaccgcactacactatggttgggacgagttcagcagctaccttatttttatggtatgctccattgtcataggtgcaatctatcttaatctgcaaatggtattcagccaactcctttcaccaacaatagagaagtgctttataagatttgagtgctatcgcaataaggttatagcggtagaaactccagtggtacacacggaacttgccgaaagaaccattatttcagaatccatcatttctgaacccga

SEQ ID NO: 12010 - DNA, 497 bp, Unknown
  gut microbiota DNA sequence
aatggctcccgaacgggtgtaaaagctgtctgccgttgatttccgaccgtattcagtcctgcatccccgaaacatttatccagtttggagaaactaaaattgcggtctatctccgaacccttgaacgtgtattcgcctttggaaaaggaaacgccctgtatctcgcccgtctgccccttgtacttgaaccggacagtaatacccttttccgctaaccgctcctgtaactgccgccagttcttgaacttcccgatttcgttctttacagccgtgtaaatctcgtatttcgacttgtccggctctttcaagcggtgctgctttacctgttcttttccaccagcaaaataaagcccgtgtttggttttcagcttcttgcatacctgctcgttacggtacatatcgttcctgtccgaaatggtcttgccgttgttgtctatgcggttgaacacgatatgcacatgtgggtgttcccggtcttgatggcgcacgatgatata

SEQ ID NO: 12011 - DNA, 539 bp, Unknown
  gut microbiota DNA sequence
ccccttttggcggtggagaacggctgcatcatttcaaaggatgcggacataacggtggctttcagggtggaactgcccgaactgttcaccgtcaccagtgccgagtacgaagccatacattcggcatggtacaaggcaatcaaggtgctgcccgactactccatagtacacaagcaggacttcttcatcaaggagaactaccagcccgacacggaaagggacgagcttagttttttaagccgctcctttgaacggcacttcaatgaacgcccgttcctgaaccattactgctacctgttcctgacaaagacgacaagggagagaagccgccgacagagcgacttctccaccctatgccggggcaggattgtaccgcaggagatagccgacaaggaagcggcggcaaagttcatcgaagcggtcgggcagtttgaaaggattatgaacgacagcgggtttgtcacccttacccggctggcggcatcggaaatcaccgggcaggacggaaaggcgggcatcatcgagaaatacttctcgct

SEQ ID NO: 12012 - DNA, 285 bp, Unknown
  gut microbiota DNA sequence
gatgattggaaaaataaaaaagggaagcgggtttaagggctgtgtgaactatgtgcttggcaaggagcaggcggttttgcttcatgcggacggggttctgactgaaagccggggagatataatccacagcttctgtatgcagaccgggatgaatcccgacttgaaaaagcctgtcggacatattgcgttgagttattcggcagtggatgcgcccaaattgacagatgggaagatggtacagcttgcgcaggagtatatgcgtgaaatgaaaatcaccgatacgca

SEQ ID NO: 12013 - DNA, 276 bp, Unknown
  gut microbiota DNA sequence
taacacgattaggaagaacgtgcgcagcgtgtctataatcagccccgccgcctgaaagagcatttccaataactccctgaaccagtcccggacggacttctttatattataagccgtcctgtccatgtacatgcccgtcatagtcaccatgtcggagggcgaccagcccagttcttccagttgtcggtcaaattcctcgtccgatgcgaggtaagccgtttcggggcttcgcatcagggcttcatattccagtcggtctttctgcgcccggtactc

SEQ ID NO: 12014 - DNA, 1288 bp, Unknown
  gut microbiota DNA sequence
tactaaaagttaattaagaagaaacagcacttattgaattaaaaacagaaggcatcccaaatctaattgagatgccttacatataccaaaagtatcagaaagttataccttcttcaaagcctcaatactttctttcaaagatttgataatactttccgcatctgcctgtttcttacgttccaattcaagaacagccgccggagcattattaacgaatttctcgttgctaagttttttcagcaccccttgcaagaacccttctttgtgtttgagttccgcttccatacgggcgatctccgctttcacatcaatcatattccccaatggaacggcgaattcagttgttccaatcatgaaggaagctgcaccttccggcttgctctccactactgtaaaagaagaaagattacacatcttaatgataaccggattcatcttctctaccggatgactgcctacaacctgcaattcaagttgttctttcatggcaatattcttctgcaaacgaatactgcgaacattactgataatttccttagcaacctcaaactcttgcaggaatttctcattcacttcattcggctcgaacatttgggttaccatcaagctagcccccggtttacgttcacgcagttgctgccacagttcttctgtaataaacggcatgaaaggatgaagcatttcaagcagacgttcgaaagagctaagaaccatatcataaataaaaccatttacaggttgcccgtaagccggtttcactatttccagcaaccaagaagaaaattcatcccagaacagcttataaaccaacatcaacgcttcactcaaacgatatttagagaaaagatcagctacttcaactgccgccgcatccaatctttgatcaaaccattgaacagccaaatgcgcatcagcgggaatgggaacggaccccataccgtttgtccaccctttaatcagacggaaagcattccatatcttgttgcagaagttacgtccttgttcgcaaagggcgtcgtcgaaaagaatgtcgtttccggcaggagctgaaagcatcatacccatacgtacaccgtcggcaccatacttttcgatcagttccaatggatcgggagagttaccgagcgatttagacatcttacgtccctgtttatcacgaacgattcctgtgaagtatacgttcttaaacggcatctgtccctcgtattcgtagcctgccataatcatacgggctacccaaaagaagataatatccggtcctgttacaaggtcgcttgtcggatagtag

SEQ ID NO: 12015 - DNA, 313 bp, Unknown
  gut microbiota DNA sequence
tgaactggatagtgatacccttttccgctaacctgtgctgcaactgctgccagttacgggatttgccgatttcatttttcacagccgtgtaaatctcgtattttgatttgtccggctctttcaatcggtgctgcttcacctgctcttttccctcggcgaaataaagcccgtgtttggctttcagcttcttgcatacctgttcgttacgatacatgtcgttcctgtccgaaatggtcttgccgttattgtctatgcggttgaacacgatatgcacatgtgggtgttcccggtcttgatggcgcacgatgatata

SEQ ID NO: 12016 - DNA, 1364 bp, Unknown
  gut microbiota DNA sequence
ttggatggcgttgattttgtgaccggagtaaataatctgacttataaagcctacattgattttgcttctgcaaacggtattgaatatgtgatacttgacgaaggctgggcggtaaatctgcaagcggatttgatgcaagtggtgaaagagattaatctgaaagaattggtagattatgcagcctccaaaaatgtgggtatcattctttgggccggttattatgctttcgagcgtgatatggagaacgtttgccgtcattatgccgacatgggagtaaaaggttttaaggtcgattttatggatcgtgacgatcagcttatgactgcgttcaattatcgggctgccgcgatgtgtgctaaatacaaactgatcctcgacttgcacggaacgcacaaaccggccggtttgaatcgcacctatccgaatgtgttgaactttgaaggtgtcaatggtttggaacagatgaaatggagcccggcttcggtggatcaggtgaagtatgacgtgatgattcctttcactcgtcaagtatccggtccgatggactacactcaaggggcgatgcgcaatgcttcgaaaggtaactattacccttgcaattcagaaccgatgagtcagggaactcgtagccgtcaacttgctctgtatgttgtatttgaatctcctttcaatatgttgtgtgatacgccgagcaactatatgcgcgaaccggaatcaacagaatttattgctgatgttccgacagtgtgggatgaaagtatcgtgcttgatggtaagatgggagagtatatcgtaacagcacgccgaagtggaaatgtctggtatgtaggtggaatcaccaattggacggcacgtgacgtcgaagtggattgctctttcctgggtgataggacgtatgacgctacattgtttaaagacggagcaaatgctcaccggatcgggcgtgattataaatgtgaatccatacggataaagaatgacggtaagttgaagattcatttggcacccggaggtggttttgcactgaagatcaaataatagttactttagggtctatattctatctaaatattgaacggatttgatgagtctgaaaataggtgggagtgcgtcaaaacttttataaactaaaaatcaccctcgctacaggtagttgtaatgaggatggttttggcaagatgtgagttctgtcccatttctattatcaattaacttcctattgtttacagctttcctgtgtatcattcaccttatatcttattgttttcccttactcatagccattccttcctgttactatctgcgttgttgcaccagagtgaacagatcgtagcactctagtgaacggttctttccactccagt

SEQ ID NO: 12017 - DNA, 452 bp, Unknown
  gut microbiota DNA sequence
gctgccatagcgtcttcgtaggaaatttccggagtcgggttggccagcgcaaatacgataggcatgggggccatgctacgtaccatatcttgactcaacacgtttccttttgacaggccgagaaatacgtctgcacctttaatggcttctgccagtgtatgtatgtccatgcggtcagttgcgaaatatttcttctgttcgttcaggtcagtacgtgttttgctgataacacctttactgtccagcatgacaatattttcgagacgtgcacccagtgacacatacagtttagtgcaagacacggcagatgcaccggcaccgttcacaacgatttttacatcttcgattttctttccggctacttgcagggcgtttaccaatccggcactggagatgatagcggtaccatgctggtcgtcgtgcatcacaggaatatccagttcttctttcag

SEQ ID NO: 12018 - DNA, 298 bp, Unknown
  gut microbiota DNA sequence
aaataatggctgcaagcaggataatcgggctttccacgaagaagtcgccctgcttgcttatccagcttcgattgaggttaagcataatcgtgtagctggcttcataagcatccgcaatgtccgacatgaagctggcgtttatagggttacatcggtggctcttgcgtgggtcgtcaaagttgataacgtaaaatttcggcttgaccttgtagccgtccaagtggttaagcaaatgattgtaagcgatttccgaaaggtcaggaaacttataatcatacaggtagagcgcaaaaccttt

SEQ ID NO: 12019 - DNA, 12326 bp, Unknown
  gut microbiota DNA sequence
cagatgtattgtacttatctgaacacatatcaataaatgcatcccaataatcttctgcaagttcatgtccctcacccattaccaactgtccgaaatgactggcacgttcaaagtaagatttcgcttccgcaggttccggttggtcatcacgattatgctcacctgcccaaaacaaatagacacgcgccaaaattccccatgcggcagactttgaaatacgattaggcttatatcccagatctttggctgaaagtaaaccttcatcggctgcctcttccatctctttcactataaacttataaatcacatttttgtcggtacgggcaatatctttgtcagttacagtaccggatgaataagtagattccaatttcaaaggaacatctccccaacattgaaccagattaaagtaatagaatgcacgcaggaaacgagcctccgatttatattgggctgttttttccgcactcatactcggtacattgtcaatatgttcaagtagcatattcgcacgttcgataccactatacaaatccgcccagaactgtgtaacagcagcgtcactggttgtcgtattgttacaaatcaaacctgtattagaaatacgtccggtagacccgccataaaattccaagtcgtcaccgcctgcaagaaccatgtaatcattaccataaaaagaggtctgcgatagatttgcataaataccggtcaggaaattggaaacttccgtttcattttggaagtaattttccggagtaatcttataaggctccttttccaaaaagtcacatgaggccatcgtacatgcggctaccaaagaaaggaatgttatttttatcgttttcataaattcttatttatatctattatctgatcaaataatattaaaatcctaaattgactccgaagttgattgcataagctctcggataagcagagtagtcaagtcccggcgttaaagcaccgttacggatagacacttcaggatcataaccggaatagccggagattgtccaaagattctgccctgccacatatacacgggcattgccgattccccacttcttaattactttcttcggcaaagtataacctaatgtcagagttttcagacgtaggaaagaaccgtcttcaatcacacgcgaagaaaccactttattagaacttgagttcttggcaaccggaatatcactatacggattttccggagtccaacggttggcataacttgcatattggttcaaattacgtgagttgttcacgttttcaaagaacaaacggttggcattcaaaatatcgtttccataagaccattggaagaaaatactcaagtcgaatcctttgtactcgaaatcattcgtgaaaccacccgtatgaataggtaagccacgtccgatcatcgtacggtcgttggtatctatcacaccatcaccattcagatctttatatttcggcatacccggctgtgtattactttcgctggagaagtaaggaacacccggacgcaacacatacgtatcacctgatttgtagaaatcctcgtatttataagtaccttcatactgataaccgtacatcatacccattgaataacccttcttggcaatataagtaggttgcgtattgtaggcctggtcgaaataagcggcagtcagcaatgatgtctggttttcagccagctccagcacctcattcttattgaatgcaatattgaagttagtactccatttaaaaccgtttttctggatgtttactgtattcaaagtaaattccacacccgagttacgtactttacccacatttttcattgcactcttgaagcctgtcgtgtaagacaaatcggcatccaacagcaggtcacgggtagtcttcatataccagtcaacattgatcccgatgcgttcgttaaagaagcccagatccaaaccgacattccattgttctgttgtttcccatttcagatccttatttaacaaggagataggcaccataccgatactgttcaggttattctcaaacggatatacacctgtctgaacattatttgaagttgccttcaacattttcaataaagcatacgtttcatactcgcctacacggttgttacctgtcaacccccagcttgcacgcaacttaccgctagagatgacggatttatatttgctcatgaaatcttcttcagtaaagttccatgccaaagagcctgaagggaagaaaccgtaacggttctttttagcaaacttagaagaaccatcgacacggaaagacgctgtcgcatagtacttcgatttataattataattcacacgccccaaataagacatcatagaccatgaagacttctccgagcttgtagtagcgggaataccttcactcatacctgccattcccatcgattcattcgggatgttggttgttttgaaagagtagtattcataatccgaattctgcaaggtaacacccagcaaagaattaaagaagtgtttcttctttatattagtctgataagtcaagacattctcgttcaaccaagtcagccgttgattgcgaaccacctgagcatttaccttatctgtagaaatagggctaccgtaacgtgtcttcgagttattgaaggtatcattgttacgggcgtcgtatgtatagcctcccgacactttcaacttcagacctttaatgaattcatattccacaaatccgttcaactgaagattgttcgtataattcttacggtattcattctttaatgacataatcggattgaaacgatagtcattcgtcggctctaccgatgaatcgagtgcgttatccatcaatgtgctcaatggaacatccggttcagtcacaggacgatatccccatacactataaaacaagttattcataccactggatgaatataaagaggtagaactacctgtctggatagcacgtgaatagttggctgttatgctcatattcagtttaccgcgacggactaccgtattcatacgtgtctggaagcgtttgtagtttgagttcagcacgataccgtcctggtcaaaataagaagcggaagcattataacggacgccttccgttcctcccatcaaactgacgttatgactctgctgccaagcggtacggaaaatttcatcctgccagtcatattgtgcaacattgcgataatcttccaatgtccattgcttaccttcatattctttcagatagtttttcttagtatctgccggaaacatttcgttctgcaactttacaaactcgtaggcatccatcataggaatcgtattggtaactttttgcacaccgaaacttccatcgtacttaagctgcggctttccaatcttacctttctttgtagtcatgattacaacaccgttagcaccacgtgctccataaatagccgtagccgaagcatccttcagcacatctactgattctacatcggaggggttaatagtagctgcgatagccggatcttctacagggaaaccatcaatgacatacaacggagagttgtcttgagtcaaggagttattaccacggataacgatattcatcgttccacccggcataccttcgcctgaactcacatttactccggcgatacgtcctcccaatgtctgatcgaatgaagaggaaggggttttaagcaaatcttccatatttacctttgccacagcaccggtcaggtctttcttcttgacctcctgataaccaacgacaacaacttcgtccaacgtttttgtatcttctttcaatacaacagacataggtttcgatacatcaaccggcaactcctgcgtcgtgtatccgataaaagagataacaagaacagacttcttgttgggaacattaagtgagaatttaccgtcgagatcggaagtcgtaccttgtgtgcctccttttacttggatgcttgcaccaggaaccgattctcctgtttgatcgatgacagtaccccgtactagtacttgggccacagcaagagagaatgaaaataaggttaacagtaacacactgagacctctcttccatgataacttaaattggaattcggtttgcatactattcgttttacatttaaaattagattagtcaatgcgcaaatttaaagatacatccacaattttaccaaccaaaattattcaattatggtacaaaaacatacatatcaaagatattcgatatatctttgtgcaaaaagagcattatgcaacagctacccattcatttcgccccactacaaggctatacagaagcattttaccgcaatgcgcatgctgccgttttcggtggtatagacacttattataccccgtttgtacgaattgagaaggaaagtttcaggaataaagatatcagagagattgatttcgcaaacaatcatgtgccgcatttagttcctcagttgattgctccgtccgcagaaaaagcggagaccattctttcccttttcattgaaaaaggatatggcgaagcagacatcaatctgggatgtcctttccctattttagccaaacggcataacggctcgggaatacttccttatccggaagaggtcaagacattattaggtatagtcgtaaagtacccgcaaatccgcttttccgtaaaaatgagattaggctgggaaaatccggaggagtgtctcgccatcgctcccctattaaacgaccttcctctaagacaggtaacgatgcatccccgcttgggcaaacagcaatataaaggagacgtagacctcgaaggctttgccgcttttcaaagcgtttgcaaacatccgcttatttataacggtgatataaaaagacgggaagatatcctgcgcatccaagagcagtttcccatgctggcgggagtaatgatcggacggggattactagccaatccggcattggcactggaatacaaagagaaccgtacactatccgccgatgaaatgagaaacaagctacactccatgcacacatccgtatacagccaatatgccgcacaattggaaggaggggaagggcaactgctcaataaaatgaaaaccttctgggaatacctggcacctgaagcagaccggaaattgctaaaagcaatccataaaagcggcacattccagaagtacaaccaagccgttcttagcttttttggtcaacgataagttaattgacggttattttttgtaattttgcgcccgtctataaacaaacacatgatgaaaaaatacattctaatctttctttgcctgatgatggtatcgggcagttttgctcaaataaaggacttcaagtttaaattttacggacagattcgcaccgacctctactacaacagtcgcgccaatgaagaaaccgtagacggattattttatatgtatccgaaagataaagtacgtgacgaagacgggaatgacttgaatggaacgccaagcagcaacttctatactttatattcacgtctgggagtagacgtggccggtcctaaactggggacagccaagacttccgccaaaatagaagccgactttcggggtaccggtacttcttattcggtagtccgcctgcgccatgcttatctcaatctggattggggaaaatcggccttattgctcggtcaaacttggcatccactatttggagatgtttctccgcagattctgaatctttctgtcggagcaccttttcagccattcagccgtgcaccacaaattcgttaccgctatactaataagaacttccaactgacaggagctgccgtatggcaatcccaatatacctcgcaaggtatcgatttagataaccccaccaagagtaaaaagagccacgaatacttgaaaaacggctgtattccggaaatttacgtaggagccgattataaaaacggaggattcctgattggtgcgggaatcgaaatgctatcaatgaaaccacgaaaggaagctatcggtggaaatgggaagagattcaaagtagacgaacgaatcactactttatcctatgaggctcacatgaaatataccaataaagattggtttatcggagccaaaagcgttttgggctccaaccttacacaggcttccggactcggtggattcggtatcgaatctatcgatgaacgtacaggagaacagaagtacactccaattcgtgtttccagctcgtggttcaaccttgtctatggaaagaagtggaaaccgggaattttcgtcggatacgccaagaacttgggaacaagcgacgaattatatgctccgaatggaaaagcacaactttacggaacaggtacaaatctcgaccaattggtaacggcgggtgcagaactgacttataatgttcctcactggaaattcggactggagtatacgttaagcacagcatggtatggttctctcaacccaatgaacgggaaaattaaaaatgcgcatgctgtatgcaataaccgtatcgtagcggttgccatgttcatgttctaacctctctcataaagttaaactcatccatctgctgtcatccgtcacataaaaggggataaatcattgataataaacccgtaagactgtgacagcagtgtgtgatggcaatgtgacagaaggaactgctgtcacacgttgccagcttattacagtcaatcttatgcggaaggaactatacagtttcagtcgttagaaactttagtttccatacgcggaaactttggtttcatcggtaagaaacttcagtttcatgcgcttgaaactaaagttgcaaggcaggaaaccaaagttttcaatgtagggaactatcgcttctccagcatgacttcaagacttgcaccatctttgcaagtgaagcggagtactgtttgtttcttgtcaacggagagtactttacagaacggagtttcctttatattccactgtcctttcaacgttacagttaccggaatctcaccactctcgttatcaatccacgggcgggaatagatactgcgctctacccgctttccgtctttatcaaaagcctcgtcgcttgcaccgcgatacaatgccaaatccggttgcgatacggtcaacaacatcttttccggagattctttgcgaatcataaccagacacgaagtatctgtccgttgcaataatccgccgggaagcaacgcttgtggagtttcaaacagtacataagaatagatattgtccgataaagactgtacgatgtgggcattacggtcttgttggagaactttatatgcaggcttcttggcgaacgcttgtaaggtagccgtacttgtctgcggaagaacagcatactcataacttccacctttaggggcttttccatgatcgacaaccaatgatacccaatcccctttcgtctccttaccggtatcctgcatacgggaatgttgcgggaacttcttctcaaaacgagccgtaacaggtacataatatccggttccgaaatgatccatccataattcaccttcaccttgataacctttccaataatcatgtcctgctttgtcggttaccgccaattggaatatagtggtttcagtaggatattccgcattggcgttttcaatatccgatcctagacaaacgattgtttcaccgatgaaatggaaggatttacgtgcccggtgagttccgttatacttatcatgttcatgcaacttcataccgaagttcccattctctttctgttgtgacagtccgccggcaaaagcctcatcggaatagagcatctcttccataccggagaacctgtccacattcataactttcgctttcaactgttcgaggggaagatgaatggaagtcacacccggaatacggttccagtcgaaaccttcctgttgccatccgctagtagcaggagtcacaatctgtcccggagctgcggtaagaatctgcaaacttccatgtgcaaagtaacggccatagagattacgtcccaaataatgctcggccgcccaaagatagcgggaatgtccgcgagccactgccgaccagttactgcgacgttgcacagaggcacaaccataccccagcgccagatttccctgcggatcaggttcgggccggaaacctttctctacgagccgctttgcaatctttttctcttgtgcattggataccttcggcatatactccggttcttggccatcggaagaagcaccggacaccaagcgcaaataagcggctgccatttcttcgtcaaattccgcctttccatcgggagttcccgccatagccatcattgcataatgcatcggcaccaatttcccctttccatcgggatgacgcccggacaaagccaatgggaagttcagcttattgcaataaaaacgcatggcaagtagcacattcctcactgtttcatgcgccagctcagagacagcaaactctgtccggttgagaagataaatcatattagtcgccccatccaaaccaccgacggcataagccggataaaggttgcgatgatgaaaagcagcgccatccaccttaaacgaaccggccaatcccggagccggacgacacccgtaatctatccaacgggaaaatgaccgcaagtattgtaacttttcaggagtatcttccatcatcagaatgcttgctatacggccggtagtctgtgtattgaatgaatccatatcaataccgttactttccggcttcggatatacttcattagtgatggcataccaacgcaaggtacgttcggcttcctgcaatttaccagcctcacgcaacacatccttcatcagaaaataagccagatacagaccacggacactatacccgtaatgatgaatatttccccaacaactaccgtacgtcactccctgatcggtaatatggtcatacattgccaggaatttctccttcatttcattctgaacttccggattcgccgtactattattataggcaacagcaattctcttcatcaagtcgaaataagcacgcatctccacacccatcttggtcagcatatctttgtcccaattcggtataatgcgttcataagcttccgaagcacgtaccataaaaataggtacccccgaaaccttgccattcttataggtaatctgatagaaatcatatttcttgcggatggtctgtatctctttatccgatactttaccttttgtatagttcatgtcacggaaacgcttctccagcaacttcatctctttcttttgcgcctcgctcaccggagtcagttcgatatccggctgcaacaatgaatgtttatagacaaccaaccaatgattattagttccggcattgacaaaaggaacttgtaagtcggctgtttgctgacgggcatccaccttcgtcgcagtgatcaaatgatcgatgaaaaggcttcctttttcattcggagcaacaatacgaagctcattcatcccttcttccggagtaccctgcatatcccgttcgtagcaaacccatgcagcacgccaaccgctgaaattgattccgaaaggaaacgaagtacatttcttgccatctttcaaaaactcaaactcaattgttgcgtcctgaggctcctcattgtacacccatattataaaagcagaaagatataaatctttacccgtcggatctttcttttcaaactttaaatccttcttcaattccaatacccctccaggctcaaagacccatttcagcgaatgttttccgtctttataatgtgtatcggaaatagagagttgcgaattgacacctgttatgtaatccggaatcttcgattcctcaaaagagaacatccgctcgtcggtcacgacttgcgcatgaagaaatgctgaatacaaaaatgaaaatagggtaatcacccgtaatctggtaaagagttgtttcatcatgggtatttatatcttatttaggtttctatatgcggtataaacagtctcaaaaagaagtcactttaaagccggtaaacaacacgtggttttgcaaaaggcgcaggccgaaatgtccgtctccttcgtttccggtgagggtatagcggaataattcttcaccattcaccgcgtaagtagtcattcctttttctacccgaatccggatttcataccatttattgggtacaagcaaatgcggcgtatcagtatactccttcaataacggtttgactttatcatctgcaataccataatattctcctctgtaacgtcgaaaacgggtggtagaattatcatttcccccgtatccaacgtaaaaaaggttcaatgtattatagttcttaaagacaccgttgcgccactggctgcgagcaaaaagatcgtcgggatgtttaggatcattggcagcccaaaagcaattcaaatcactcagacgatcgtgccttccccctttcatcaccatacagatatggtaactgatttcataatcacccgtcagacgctgtgaggaccatagagtcaacccacccggtacaatcagttccaatgtatcggcatgttctattatctgtaaagcatgggattcatcttctattttccactgttttacaaaagagctagtatgttgcgcaaaaagcaccacactatccaaaagaagaaaagtaatcagactgtagctaataaaaaatcgcttcattatttatggtattagtttaaagatcattctttcggatacaaagaaacccctcttttcgaaaaaagaggggttcaaattgtacaaaatacctcaaataacgtattgggtatgcatttgtattaccaagcttctactacttttccatataatggtgccaaataccaatctttattctgagctccattactttgtgcccattcagtaaactgaggataagcttcggcaaaaggcactctttcgtatgtatgcttcacacccacaggtacttttaccccccaaacgaaaccgttcttattacaatatggaataccatttatcatttcaacatcagcttttgctgcatcaacatcataatttgtatagaaacgggttggctcatatcctttcatgtgaatctctgtattatcattcgtcacaataaagaaattttgtttttttgtatccaaaatcaaatttctataagcttccagttgatttttcccttcattatcagtaatttcagaacgattcttaccggcaaacttaatttcagcacgtaacatcggttttcctatgacaatataaccttctgttgtttgaaagaaattctgtttatcaccaagtgcggacaatccatccaacataatcaccggattacctgtctttgcatcgacagtcagtttataagtattcatatttacctctacaaaatcacccccagtttcttctctgaccatttcttcttccataccttgtccgcctttccaaagaatacgagaagtaatctcattaatatacttcttatcaagtccaatcaactccacacccaactttgtcggataatatcctcctttggcacgaagatccaaagtaagcaaaagcccttctttatagccatgtgcaggtaacaagttttctacttggcattcggtaacctttaggtcatactcgatgacaacatcattcaaatcgttgtcaggaccattagattgcttcggccagttgtcttcaaacatagcaactcctgtgttatgataaaaacgaaaacccgcatcctcttcacttgttggcgctactgcatcctccaaattaatagaaccatctgcccgagtaaccgctttcaaattaattgtccgtacttggggacctgacatagcagcatatttagcatatacagtctgagaatgcatcggaatattcaaatccacagttgtttcaccttctacaagagcattctccaacaaaggaattttacattccgcatcagaatataaagaaataagtgtcttgttagccgatgttatagataccgagactgtacggcttgtcgcccagtcaaatcccgtagagatcttgtccgtagaactatctcccgttgttgcttcattgtcactgtttgtacaggcaacaatggtaaatgttcccataaggacatacatcaaacttctaattttcatcataattctcaaatttaataactgttcatcttccttttctcaattgaaaccacgctttatgccatccataagcgagcctcttttgttaaccaatcacaaaaatacttaacattaaatcatataacagccttgtttatctttaatttttaccctttccatcgaaaataacaagtagccataaacttaccgcaaaagccttgttcatcggcgatggataatatatacaagttatttcttatatttgcataagacaagatattccatacaacaaatataagaatatcgctttgaatatacaagtttttttt

SEQ ID NO: 12020 - DNA, 11949 bp, Unknown
  gut microbiota DNA sequence
atttctattggatatattacaagtttattggctatcctttaataataagaatatgttcgattgctgtaatgttctgcatcattgcgtacctatttcttttattacatatcatatatggtatattcaacagaaagaaagaaaaacgtagataccaaaaggcttatgacaaatactatgaagatatgctatctatctctttagattccagcacaataagtgacgaagagatagctgacagactgaagtatgataccaaaaagcgtcctaaacccaacgagcttcgtatcattactcaactgctgaccgagataaagactgcacatgagaatgaaatcaatgaagtgaactaccattcaatacaaactgtattccaaataacccgtttcctcgaacatgaacttcaattcggagctaagagagccaagatacaagccctgaaaatcattcaatccatcaatggatatgcctctgaagcagtattggtgcgtttcctttatcaccgcaaaatagagctaaggaattcggcacgctatacatatatgtggctaagtcagggaaacccgttccgtttcttcgatgaagacatcagcatgaagctaaggcaatgggatatgatggaattacatgctatcctcgaacaccgccggaaagtaggctacaatacgcctagtttcattaaatgggtaaatacttcggctgaagaaaatgtgaagatattcttcattaatgaaatcagactttataatgaaacagaaagtgctccgactctcgccaagcaaatcaatgcccgttctgtagaaatacgaagcgaggcaataaagacgttaggtaaacttaagtacaaagaggtagaaccgaagctaattgagatgtacaatgtgcagcccgaagaagtcaaacggcagattatcacagctattgcagacttgaaaactgataaggctttaggattcctgtacaatgcttacgatgacgctgacaattggggaacaaagcgagtgattctgaaagccctttacgattacagtgctatgggcaggaaaacattcgaacaattggagagaaaagccgattctcatacagcgatcttattcgctcatacaaaacacccgcttattaaccagttaatataaaaagaatatgaaagatatactatttaccttcttcaattatttcgtattcttttatacgagtatgctggcgatatcttttatcgtattcgctttcctctctttcatttctttgaaacggagaaaagactactatgtggaaagttatgtacggaaaattatcaaagaatctccctatacaccgggtgtttcggtcattgcccctgcctacaacgaagaaaagactattatcgataatgttaactcgatgcttgccctcgaatatccagttttcgaagttattatcgtgaatgacggtagcacggacaagactttggagaaaattaccgaatattatgaactgatagaagtaccatacgcatacatcgaacgaatcaagaccaaaccgttcaaaaggcttctgaagtctacaaatccgaaatacagccgcctcatcgttgtcgataaagagaacggaggaacgaaagcggacgcttccaacgcaggtatcaacgcctcttcctatccttattttatctgtacagatgtggactgtattctggagaagtatgcattgtatcgttgtatttcaccgatcatatcttctgacaaacaagtgattgccgtgagcggaactatgctgatggctaacggttgcgtagtgaaggacgggcagattgttgatgtcaagactccgcgtacccctattccgcttttccagaatttggaatatatgcgttcctatctgataggtaagatgggatggtcagccatcaatgggatgccgaatgtatccggtggattcgggctttttgaccgttccgtagctattgcggccggaggttatgacggcacttcctttgcggaagacatggacatgattacccgcatggtaggatatatgtgcgacttctcccggccttacaagatagtgcagataccggacacctgctgttggacggaaggacctcccaacctggcaatgctttaccgccaacgtacccgttgggcacggggattattccagacattgagcgtccatcacaagatgattttcaaaaaaacctataaacaaatggggctgttaaccctaccttatatgtttatctttgaattcttggcacccatcattgaggttacaggattcagcgttttcatttacctggctttcacaggggctgtcaactggaatacggcatggatgatttacctgaccatttacgtattctgccaattcctgtccatcgtggttatcacttacgattactacgtcggaatgctttataaaagaggatacgaatatttatggattatcattgcctccatattggaaccgattttctatcatcccatcattacattctgttccctaaggggatacctcagttatttgaccaagagagacttcaagtggaagaagatggaacggacaggattcaaacagaagacaggaaatgccaatgaggaagataccaaagtcaatcctgaacccgcaacaatataagaatgtataaataacaagataagatgaacagagtatttctccataagatcaccatattagcttgtttgctcctgctgataacctcttccatcggaagcgacaaaggtttccagacgccggagcaatatgcccagatcatacaagagcattttgccaatgaagagtgggaagcggggaaagcactgttggatgaaggacttcagaaatacccgaaagtctccgatcttcaatggctcatgggtaaatactggttccatgagaaagactacgatcagtctcgttatcatcttgtcaaagcggtggaggataattataataatgtcaatgccaaacatttactggtggatgtcgaagacatcacagaaaattactccagtgcgatttgctatgtaaatgagttgctggaagtaaatccgtattggcgcggattgtggcgcagaaagattgagttgtaccgcaaacagaacaacgatgtggaagccgaccgtttgctgagacgtatcaatcagatttatccgaacgataccattttacggaaggattatgtatatagtctggaaatgggatatcgccagatgaaaaaaggcggtaaccggaaggaagcaatcgaaagactgaccgagctcatcaagatatctcccgataatgaagagttttatctggacattatcaacctgcatttgcagaaaggtaaccgggaagccgctttaggatggtcatccaatggattggcggctattcccggaagttccgcacttatcatcaaaagagccggaattctcggtgaattggcacgttttccggaagcattggtatttgtacaggaacagatgagaagaaataacagtccggcaatacggcgtatgtataacaatctgttgctggaagccgcccgctccgaaaagcaacgggatccttatgtactctacggaatggcttatgaaggcggaaacaaggataaggaagcattggattatctgctgaatacctccgtgacaagaggatacaccgatgacgcgctcttctatatcagagaggcgaagaaacaatacggtaacacagacaagggaatcttgtataaggaatatatgctttatcgtcaaatgaatgaggacgatctcgcttactcggctttaaagaagctgtatgatatgtatcccgatgattacgatattactttggccatgtcttcccttcacatgaaaaaagccgaaagacttatggaactcggcctgtattcggaggcattgcctcatgtattattcgtttcacaaaggcatatagacaacgaagtaaacggtgccgcatgggaaaaagcactgagttgctatatcaatatgaagcgttacaacgaagcgctcgccacattggataccatcacacttcatttccccgattacgaaaacggcacgttgaaaagggcatttatcctcgataaaatggataaaacagaagaagctctgcaactttatctgtctgccatcgaacagagtgatgaggatatgcgcattttctacgtgataggatacgaggaactggcaattccttacatcaagaaatgtatggaagcgggggctacgcagaaagcatacgatgaagccgtcaaactcgtcagcctgaatccatcgagtgatttaggactacgctatgccatcaactcgtctggattattgggaaaatacgatgaattcgagaaatatacggcacaaggtatcaatttctatccggaagagccattctatcaagccaaaagggctaccgtattggaccgtgacaaaaaatacgaagcttcgctagaattcttgaagccgatactcaataaatatccgagtaataaggagattataggcgctttctcgcaaagcagtgaataccgcgctttgcaactgacaaaagcgaaagaacctgagcaagcccttgcggtgcttgacacagcgttacttttcgacagtcagaacaaatctttgaaatacacaaagggagtggtgtatgaggctaacagacaagctgattccgcatactattatcagaagttctacgagccttcaatcatggaatatcgctctttccaacggcatttatcgggcttacgaagcatgacgcttaaaaatgagatagccctgacttatctgcgtgcccgctatggtgaagaggatattatcacctctgtcgccacagccgaatatacccgtaaaaaccgggaaaatacttataccggacgtatcaactatgctggaagaagcggatcggcaagcgataatatggaggcggaggaacagacaccgggcggagtcggcattcaggtacaaggcgaatggacgcatcacttctcaccgaaatggagcactacgatcaatgccgcttttgccaccaaatacttcccggacattactgccgatgtagcattgcgccattatctcaagaatgattgggaaatagcgggacatgtcggctacagacgggtaactgcctacaacaagcattatgagtggaataacgaattctttgccggcagtaacggagaaaacggatacatattcaccggatgggatgagtcgaaaacaaacctgctcaccgttggcggagaggtagccaagaccatcgaagaggtccggcttaatgccaaactcgaccttcatttctttaactccaaattctattacaatgcgcaggtcggtgcgaaatatttccctgccagcgatggaaagacaaatatcaatgccatggcaagtatcggttcggcaccggaaacggccgtattagactatgcgttgcccggttccttctcacataccaacacaatggtaggtttgggaggccaatatatggtcagtcccaacattaccatcggcctgatggggacttggaatacctattataaccagacgaatacagtgcggggaacggatccgatccatcgaatagaaacggtatcgacacgctataaaaacctatataatatctatgcacagatttatatttcattctgataagctatgccccctactggcaggaatgatatgcgtttgctgccttttatccggctgccatatgcaggcgcgcaccgagatatttgcctccaaggaaggctacctcatcacaatcggcgaagacccgacggacaaagatacccgatgggccaaatacctgtacgagcacctcaaaaagcgtgcaaatgacgatgaaatggtcgctttcggggtatcagagaaggaaatgtggcgtgttatcatacgcatagatccgaccttgcaggaagggttcaggatcgccatcaaaggatcggaaatagaactcacagcagccgatgacagacaaatgttgtggctgcaataccaattgataaaaaagataagcaaggaagacccgcgtatcgacggttccgaccttcctcccgccatcatcaatctgacagatacttgcggtacgtttgcttttgattatcaaagtatctattccccttccggtctgaatcccgattatacgggagtaatgggactcaataactttgacgacagttggggtatatggggacacaacctgagaaaagtattaggagacaatgtagataaggtatatgctaccatccacggtaagacagacgactcacaactttgtttctcttccgaagagatgtatcggcaaattgaaagctatatcgtagataatatcggtgaaaagggaagttctcgttttgtcattgctccggatgatactccgtacgcctgtacttgcgccagttgcacagcgatgggaaatacggagaagaacgcaacacctgccgtcacagaactgttactccggctgtcgcaacgctttcctaaacattccttttttaccatatcctatctgagcaccaagcaggttacggacaaacagttgccgtccaatgcaggtatcattgtcagcgccatagactttccactccgacggatagacggcaagaatgcacaggaaaaaaagtttatgcaacagctgaatcaatggaagaaagttacgaagaacatttatatatgggattacatcaacaacttcgatgactatctgacacctttccccatattgaagatagcccagcagagactccggttcttcaagcagaacggagccagtggcattttcttcaacggaagcggatacagctattcttctttcgatgcaatgaggacttttgcactgtcggcacttctcatcaacccggaacttcccgttgaggaactggtcagagactatttcaatcaagagtaccccctatcaaagaaatggctgtacgactattacattaacttggaaaacagcgtccagtccggtaagaagttaggtatctatgccggtattgcagaattggagcagtcattcctcaatccggaaaagtttatcaaattctatgatgaaatgggcgattatgtttccgatgcgaaagggaaagagcgtaaaaagctccatgaactccagacagccttgtcttatacacgtctggagatgggacgcaaccacagttatgatccttacggatatgcccaacgaaacggaaaacaaatccaaccgactccgcaagtgcggaaatggcttacccaactcaaagaacatcatgctttcacggggatggagtactataatgaatcggccgatgaaatcgactactatataaaagaatgggaacagtatatacttgcttccgacattaaaaagaacttatttctcggaatcatgccttcttcaactcccccaacggacaaagatgggttgaagagactcacagacagcacgcacggtttacccggcaattatcattgcggctggacaactcttccgaaagaaaaatatgaaatcagtctgcctgtaaaaggtatcaataagacaggaaacatttatatcagtttcttgaatcttcccagacatcgtttctaccctccccggcaaatcgaaatatcgaaggacggagcaatctataagacaatcaatctggagacggatgattccgttgaaaagggcgaattagtaaaaataaccactccgatagatttgaacagggcagaactggtaagtataaaggtcatgggagctaaaaagccaagagcccagatcggtatagatgaaatcgcattcgttccataaaaagtaaaaataaggtaacccctaacataaaacatccactatgaacaaatcggtactttatatcctcttattaacagtattacccttcttcctctcagggtgtaagaagaaagtacgtcctacaactatggtcataaaagactcggtaaggcactattattctatcaaacaagggcaacaactagatatcatgttcacaatcaccaacaccggtgacgctcctctggtcatttcggatatccagccttcttgtggctgtatcattctggataaaagttcacatatcatcattccggaagagggtatcagacaattcaaggcaacctacaacagtattaaaaatataggcgaggttgttcaccgcatccggattttcgggaatatgcttcccaacgggaaagcggaattgacctttgatgtcaatgtagtaccggacgccgactatacacgtgactatgaggaactcttccaagagttcaatgccaaaaacggtattgtcaaagagatggtggacggaaaagagtccgaactggggtattatgtagggacgccataaacaaagttcctaccggctattcgctagggatgtatttccttgaaagctgcattctcttcctttacttgttgtatcgtctgtttcaattcagcaataggcaggtcgtagccgtaccatcctgtataacaatctactacataccattttccatcagacaagagctggaattcgacacgcaagtcgacttccgattcctcataaccggcttcaaacactttgcgatcaggctcgttcaatgtgaatttggaaacataaattcccccctcttcttgcgcgatacgttcttctttcattgtctcgctatccaataaaggccatttttccttagtaaaagggaatgtcttctctgtttcaccatcatccgccaataaggtaatcggagttttcaacgggaacttaatgcgagtgtactggaatgctgcactggaagtaaacttatccaaaaacggtttgaagtcctcaccggattgcgccaccgccttaccggtgggaataccagcaaacaacactatcatcagcaagcagtatacaaacttttcagctctcataacacgatataaattaagagtttgattgacactgcaaagataatgactagtttgatatcttgattatttgtgccgcaaatattcataaccaaaacggcaatacaggcattttctccggtcgcaatactctttctgcaactgtatcaacgcctgactgtccgccgcactgaccaccggaagacctgccgcactccacgaacggataatatgattgtcttccgctttcaattcttccagaaagcgtccggcacgttcgcacattccctcgtctgccttatgcagtccgtaggtataaagaaaaggaactacagtattgataataatcaggtcttttgaccgttctcccatcgttttcttcttttgcgaggaagtccggccgaacagataatgactttcccaataagaagaagtgccgacctcaagaagtgtcctcacctccgccagtgtccctgcttccagcaaccgcgagaacagcttaccccctctttgataaaggtaggccaactgagccagacgaacagtaggaaagttttcgggacgaagtcggagaaaacgccaaagagtagcattcatcacttgggtgaattcaaacttccgctgcaagtaacggaactccttgataagacgtagactatactcatcctcctgcccttttttaagaaacgaatcttccaacaatcctgccaagccgtaaaagaaagcctctatctggaacaaatcattgcgatgtttatctatcgcacggaaaggcaacattcctgcccacgtttcaaaagcgtctccattcaagccgaaaccgaaattgcgggcaagagtgacgaagaaggcatcctcccaattatgattgcaatgcttaaggcgctccgttatcaagcgggctttttgttccaaacgttccgtttgcaaagctgtcagccaagaatggacggtaagtttgggaagagaggcgaggataggataacaagccggatactgatcggctacacagagctcatgatagtgagactgcacattttcaggacaagtcaatattaattgcggaattcgcccgccgtccgtgcgggttacctccatatccgcctcaccgaccacatgaagaatgaccgaatcgtatgctttatccttatcgtgaccgtgacggagccaatccgaagagtgtatatgtatttctatatttcccacccatagcgtaccgtcaatttttagtttcgcattaaaaaagtcaggaccggcattgggattttgcagaccggaatcaatcacttctaccggtaagccttcagtggtttgcagtactttcagaggaaataatttatgtttccacacgtagtggagaagatgttccatgttaacaagacgttaatgtgcactgcaaatgtaataaaaatcctatctttgcaactattattttgaatataagtcagaaaacaatgaaaatagcattgatcggttacggaaagatgggcaaggagatagaaaaggtagcccgtagtcgcggacatgaaattgtctgtatcatcgacatcaataatcaggaagacttcgaatcggaagcattcaaatcggctgacgtagccattgagtttaccaatccgatggtagcttacagtaattatatgaaagccttcaaagccgatgtgaagctggtatcaggcagcaccggatggatgaccgaacatggcgaagaaatcaaaaagctttgtacggaaggtggaaagacccttttctggtcgtccaacttcagtctgggagttaccatcttctcggctgtcaataagtatctggctaagatcatgaatcagttccccaattatgacgtgacgatgagcgagacgcatcatattcacaaactggacgctccgagcggaacagccatcactctggcggaaggtatcttacagaatatggaccgcaaggacaaatgggtgaaaggaacattcgccgcaccggacgggagcattagcggaaccaacgactgcgctccgaacgaacttcccatcgcttccatccgtgaaggagaagtgttcggtctgcacaccatccggtacgaatcggatgtggacagcattaccctcacacacgatgcaaaaagccgtggaggttttgtactcggagctgtattggcagccgaatatacagcccagcacgaaggattcttgggcatgagtgatttatttccattcttgaacgattaagatttcagaacctagttcaaatatataccattatgagacaagccacacgcgcacaatggattaaatgcgccattgctattcttctttatcttgccttccttatctgggtacggagttggtggggattgattgttgttcctttcattttcgatatttatatcacaaagaaagtaccttggtctttctggaaaaagtcgaagaatccggttgtccgcagcgtgatgagctggatagacgccattgttttcgcactggtcgccgtttacttcgtcaatatctacatcttccagaactaccagattccctcctcctcgttggagaaatcattgctggtaggcgattttctgtacgtaagcaagatgagctacggtcctcgtgtgccgaatacaccgctttctatgccgttggcacaacatacactgcccgtcttcaactctaaatcatacatagaatggccacagtggaaatataaacgagtgccgggattcggcaaagtgaagttgaacgatattgtcgtattcaattttccggcaggtgacacggtagcggtcaactaccaacagactacagatttttacacgctggcttacggtgaaggacaacgtatctattccaaacggatcgatatggacagcttaactcgtgcacagcagcgtgccgtatacgacctgtactacgctgccggacggaaacagattttaaataatccacgtacttacggggaagtcctctggcgtcctgtagaccgcagagagaattacgttaaacgttgtgtaggtcttcccggtgatacgctccagattgtcaacggacaagtgatgattgacggtaaagcgattgagaaccccgaaaacctgcaattcaactatttcgtacagaccaccggtccgtacattcccgaagatatgcttcgtgaact

SEQ ID NO: 12021 - DNA, 317 bp, Unknown
  gut microbiota DNA sequence
tcccgctggtttatcgtcatgctctgccgtttctgcaacacctttccgaaacgctcggaaaggattttcgccgtttcaccgactacttgaccgctgaacacgttacccacagtattttggataacccggctttccttgtccccgtaatcacgggtaagctggctgtaatcctgaaagcctaacagaaccgcaaccttgttgcttcgggcggtggcaatcaaattatccaacccccgaaaatatatagttggtaattcatctattatcaccgaacttttaagctgacctttcttgtttatcagcttcactattctact

SEQ ID NO: 12022 - DNA, 1591 bp, Unknown
  gut microbiota DNA sequence
ccaaacctttcactacaggaatttggtaaacttcactgccaatcgtaacattgaaacagccgtctttcacctctactttatttatcaacggagtattttcatttactccttctgctaagccattttccaaaaacttccaagtagaaccattatcgtagcttacctgccaatacttcttgccatcagcatctgggttcgcttcaatcttaaactgcggagttatcgtcgcatcctcaccgttttctgctttagcacgccattcggtcttgcttccggcaattacccaataaccgtcatcactgatatcaatagatggataattacctcctacctcgccctgcgtcaatgtcaatgtctcaccattgcttaaagtcaacgtataggtgtcaccatcaatggaataatctgtaatcgttttattgccatccaatgctacacgcaagatattcatctcatcgttcaaccgttgtacttgtgcttccacactcgccacacggtctttcaaggcatcaatgtccttttccaaatcgtctgtgtcacacgcaacaaagactagtgccaacaaactgaataatatgaatgatttatagtatctcataataatttctttactttattgattccacttattcactaactgtcactttcaacgatttaatcaaacgatagccctccttagagaatatctgaaaatgaacatcatacactcccggatctacccctgtcgtctgaatagtcaatgacgtatcggtcaaatctaccatcagaggtgtaggatcaatgattatcttatccacattaatctgttctactttcaactctttcagagtattcttcgcaatcgttacagaggtcagactagttgctccatctgcaaaagtcatattcagtcctcccaacagaggaatatctgttgtacctcctcctacaaaagaaaaagtcattacattatccttaaccaccacatccgcaaatatacttccgggaatctttgtaatatccgcaatgttataaggtcctccgatacgctgtgtttcgccacctgcaatggtataacaccaatagccctcttcatcaattgagatcgtcggcgtttcaccgtcttttccgtcttcaggctttgccttgctagacaattttattgtttcaccattgagagtataggtccaataaccgtcttcactgactcccaataccggtatatcttcgtcaggtaatccgctataaacagtcagttccataccatcactcattttcaaggtataattgcctttctcatccatagaatattcagtgataagaacaattccctgcatagcctcttggaaagatttaatgcttgtattcagactttccaaattatcggttaatgcgtccaagcgagcattcagttcatcaatgtctttgcgtatatcatccttatcatcacacgctgtaaaagtaatgacaggtaataggcttaatagtagtattaatatctttttcatattatcttagttttaacgttgagcaccgtaggctttatattcatctttaggaacaaatgtgccggttgatttgtcgaaagttgcaaacaaatcagccactaatt

SEQ ID NO: 12023 - DNA, 11135 bp, Unknown
  gut microbiota DNA sequence
ctcttggaaagcgggtgcaaaagtagacactttatacataacatccaaatatattcaactatttttttgaagtattttgaaagaaaaacgctaactagctgaatcataacgatgttgtagaacatgttttttcaacagaaaaaagaggaagatgggaatacacaaaaaaaataagagtaataacactaaagggtcaacctaagtcaggttatgacaggcgctatggaagaactaaaaaaagcatagctttagagagcataaagctatgctttagcactcgtaaagcactgctttagcattaacaaaccacccacctgttaataacaggtgggtatagaaggtacattttttcggggctctcttacacacgcacacgcacgcgtatatatagtaccccttatcacctgtattgacaaacattctgcattcaatcaggcgtttcaatcagatgagtatagtattatttcaatttatgaaggaaaaacgagcaacaggatacaggcacacaagaacaactgagaggtctcgcaaggtgaggtaagatctcataaaatcgacaatggcaataaatctcctttgataggtgatgataacatctttaatattgtcaatagagaccacttggtctcaagcggtactttctatacctattattcgcgcgcacgcgtgtgtgagaaaattatacggtgcatctactgtaccttttgtacccgccgggctgttcataacttttttttttggggggggcaactctcacctagttgacatttgaaaaatattcctcctgcatttacctgcctacctcatcccatccggcagccgaatgccattgcagagtcctaaaaaaagcattccatttcaaatacctagtatccggtatataacacccaatacccgaatatatatctgaatctatatccactaatttatcatcatcaacataatccttatacacaacaactctatctaattgtccttcaaaatcagaaggaatattaccatcggtcagttcacgtataaaagctcgaaaatcatatgtcgaatgatccaaaggagatcttccataaccataatgggcttgaaaataatctattttactattatcaaacttaaccagattgccctgatactgtttcataattgagcaagtaacatccgccaatgccgatatttcattcgtttttattaccgcaatagtaccccacgaataattatattcatttttatagtaatcaataaaatcctttgcaatatttatagcactctgctctgaattatccgcagacaataaatatttcgtcatcttgaaataaggaaatcccgcactcataacctctgcaggagaaagaattaaataatcagcagcattccttaattcataagcaacctcaacttgcgacattaaacaagcatcaaatagtatataatcaaaatggataccggattgcgccaaagctttcgataaatcaggaatatttattttagctccactatcatctccaaaagaacgacttttactatcatctactggtaaccatccagtagcgtgagagccaaaaatcagactatatctttcagctggacaataagtcttcacatctttcaaaacattaactaccacctcattcgatacggaattctggctactataagtttttattacctctcttttactgacagaacctttgccatccacttcatacttaaacagagttggaacaggaaattcaccttttctactgccaccatcccaataaattacaaatgtaccaggagacgtaacttcactcaatcctcgttctactgattctatattgttgtatatctggccactgatattattatctccaacaagatacatcaagactgtttttaccgccaccggaacagaggtatcattatcatcaccacatgccgataaaaaagttgacaaacatacaaacaaaaataatattttaatctttttcataatatttctcattaataacggcacaaagataaaaaaataagagatgcaagtctgcatctcctatcacattaacaattaaaatattgttatgagtaaatatcacttatattactcttccggctttgtaaagcggaatttttcagaatcaacccgtgttactattattctattactcctcttatatttactcagaattttcgtagcctctttttccagcttctttctattttccgagaaataaatcatacaggtactattttgttgtaatctgttatcttccagataatttttcaactgatagctatacaactcgcgatgtgccaagaaaccgtctttactgatctttgcactatccaatatctggatatctgtgaaatagacaaccgaatcagtaaatgaagccgaaattccaaaagcatacacaggttttgagttaccttttttcaaagaaaaagcggagcacatggtaaacacaagtgcaatggcaaatagtatttttacgtatttcatatcatataattttaattgtgacaaaggtaacaaaaaaagtcgcataagtacattctccgatatgaaaagtgttacctatgcgactcaaattcttttttctttcagaaactgatattccttacttatcccaagtaagatttgagcaatttactacgattactttgtctaagtcttctaattgctttttccttaatctgacgaacacgctcacgtgtgagcccaaacttatcgccgatttcttccaatgtcatttcctgttgtccgataccgaaaaacatctgaatgatttctttttccctatcggttaacgtagaaagagctctatcaatttccctcgcaagagactcattaaccagagagcggtccgccataggcgaatcatcgtttaccaacacatccagcaggctgttatcctctccttccacaaaaggcgcatccaccgaaatatgacggccggataccttcagcgtatcagagatcttgtcaaccggaatttccagctcgtctgccaactcttcgggagacggacgccgctcgttttcctgttcgaatttcgagaaggctttgctgatcttattcagcgaacctacctgattcaacgggagacgaacaatacgcgactgctctgccaatgcttgcagaatagactggcgaatccaccatacagcgtagctgataaacttgaatccacgtgtttcatcaaacttttcagcagccttaatcagtcctaaattgccttcattaatcaagtccggcaaactcaaaccctggttttggtactgtttggccacagatacgacgaaacgaagattggcacgtgtcagtttctctaatgccacacggtcacccttacgaatgcgttgagcgagttccacttcttcctcaacagtaatcaggtcttcgcgaccgatttcctgcaaatacttgtcaagagaagcgctctctctgttagtgatacttttggtaatctttagttgtctcattctttaaaaacagatttggtgcgcaaagttacaacaaataatttgttaacatacaaatttaagcaacttttgcattatatttttcaactaataaaacaaaaagagatgccgacaagttgatagtcggcatcctttttctatttcattagcttatcctataatcttcttaccttattttatatcttcattcctgtgtcaaatcgacagcgaaatatccgcgtttgcctgatgggaatactcctgtcaagaacaatacctgattcggagatttcaccgctgctttcatcacttcttccaaatcactgaccttacgcatcggctggtcgtttgccttcaggatgataaatcctttgcgaactcccgcatcggacatcttaccggaagaaactcctgtcacttgcagaccataacccagattcaactgcttcttcaggtcgtccggcagctctttgaaagcagctcccaatatttccatacctgcatctttcacaatcttggtagtaccctgttcgttcttcaacgttacttcaacagtcttttccttcttgttacggatcagtttcactttcactttatcgcccggacgatgtttagcgatagcttcctgcaagtcggccatgttggacaccttcttgttatccaaaccgatgattacgtcgtccaccttgatatcagctcccgatgcagaaccgttttctacgatttcagaaacccaaacgccttctactacacccagttctttagctttatccgccaaagtagtaccggatttatcaatcggctgctggtcgtccatcaaactactaccgatagaaccaccacggataccaagcaacgcacgctgtactgtcccgtattgtttcaggtcggcaattacttttgtcataatgctggtcggaatggcaaaaccgtatccggcataagcacctgtcggagaagaaagcactgaattgatacctaccagctcacctttagcgttcaccaatgcgccaccactattaccttgattgatagccgcatccgtctggataaacgattcgatacctccattatagactcccaatgaacgcgccttcgcacttacgataccggcagttacggtagagttcaagttgaatgggttacctaccgccaatacccactctcctactttcaacgcttcagaatcaccaaccggaatagtcggaaaatcatcaccttcgatttttaccaatgcaaggtcagtactggggtcagtaccgatcacacgtcctttaaattcacggttatcattcagttttacactgatttcatccgcaccttcaatcacgtgattgttcgttacgatatagccgtcttttgaaatgatgactcccgaaccgaaacctacacgaggttgagattgtacctgacgttgctgtccgcgtccgtcaccgaagaaaaaatcaaaaatgtccggcgcttgctgaactgttcttgttttagcttcttgggtagatcttatatgtacaacagcatgaagcgagttttccgcagcctgggtcaaatcgatcggttgagcgttcacagcatcaaaagcagccaatttcacattgggattctgcttgaacatctcattaaaagatgtctctgtggcagccttgttagattgcaacaatttgtaagttgtcaaccctgcaactcctgagctaagaagaacgattgctcctattcccagaatgttctttgttgtctgtttcatgatttataattctttaaaatgttaatattcgacattgttttaacttttacgacgttaaaataataacaaatatcgttcacttattctacttgtcactcttttttgtccacttttaacagagaatatttggagcttaacagcgcttaacgacaacaactgacaaatttacattcgttgtatgtcagatggctttaacactctgacattcattcagtaaagtcagattttcacgacaccgataccgggcagttcgttcagagtgattctacctttcaccacttccacccctttaaaacggtcattagagatgagcaggttaccatccaaatcagcaaaatccactaacggagagaactgcgacgctgccgatatagcgcaggaagtctctgtcatacatcctaccataacacgcattcccagtgcatgggccaaagtcaccattttccacgcttcacgcatgccggtgcacttcatcagtttgatgttgattcccgtgaaagcccctttcaaagccgccacatccgctaggcgctgcaaagattcatcggcaaatatcggcaacgggctctgttgcgtgatccaagcgatatcatccaactgctctttcggcataggttgctctatcatcactattcctttttctttcagccaatgaatcatatccaacgcatacagacggtccttccacccttgattcgcgtcaacagctataggaaggtccgttaccgaacgaatggtttcaatcatttccttatcattgtcccgacccaattttacctttaatatattaaaccgatctgcgcactcttttgttttctcacgcaccacatcgagcgtatcaatccctatcgtaaaggtagtggaaggcgtcttttccttattcaacccccatattttataccagggagcacccaacagttttcctaccagatcatgaagggcaatatcaaccgccgctttagctgccgtatctttcggtgaaagactgtcgacgtatgacaaaatgtcatctaactgaaacggatcattaaattgttccagattcactttcttaaggaaattcataacggactccaccgtttctcccaagtaaggcggcatggaagcttccccgtatcctgttatcccttcatattctatttccacctgcacgtcgggagtcgttgtacgcgaataagtagctaccgtaaatacatgtcttaacttcaactcataaggaaagaatttcattttcatctttcctcccaaaccaagcttatttatattataaggtaatgattctccagccaacgtctgacgtacaaccaacccggaacccagagcagccaaagccgccgtcttcaagaaatctcttctgttttgcataaaataaataaattaatgaagaattcttcattttaattgccgtaatagagattgcgatccgtagtattcatgcctttctccttattaatataaggtaagaaacggactgcaaaaagcaaacgtcccgtattgaatgcatcataattcttatccgaaggttcaaaactgcttatatgcacatcccccaaagcatggataaaacgcttgttgccgagatagatccccacgtgtgagattccctctttttgttcgcccgttgccttccgaccgaagaaaaccaagtctccccgctgcacattggcaaaatcggaagctatttcgatacgttcgcccacatacgcctgttgcgacgcatctctcggaatgatgatatcatgcataaaaagcactgtccggaccagaccgctgcaatccactccttttgaagaagtgcccgcccacaaataaggaactcctatcattgtataagccgtctcgataatgctttcaacatcttgtttcaacgaagctctccatcggttttcaggctgtgaaatagatttcggaatataagcctgtctgccgtccggataagacactttataaaaatgtcctttgctaccttcccacttcagacgattaccagccactacatcagacacggtttgggaagttgcatccggtttctcataagtaaatccgtaatgtgaagttacaacaatcttttccgcacggttccattcatcatatttctcttttgacataggagtaatcaccatccggtgtacccagccggtatagtcatccggagtctgaatctcgtaccagccggtgtattgcagaactttgaccggcatacccaataatgcttgcgtgctcataccggaggtaaacttgccttcttcgcgcatattacaaacagaaatatgcactaccccatacgcagaatcagcaggcatggggcgtatctcctgagctttcagactgagtgtcgccattgccagaaaataaaagaaaaagagaatgttttttttcattgaatcatgttttaatgatagcaaagttagaaaatatttctatttgtgatactttctttagctaaaacaaaataaatgacgtatttttgcagtctaaagcagttggccggtctgtcgcgtgcacgtcagcgtgcaggaggaaagtccgggcaacacagagcatcctacttcctaacagaaagctgtccgcgagggtagagtaacgtagaagaaaataaccgccactcctttcggggagaggtaagggtgagaaggtggggtaagagcccaccagccgtatggtgacatatcgggctgtacgtcttaggagttgtaaggtcatgtaaaccggcgttatgagagttgctcgctccatgtcggagggtagaccgctaaagtgtcgtggtgacacgtcactcagataaatgacaggcactttttataagtaaaattatagaaggtacagaactcggcttataggctgactgctttttctttttttaaattctaagccatgaagaagaaattcaccgatatatggaaattcctcacgtatgacatctggcgtattacggaagatgaagtgacccgaaccaagttctcactttacaatattataaagaccatctatctttgtatcaaccggttcaccaaagaccggatggccaacaaagcctccgcgctgacttacagcaccctgcttgccattgttccgatacttgccatcctgtttgcagtggcacgcggttttggatttaacaatttgatggagcaccaattccgcaacggattcggaggaaacacagaaacaacagaagctatcctctcatttgtcgattcatacctttcgcagaccaaagggggagtattcatcggaatcggtctggtgatgttgctatggacggtcatcaatctggtcagcaatatcgaaatcacgttcaaccgtatctgggaagtaaagaaagcccggtctatgtaccgtaaaataacggactacttctccatgttcctgttaatgccgatcttgattgtggtctccggcggtctttccatttttatgagcaccatgctcaagcagatggatgattttgtgctgctggcccctatcatgaagttcatgatacgtcttataccctttgtactgacttggctgatgttcaccggactttatatcttcatgccgaatacgaaagtgaaattcaagcacgcgcttatcgcaggtgttttggcaggaaccgcctaccaagctttccagtatctatatatcagcagtcagttgggagtatcaaaatacaatgccatctatggtagttttgccgctttacctttattcctgctttggttgcaaatatcctggactatctgtctgttcggtgcggagctggcctatgcaggtcagaatatccagagtttcagtttcgaccaggatacccgcaatatcagcaggcgctaccgggactttatatccatcctcatcatgtccctcatcgccaaacggtttgagaaaaacgagccgccttatacagccgcgcaaatttcggaagaacatcaaataccgatcagactcactaatcaagtactttatcaattacaggaaatagacttgattcatgaggtagtcacagatgcaaaaagtgaggaaatcggttatcagccgtctatggacatcaatcaactgaacgtagccatcctgctcgaccgcttggatacatacggctcggagaatttcaagatagacaaagatgaagaattcagcgacgaatggaaagtgctgaccgaatccaaagaagaatactataagaaggcaagcaaagtgttactcaaggatttgtagcctatttatagctgttgtaggaaatcactttttctttcggttttctcatcttctttcttttctccttcaccggatagcctatcgtgatatccagcaatacacgtttggacgaagggatgcctgtcagccgcttcatttccttttcgtcaaaccagcctatcatacacgagcccagtccttcactttcagcagcaagggtgatatgagcggcggcaatcccgatatcaatcaaaggaaaatgtttatctttcacttttcccccgagcattgaagtaatattggccgactcttccacaactaagatatgcacaggcgcatctttggcaaacttattcattcccagtcctgctgcagccttgccaatcttcacagccagttcacggtcggttatcaccacaaacttccagggttgggcattgcaagcggaaggagccagacgacctgcctccaaaatccgctctaacttctccgtctccaccggacgttctttatcatacgcccggtcactctgacgggaaagtactaattgcagaaaatcactgtattccatcttatttatattgaatcatccggctgatatacttaccgataatgtcaaactctatattcaccacactaccaatggcaaacgtatggaaatttgtatgctcgtaagtataaggaataatggccacctggaacgtatcatccgtgggattgcatactgtcagactgacaccgtttaccgtcaccgaacctttatccacagtaatatatccacgtttcgccatttccttatcaaacgcataacggaatgtaaaataccagcttccttccgcatcctttatgtcaacacaagtggcggtctgatccacatgtccctgcacaatatgaccgtccaaccggccgttcatcaccatgctgcgctccacattcactttgtctcccactttcagcagaccgagattggaccgttccagcgtttctttcatagcagtcaccgtataggtgtcatccgtcatacttacgactgtcagacatacaccattgtgagaaatactctgatcaaccttcaactcattcacaaacgaacacttcaatgtaaagtgtatattctcctggtctttcaccagcgccaccaaagtagcatattcttctacaattccggaaaacataattctacttattatttcatgatttactattctacgtttaaaagcactcctttaatgcaagggtcaaagatacgaataagcaaggaggatagaaaataagagcataaaaaattcacattacacacagacctgtgacaagagagatggtaaaaaaggcagcagatgaatgtctcaaatactgccttataatccgaaagggtggaaatttacatacgtttatatgtcattttacggtaaaagtctccatcttcgtcagtttctttttgtccaactaccaattgactggaattaacaacaagtaatttgacagaagtaaattctgtacctcctccatccacaggaatcagattattgccatctaaagtaaatttctcaatatcgttttgatgccactggttgttgtaataataattgagatgcaagtgcgaggaacacaacatgggaaattgcacacttcttaataaacagattggcaaagtagacaaactgtccggttcttatactgtccaaaatgtagattggtagacattaaataaggacataaaaaaatggggcttttcacaaagctccattcttcagttttcaataggtattagttttttttt

SEQ ID NO: 12024 - DNA, 39806 bp, Unknown
  gut microbiota DNA sequence
tccaaattataaaacatgtcatataacatctttttgaaaaatctttggatttattatcatttgacgcaaaaactcctgtaactagcccgttacaggagtcaaatataagatattttttaaggagacctaatttctgtttaaaaattcgcccaaaattacttctccggataattttcgtccgtttttccacgatgttttaacactttggcatcaatgaaaaatacgatttcctcagcaatgttggtgatatggtctcctgcacgttccaatttgcggaacacgctgaccaagtccacacccgtatgtaccgcttccggatgttcggtaatatagtccgcaatgatacctgttgccccggcattgatctcatccagcaaattatctttggcaaagacacctgccgccagttcaatactctcctcattcaaggcacgtttcgccagttccagcatggacaacacctcggcctgcatctccgccaaccgaagacggttcaacagttctgcatccaacaccggttctttactacgaatcacaaagcgggcaatcccttccgcaaagtctcccaagcgttccagattcgtattgattttcagcatagccagcacaaaacgcaggtcgatcgccaccggattatataacgcgataatatcttccacatcactgtctatcttcagctcaaaggcattcaccctacgttcgcgaaccatcacctgctgagccaactctttgtcaagagtcaatacagcctctccggcacggtcgagctggttgtacaccaacgtccacatctcatcaatttccttcttcaatagaacaagttccgattctataaactttaccatagtctacttatatataaatgattaatattctgtttctaacacaggcaagggggaccgttctatccgaagcgacctgtaatataattctgcgtagcctctttctccggatttgtgaatatcttcttggtctgatcgaattctaccatctcgcccatataaaagaaagccgttttgtcgctgacacgggccgcctgctgcatattgtgcgtcacaatcacaatagtatagtcttttttcagctcgtgaatcagctcttccacttttgccgtagaaatagggtcgagcgcagacgcaggttcgtccatcagcaacaccgaaggagacaccgccatagcacgggcaatgcaaagacgttgctgctgtccgccggacaaggcataagccgattccttcaacttatttttcacctcatcccaaagtgccgcccctttcagtgtttcctccacacgctggcggatgaaagcgttatctttcactccattcacacgaagtccgtaagccacattctcgaatatgcttttcggaaaaggattaggacgctgaaacaccattcccacattcttgcgcagttcgtccaccgccacgcttttagaatagatattctgcccgtcaatacgaatctccccttccagacgggtggcgggaatcagatcgttcatccgattgaaaagccggaggaaggtagacttaccacaaccggaaggcccgataaaggcaacaactgacttctcttcaatctgcatactgatacctttcaacgcatggaaatcaccataccagaaattcacgtcgcgcgcatctattttcactgtatccatatatactaactcaattcgtttttacccttttctcaaaatactttctcaacgcattcgccagcaaattcaccagcagaataatcataatcagtaccaatgccgtaccgtatgccaatggcagctgcgcctccatatccgttccacttgtagaaatcacatacagatgataaggcaacgccatacactgatccaaaatgcttgccggaagatgcggaaggaaataggcggcacaggtgaacagaatcggcgccgtctctcccgacacccgtcccaaagcaagaatcagcccggtgataatattcggcatacccatcggaagaataacgtgccagatcgtctgcaacttcgtcgctcccagcgcccggcttccctcacgcatactgtcgggaatcgccttcaaagcctcttccgtcgtccggataaccaaaggtacacaaagtaagcctaatgtcaaagaaccggccagaatactatcaccgaaccccatataattgacaaaaagcgccataccgaacaaaccgaacacaatagagggaataccactcagattgttcgtcatcacccggataaagcgtaccaatttgcctttcggcgcatactcgttcatatagattccactcatcacccccaccggaaaagcaaatagcgcactacccaccatcagataaaaagtaccgacaatagccggccagatgcctcctcccgtcattccatccgtaggagacgaagtgataaactcccagctgatggcaccgattcctttatagatgataaatcccagaatcacaaacaatatcagcacaatgcaaagactcaacaatcggaataggccgaaagcgatcttctgcgaacggtgcttggctttattattactccttacttccatattatttacttcgttttagtcctttagaagaaatgtattccacactaaagttgatgatcagtgtaatgaagaacaacacgacacctaacaggaataatgcctgataatgcggacctcccgccggtgcttcccccaattccgccgcaatggtggcaggaatcgtacgcaacggttccagaatagtggtcggaatcacggccgcgtttcccgtcaccatcaataccgccatcgtttctccgatagcccgcccgatacccaacaccacgccggacgtaatgcccgagatggaataaggaatcactaccttatatatagtctgccactgtgaagcccccagcgccagactcgcttcacgcatggcgcgcggacaattcctcatcgcatcttccgtcactgttataatagtaggcagcgccattatagccaacacgatactccctgccaaaccgctttctcctaccggaagatcaaacaatttctgaatcaacggaacaatgacgatcaaaccgaaaaagccataaacaacggaaggaatgccactcaacaattcaatgaccggcttcagccagttccgtactttcggatgggctacttcggacatatagatagaaaccgaaagtccgaaaggcagcgcgaaaagaatggcaaacaagctcacccacaacgtaccgccaatcaaaggcaggaagccgaactgtgcggccggagtcgctgtcggaaaccattcggctcccgcaaagacatctttcacggaaatggtgttgtcctctataaaatgcaccgcatccggatgaacgataaactgctgcggaacaaaagccacgatacccggtgttttctccaccagttccgttatcttatctcccgcatactcatagacagctccgagttcctcctccgtataatattgtgtaatatcctccagacgaaaaacccggatagggagatcttccccaccgagttccttccaattggttatctccccgtcaaaaacattctttatctgagccggactcagaacgcttaccttattacttttattcagcgccagcacataaccttcctcgatcactttgcttctgaatagcccgaaagcctccgtaaacaggaagagtacaatcagcagaatcgtaatacttgttacgaaaccgctgcaagtcagaatcccttctataatcttttccaaaaactttttcatacctgtcgatttctgatgcaaagaaagcggctccttattaaagaggtgtgactaacgtttgaaggaaatgtttcaatcttgttacatttatgttacaaacaccttttacccgccagatgcaatagaaatgtaacatccgattgctttatttgcatccgtattcatttacatccgtacaaaaaagaagatttatgaaagtgagaagaaatttattaatagccctgtccttactgtcaatcagcgccagcgcgcaacgcatcaaaggcagtgatacggtactacctgtcgcccagcagacagcagaacggtttatgaaccaacacccagacacccgtgtcaccgtgaccggcggaggaaccggtgtaggaatttccgcgctattggacaacacgacggacatcgcaatggcttcccgccctatcaagttcagcgaaaagatgaaaatcaagagtgcgggagaagatgtagccgaaatagttgtggcgtatgacgcccttgccgtagtagcgcatccttccaatccagtaaagcaactcacccgccaacaactggaagacatctttcgggggaaaatcaccaattggaagcaagtaggcggtgacgaccgcaaaattgtggtttactcccgcgagacctcttccggcacttatgaatttttcaaagagagcgtactcaaaaacaaaaactacatggcgagcagcctttccatgcccgcaacgggcgccattatccagtcggtcagccagaccaaaggagccatcggatatgtcggacttgcctatgtgtctccacgtgtcaaaaccctttccgtatcctatgacggaaaacattatgcagcccccacagtagagaatgccaccaacaagacttatcccatcgtccgcccgctttactactattacaatgtaaagaagaaagcggaaatcgatcctctggttcagtacattctttctcccgacggacaggacattataaaaaagagcggttatattccggttaaataaaaaaaatgtcctacttttgtagcctgaatcatgtattagcataaaacgttatgacagatattaaaaacgaagaagtagcaagtgaaaaaaagagcttgaactttatagaacaggcagtagaaaaagacttgaaagaaggtaaaaacggtggaaaagtacagacacgtttcccgcccgagcccaacggataccttcacatcggccatgccaaagccatttgcctcgatttcggcattgcagaaaaacatggcggtgtatgcaaccttcgtttcgacgacacaaaccccaccaaagaggatgtggaatatgtagaagctatcaaagaagacatccaatggttaggctaccgttggggaaatgaatattatgcttccgactacttccaacaattatgggacttcgccatccgtctgattcaggaaggtaaagcatatatcgacgaacagagctccgaacagatcgcgcagcaaaaaggcactcctacccaaccgggtgtggaaagcccttaccgcaaccgtccgattgaagaaagtctcgaacttttcaagaaaatgaatagtggagagattgaagagggcgctatggtgcttcgcgccaaaatcgatatggccaacccgaatatgcacttccgcgacccgattatttatcgtgtggtgaaacatccgcatcaccgtaccggcactacatggaaagcctaccctatgtatgacttcgcgcacggtcagagcgacttcttcgaaggggtgacccattcactgtgtacgcttgagtttgtagtacaccgtccgctctacgacctcttcatcgactggctgaaagaaggaaaagacctgaatgacaaccgtccccgtcagaccgagttcaacaaactgaacctgagctatacgctgatgagcaaacgtaacctgctcactctggtaaaagaggggctggtgaacggatgggacgatccccgtatgccgaccatctgcggtttccgccgtcgcggttactcgccggaatccatccataagtttatcgacaaaattggttataccacatacgacgcactgaatgacatcgcactgctcgaaagttctgtccgcgaagacctgaacagccgcgctacccgcgtgtccgcagtaatcaatccggtgaaactcgtcatcacgaactatccggaaggacaagtagaagaattggaagccatcaataacccggaagatccggaagcgggaagccacttgattgagttcagccgcgagttgtggatggaacgtgaagacttcatggaagatgctcccaagaaatatttccgcatgacacccggacaggaagtacgtctcaagaatgcttatatcgtgaaatgtaccggctgcaagaaagatgaaaacggtgtgatcacggaagtgtactgcgaatatgacccgaacacccgcagcggtatgccggacgcgaaccgcaaagtgaaaggtacgcttcactgggtgagctgcaaccactgcatacaagcagaggtgcgtttgtacgaccgtctgtggaaagtagaaaatccgcgtgacgaactggctgccatccgcgaagcgaagaattgcgaggcactggaagccatgaaagaaattattaacccggactcattgaaagttctccctaactgctacatagaaaagttcgcagctacactgcccaccctctcctacttacagttccaacggattggatatttcaatattgacaaggactcaacaccggaaaatctgatcttcaaccgcactgtgggattaaaagacacgtggggcaagatcaataaataaaatataaaataatgagtagaaaaaacattccgtctgaaaaagaagaactggaaaaactgatcacaaactacgaggctgcaaaagccgaaaacagacaactctatctggatggagaccaattggctgatatctccgattggtatgcctccagaagtaaatttgaggaagcgcaagaagccgtcacttacggacttcaattacatccgggaaacaccgacctgctagtggaacaggcatacctttatctggacacccggaacctgcagaaagcaaaacaggtgttggattccatcaccgaagcgtatgatcccgaagtgaaaatgctgaaggccgaattgttactgaatgaagggcaactcgaagaaacccggtcactattagctaccattgaagatgcggacgaactcggaagaatctgcgaggttgtctatctctatctggagatgggatatcccgatatggcaaaagaatggatggaaaaaggggagaaaacatactctgagacaaaagagtttatggctctccaagccgattacgcattagccacccaacaattggactcagcaatcaagatatacaatcaattacttgatatagagccttataataccccttattggacaggactggcaaaatgctacttcttccaatcaaaatggagcaaggctatcgaagcctgtgatttcgcattggcagccgatgaatctgacggagaagcatataccaccaaggcacattcctttttccaactgaacaacttcgacaagtccatcgaaaattataagaaagcgatggaatacaaggccgtctcccccgatatgggctatatgttcatcgggctgtgttacagtgccaaagaagattgggaaaaagcgaatgagtattatgacaaagtaatcgattttttagaaaaaaacaatggtaatgagtctgctttatcaatagacatttataccaataaagcgaatgccttagccgaattgggaagatacaaagaagcacatcagacttgtaagaaaataagcaaaatccatccgaaagacgcgacaatcctcctgaccgaaggcaaaatctacttgctggaaagaaaacttgaaaaagccagaatctgcttcatcaagttatcggatatagattccagcatagatatgtattacatgatagcctgtgcctatatggagaacaactatgagatcgaaagtcaatattacttagagaaagtatatgctcttgatccgaaatttgaagacgttgcggagaaattgagcgtttgcagtctggcttacggtgacatagaaagttttttcaaatataacaacgactgcgcgcatccggtcacagaggaagcccttgcgggtttgataaattatgcgtgtcagaacgaagaacaacggaaaatattcaagaagatactggcacgtatgaaaaaggagaaaaaggagagtaagaaaaacaaaggaaaataatcatcaatttaataaaccctagccctaaaaatcatggaatcagtagcttttatccagtggtgtctggatcatttgaattattggactatcactttattaatgactatcgaaagttcctttatccctttcccttcggaagtagtcatcccgccggcagcatataaagccgcagtcaacgacgagcttaatatctatctggtgattttgttcgctaccatcggagccaatatcggagcattgattaactattttctggcaaagtggttgggacgccctatcgtctataagtttgccaacagccgtttcgggcatatatgccttattgatgaagccaaagtgcgcaacgctgaaacttatttcgacaaacatggtgcgctttccacatttatcggccgactgattccggctgtccgccaattgatctccatacctgccgggctggcacggatgaagttgaccactttcttgctatacaccactttaggagcaggattgtggaatgccattctagccattatcggctaccacttgtccaaagtgccgggaatcgagagtgaggaacagttgattgccaaagtaacagaatacagccacgaaataggctatggcttcattgccctcggtgtgtttatcgttgccttcctggtttataaaggaatgaagaagaaataaacttcaaaacataaaacgcagataaacgcggattttcgcaaatagaaataatcttttgcgttaatccgcgtttatctgcgtttaatcctaagcaatcatccccctgatttacagtgcagccaatgccttatcgtaatcaggttcctgcgtaatctccggcacaagttccgtataggccactttgccatcctttcctatcactaccaccgcacgagccaacagccctgccaacgggccgtccgccatgcgcactccatagctttcgtcgaaatcggagaaacggaaatcagacaatggaatcacgttctcaataccttccgttgtacagaaacggctgtgcgcaaaaggaaggtctttggagatagccaataccaccgtatctttcagtccggcagccatcttgttaaatttgcgtaccgaagtagcacaaacactggtatccagacttgggaaaatattcagaatcacattcttgccattcagatctttcaatgagaaagaagacaaatctgtttttaccaattcaaagtcgggagcgactttacctacttgtataaattcaccgatcagttttaccggttgtcctttgaaatttgttgttgccataatgcatatctatttaaaaattactttatatagaaacaacaattacccaaaatatgttcacggaaaaccttttccaaattgaatttgttatctcacaacgaaattattctagtaacaatttaaaatagaaaatgtatggaaacagtattcaatgagattcaacattcagtaaagaactggtggacttcccttcttctgggaatcgtgtatattatcgtagccctttggctcatgttctcccccgtaagcagttacatagctttaagtattatcttcagcgtatctatgctgttcagtggaattttggaaatcattttcgccatcagcaacaagaaaggtgttcccagttggggatggtacgttgtaggaggaatcatcgaccttattctaggcatttacctgatcgcttacccgatggtcagcatggaagtcattccgtttatcatcgccttctggctcatgttccgaggtttctcttctaccggctattccatcgacctgaaacgttacggaacccgcgactggggatggtatatggcattcggcattctggctatcctctgctcattgctgatattgtggcaaccagccataggagccctttatgcagtctacatgatctctttcacattcctcatcatcggacttttccgtgtcatgctttcatttgaactaaagaatttacataaaagaaaataaaaatctttcggcacttactttggtattttgtttatctttgtaggcaatttacatgaatcaactaattaaacagaaagaaaattatggcaatgcatacatggtttgagtgcaagatccgttatgagaaagtaatggaaaacggaatgcagaagaaagttacggaaccttatctggttgacgcactcagctttacagaagcagaggcacgaatcatcgaggaaatgactccgtttatctccggagaatttaccgtttcggacattaaacgtgccaactatagtgaacttttccccagtgacgaagaaagtgccgatcgctggttcaaatgcaaacttatttttatcacgctggatgaaaaaagcggcgcggagaaaaagacatccactcaagtgctggtacaggctgccgacctgcgcgacgcggtgaagaagctggacgagggaatgaaaggtacaatggccgattatcagatcggaatggtatccgagactccgttgatggacgtctacccttacagtgccgaaccgaatgacaaaccggagtttgaccccgcaaaatcataaatgacaatgagtattgctgacaatttaaagcaagtactggccgagctcccgcaaggagtccggctggttgctgtctcgaaattccatcccaatgaagcgatagaagaagcatatcaggcgggacagcgtatttttggagagagcaaggtgcaggaaatgacagctaaatacgaaagtttacccaaagacatcgaatggcattttatcggacacttgcaaagtaacaaaatcaaatacatgataccatacgtagcgatgatacatggcattgatacctataaattactggcagaagtcaacaagcaggcaggcaaagcaggacgtaccgtaaactgcctgttgcagatacacgtggcacaggaagaaacaaaattcggtttcagccccgaagaatgcagggaaatgctggatgccggagagtggaaagcattggcacacgtgcgtatctgcggcttgatgggaatggcaagcaacaccgataatatcgaacaaatcaacggtgaattccgtttattgagcagtctctttaaagagattaaagaaaactggttcgctgactcagacgtctttcgggaattgtcgatgggtatgtcgcacgattatcacgaagccattgcctccggaagtacgttagtacgggtaggaagcaagattttcggagaacgagaatataatatttaaccaattattatcaccatgaccgatttaaaaactactttcgcagggctttccctcaggaaccctataatcatcagtagctcgggactgaccaacagtgtcggcaaaaacaagaagctggccgaagacggagccggtgctatcgttctgaaatcactgttcgaagagcaaatcatgctggaagcagaacaactgaaagatccagctttctatccggaaggcagtgattacctggcagagtacattcgtgaacacaagttatccgaatatctgactttgataaaagaaagcaagaaggtatgcccgattcctatcattgccagcattaactgttacagtgattccgaatgggtagactttgccaaacaaatagaagaagccggagccgatgcgatagagatcaatattctggctttgcagtcggacatacaatatacatacggttcttttgaacagcgtcacattgatattctccgccacatcaaaaaaacggtaagcattccggtcatcatgaaattgggtgacaacctgactaatcccgtagcactgatcgatcagttgtatgccaacggtgcggcggctgttgttctcttcaaccgcttctaccagccggacatcaacattgaaaagatggagcatatctcaggcgaagtattcagcactgttgccgacctgggcactcctctccgttggatcggcatcgcatctgccgcagtagacaagatcgactatgcagcttccggtggcgtggctaacgcagaagcagtagtcaaggctattcttgccggtgcttcagccgtagaagtttgcagcgcgatctaccagaatacaaacgcattcatcggcgaagccaaccgcttcctctccgcatggatggaacgcaaaggcttcaacagcattgcacagttcaaaggcaagctgaatatcaaggatattcaaggcattaatacttttgaacgtacacagttcttgaaatacttcgggaagaaagaataaagattaaaggaagaatttattttaaacgaagaataaattttgaatgaagaatgaagaattatctgcgctctaatgccgcatagtaaattcttcattcttcatcttttaatttttaatttcttctacagcaggttacttgccagctcgcttagctcgctccgttctccctttaccaggttcacgtgcgcaaagattttctggtctttcatacggtcaatcatatataccagaccattggactggctgtccagatacggctggtcaatctgttggatatctccggtaaacaccatcttcgtaccttctcccgcacgggtaatgatggtctttatctcattcggcgtcaggttttgcgcctcgtcgatgatgcaatacatttcgctcaagctgcggccacgtataaatgccaaagcctcaatgaccaactgttcacttttctgcatatcttctatacgcttcacttcagtagagttggcagcaaactggcgttttatcacgttcaagttgtcgaatagcggctgcatataaggagccactttctcctgcgcgtctcccggaaggaaacctatatccttgttggaaagcgcaacgacagggcgtgccagcagaatctgcttgtaatcggtcagtttgcccaaagcggcagccaatgccaacagcgtcttacccgttcccgcctttccggtcaacgctaccagcttcacattcggatcattcagaatctcaaaagcaaaactctgttccgcgttgcgtggttcgattccgtaatttttacccttcatcacccggcagatagaatgagtaaaaggattgtaacgtgccagcaccgtattccggtcactcttcagtacgaaacattcgttaggatgaatcagatccttaaaatcaaattcactcaagtcgataccctccttagaagaataaatacggtcaatcaatgccggatctatattttcaaagatttcattggatttctcaaagacatccacattcaccaccttgtccgtgatataatcctcgcacagcagaccgatggaacgcgccttcatacgcaggttcacgtctttggtcaccaataccgttttcattttcggatatttggaggcaagaaactcggttgccgccaaaataaaatgatcgggcttcttcgccggaaaagcagcccatacttcgggagcctccacctgaccggtcaccacaaacaggcgtcccaagccttcgcccagcttcactcctttcgagaaaatctcgtcactcgtcagcgtatccaactcacgcacaaactcacgggcattgaaattaatctgctcgtttcctttcttgaatttatccaactcctcaagcacgacaaggggaagataaatatcattttcctggaaattcttcaagcaattataatcgtgaagaataacattggtgtctagcacaaaatttttcttagttcccatgatttcttagatttaaatgttgatatttgcaatctcaattcgtcaacctcacttatcgcagtccggttgacggttctaaagataaacaaattagcgggcaataaagattgcccggcgttaaatattataaaacatggactatcagaacactttaaagtacttatatgaaagtgtacctatgttccagcaagtagggaaagaagcatataagccgggattggaaaccacacaaaaattagacgaatatttcggtcatcctcatcaacaattcaaaacgatacacattgcgggtacgaacggaaaaggttcctgttcgcatactatcgccgccgtattgcaatcggcaggctaccgggtaggattattcacctccccgcacctggtggactttcgcgaacgcatccgcgtcaatggcgaaatggtgcccgaagaatacgtagttgactttgtggaaaagcaccgtcctttcttcgaacctctccaaccttcgtttttcgagcttaccaccgctatggcattccgttattttgccgacagaaaagtagatgtagccgttatcgaagtaggaatgggcggacgtctggactgcaccaacatcatccgtccggacctatgcctcatcaccaacatcggtcttgaccatacccagtatctgggcggtacactcgaaaagatcgctgaagaaaaagccggaatcatcaaggaaggcgtaccggtggttatcggaagagccagaggagcggtgaaaaaagtattctccgcaaaagcggaggagatgaacgcccccatcacgtatacgaaacagactgccgcgggcaacgacgtcgctatatatagctatccggaattacagaaagaaaggaacaacttttacgaaatgacgcggcaaggcctcgaaatgttcaaaatgctacaagacaaacaccggaaaaatgagaagtctctggagaagttactgtctacgttcaatctggacaatgccatacgcgcgatggacagaatactcgacaaaagaaaaagcgcgataaaactcagcaataatcattttcaggacggtatttttctggaacttaccggtctctaccaagtcgaaaacggctttactatcctgaccgcccttgacgaactggtgaaaatgggatatcacatctcacccaagaactatttcgagggcttttccaatgtatgcgaactcaccggactgatgggacgctggcagaaagtgtacagctatccggatatcatctgcgacaccggacacaatgtcgacggaatcaagtatatctgcaagcagctcgaagctatccgggcaaacgacggaaaaaagatccatatcgtattcggtatggtcaatgacaaagatatcagcggtgtactgaaaatattgccgaaagacgccacctattatttcaccaaagccagcgtgaaacgcgcgcttccggagaacgagttgcaggaactggctcagaaagccggattgaaaggcaacgcttaccccactgtggtagaagcggtgcaggcggcaaaaaaagactgccccccgaaagacttcatctttgtgggaggcagcagtttcattgtcgccgatctgttagcgaatcgcgatacactcgatctctactaacgcgttctttggcagagcttttacggcaatcgccgagcgtgccgggaaagttctgtcaaaataagtgacatacacaccattcatccccgcaaaaagggacatatcctgaagaaacacggtggttttgacaatgtcgtccattgtcaatcccgcctcttcaagaatgtactttatattttccaacgactggcgggtctgtccttctatcccttccgccatctgccccgtagcggcgtcaataggcaactgtccggacacatataccactccgcccgcttccatcgcctggctgtacggaccgatagctccgggagctttctcacagcaaattacttttttcatatttctataattgttatttatataaggcacaaagttatagaaatattctatcccctctcataaaatatcgtttttaatatatccagccgtctcttttattttggcttttccaatataagtagatttctctcattgatatcagaaaacgaaacataaacaaaaaacctcctgtgaaacgaatctcacaggaggttttttattatttgttcgaaaagattattccgctttttcttttgcaggagtttcagcaggtgcaggagcagcttcaaccggtttttcaacctttacctcttctcttgatacgtttaccgtaacgttgacagcagaaggttgtccctggtaaggcatacggttcttcgggtcagcaccatattggttaggacctacagtaccgtcagcaaacaacatataaagtccgaaaatagcattcacgataggaatgaacatcaacagaatcaaccagccggatttattcaagtcgtgcagacgcttcacgccctgtgccagagagaaccacacagaagcaaccaaagcagcaaggccgatcaacaagccgaatacagagccaccggcagaaccgctggaagcaccaaaaataaaagtacctacacccaacagcatagcgatccaagttactataccaccaacaataccagacaggaaatattcgattctacgaatacgaccgtcaaaagaaaaaggagctttgaacataatttataaaatttatattaataaataagtgagttgttcatcgtgcatttattacatggaagcaaagttataaaaaaaataaaataaaaaaagttctttaaggaaaagaataaaaaaataaccgaatcccgtgcagtatttcctatttccctgcatttaacctatgaaacaaagaaaaagtagcaaatcaaaccatgtatcattaacctacaacctgagcttgaacaaaaggggaaaattaaaagagaaagagagagtttttttaattaacgtccccaaatgaaaggggaaggtttgaaaccttccccttttccctttcatcaaaatcgagggtgtcaaaatgaactgcagtatttttgaatcagctcatccacattcggatctcccagttccttagctttcttaaagttcccgcaagcctcgtccttcttctgcaactgtatctgacaaagccccaacaagcgataggcttcggcatatttcggatctgttttcagtatgtcattcagaatacgaaccgcctcttcataacggcctacgcgcaaattcaccactgcgtgttccgcctgataagtcaagtcggcaggattcagctcgatagccttagcgatatcatccaacgcacgctgatactggcgggctttcagtgccgcctgctcacggtaataatagaatacatcattcacttgtcctttcactgcggtatgataggcgtcataatcaagcatggcattccgtgcctgaccggccgccatattcatttgcgcacgttccagcagataaggagccaactcagcggttatcggctgcggacaacgggcaatgcaactatccatcaaggtcaagacctctttcgggtcgcttttcatcaattcctttgtcttggcggcactgaagaaggtagcgggagaagcaagattgctggcgtttactttctcataagcagccaaagcgcctgcatagtcttgcttggcaaacaggatatcgccttccatctgaatgtaaacaggcaacggatcaatagctatcgcctgacggacattctccaaagcggtatcatacgtccaatccttatacgtcttttccggcttggacagttggtaagaatacatcatcttacctatattataatatgcatcgtctttcttctgagccaccttcaacgcgcggttaaagtcgtcaacggctttatcataccaagactggtcatccttgcctttggctatatagtaattcgcacggcggagatacccgtccgcgttgttcgggaactgagcgataaaatcatccaagagttctccatagtcgtctcccgacatctgagaggaagccataaacaaatagaccaatgcctggtcttccgtttcgggcaatcccttccggataccaatgcttctcaacgttgcatcccccagagaaagggcattgatcttctgcgccatcgcaaaagccgcccctgccgcataacaagtggttatcgtgtccagccccgatgacttctgcgcaatgccgaacacctgtccttcctcgttcatcaccggacagctcaccatcttgtctttcatccgcatactcaatgtataataatggtgctctcccgccactttggatacctccttcaccttgccggaaacgcaggcgatactcttctgcgtggaataaggaagcatccacgcatcacttcccactgccggagcagcagtcgccaccaccagcgcaggcactttcttttcagtaattcctacacggaactttatgacatcatacatatcattcgctcccaatatccggctgaccggcatttgcttaccgtccgccgtcacgaccaccgcacgctccgctcccttgaaaagagaaaaatcggataatgccagtccgtcttcggagacaaaaaatccgttaccggtattcagcattttatcattcttatcgtaggtcacgaccgagaagaccgcacgtttcgccttctctacccatttaggggtctgcgccatgcttccctgcaccagaaagaaaagcgccaaaggtagaattaaaatcttcttcataatattactcattgtttctttgtttcaccgcctcgtaaatcaagatacccgcagctacggagacattcaatgactcgatagtgcccagcatcggtatcttcacccattcgtcgcagagcgccaggttatcgtatgacacccctgtatcctccgctcccataatgatacacaacggtcccgtataatcagctttcgtataatcgtaatctcccttttcggtagccgccacaatacggaagccactgtctttcagatactgaagcgtcgagcgcaagctctgttcacgacatacgggaagcgtatgcaacgctcccgccgatgttttcaccgcatcggcatttaccgacgcgctgccacgcgcgggaataatcaccgcatctacggcggcacattcgcaagtacgggcaatcgcgccgaaattgcggacatcagtcactccgtccaacattacaaaaaacggattcttgccttgctcaaacaggaaaggaacaagatcctccgtcttctgataagtcacggaagaaatgaaagcgatcacaccctgatgattcttccgggtgatacggttgatacgctccaccggaacacgctgaacgggtatcagcgtacctttcaaagctgcaaaaagctctttggaaagatcactctgaatatctttcttcacgaggattttatctatttcttttccagcctgaatggcctctatcacggcacgaacgccgaaaatcatttcacttttgtcaagcatcttatttatttactattgtactatatttacgaattactatttatacattaccgtaacggcaatgacacaccgctaatcgctgttcaacagcgccttagcgttgctgagcgcggcttcggtcaaagtggcgccactcaacatatgggctatctcctccacccgctcctcatcagtaagacggcggatatggctgttggtttccgtatcgctatctttcttgtacaccttataatgcgcccgtccacgagcggcaatctgcggcaggtgggtaatgctgatcacctgacggttctgctcgcccatctcctgcatcatatccgccatgcggtcggctatctcaccggaaactccggtatctatctcgtcaaacacgatggtcggcaacttcacggctcccgcaatcatagctttgatggaaagcatgacacgagctatctcaccccccgaagccacagaagaaatattctgcaatgtaccgttcttgttggcggaaaacaagaagctgaccgtatcttctccctgcaatccgggttctttcttcaatcccatctccacctggaaacggacattcggcattcccaacggaatcaggcgggtggccaactgtttttccacctcacgggcagccttgacgcgggctttggtcagcaaggcagcctgctgcttcacctgtttgaactgttcctccttgcgggcggtccattcggcaatccgttcatcgtatgaagtgatgtcggacagtttgacacggtattcttccgtcaaagccagcaactcatcaagcgtctgtacccgatgtttctgctgcaaggaataaatcaagttcagacgctcgttcacttcctccagccgtgccgggttgaactccaccgattcaccctgcgaagagatttcatgcgcgatatctttcagttcgatataagcgctctccatacgttccgccagttctttggcaggctggtagactttttgcagattgttcagcgtgttcagattgtccttcagataagaaagcagtccgccttcgtctgaggcgaacacctgctccacccggtaaagccctgccttgatttcctccgcatgactcagtatttcagcttcctgttccaactcctcctgctctccttccacaagacgggcttcttcgagttgctccaattggaaacggatgtaatcttcgtccgaacggcttttctcggcaagcgagactaagtccgccaattcacgttccgtctgcttccatccggcataacaggtgtggtatttctccaacgcagtgtcgttatgcgccagaatatcaagcacattcaactgaaagccttccttgttgagcaacaggttctgatgctgtgagtgcacgtcaatcaaccgctctcccaactccttcacctgcgccaacgaagcgggcgtatcattgataaacgcccgactcttaccggacgcctgcacttcacgacgcaaaatgcactcttcatcatattccagctcattgtcttcaaaaaacgggcgcatcccataagccgatatatcaaaacgagcttctatgatacatttagaagctccgcgacgaattgactttacatcggcacgctgtccgagcagcagcccgatggctcccagaataattgatttcccggctcccgtctcacctgtaataacggaaaagccggtgtcgaaactaatatccagtttctctatcaatgcgtaattctgaatgtatagtgaacgtaacatttgaataagttgagagttgagagttaagtgttgagagttaagtgttttaattcatcagacaggcggtcgatgatatcccgtgccacttctgtcttcgacttgagcggatagtcggtacggcctttccggtcgatgatactgattttgttggtatcatgacggaaaccggctcccgcgtcgttcagagagttgagcacgataaaatcgaaattcttccgttcgagttttccttcggcattctgctgctcgttgttcgtttcgagggcaaagcctaccaacaactggtcttttcttttgacagcccccagactggcggcaatatctttggttgcccgaagatgcagcgtcagctcttcttctttctcgcgcttgatcttcttgtcggccaccatttccggacagaaatcagctactgcggcacacagtatggctgcgtcggaatcgaagaaacacgcttgcgaagccgcatacatttcctccgccgattccacatcgatccggcgaatacgggagtgccgcgtttccagttgcacaggacccgcaatcaacgtcacctccgcaccacgacgggcgcattcttccgccaaagcaaatcccatctttccggaagaatagttgccgatgaaacggacgggatcaatcttctcgtacgtcggtccggctgtaatcatgaccttctttcctttcaactcaccgtttgcggcaaaaaactcgtccaatacccggatgatattttccggttcttccatccttcccttccccaccaagtggctggcaagctctcccgtgcccggctcgatgatatgattgccgaacgaacggagaatatccagattcttctgggtagaaggatgcgcatacatatcgagatccattgccggagcgacaaacaccggagctttggccgaaagataggttgtaatcagcatattgtcggctatcccgtttgccatcttgccgatggtagaggcggtggcgggagcaatcaacatggcatccgcccacagccccaagtctacgtggctgttccacgttccgtcgcgctgtgcaaagaactcgctgatgaccggcttgctggtcaacgccgaaagagtgatgggagtaataaattcttttcccgccggagtaatcacgacctgcacttccgctccctgcctgataagcccacgaatgatgtagcaagccttgtacgcggcaatactgccggtaattccaagaattatcttttttccttttagcattatttcgttatcagattgctcatttcacgcagacggatttttgtcaataccgctttcgtattcagcgtgaaatcactattcaaaatccaactgtaatatccgggatctttcttcaagacctcagctacagacattcctttgtactttccgaagttgaacacttccactccattatcatcatagaccatgcgaccggcaaagtctacattcttggaatagctggagtagtccgccaaaaacgcaatatcgttctgcaactcgtcatagcggtcgagctgcgctttcagtacctcataagtggcacgtgtgtccgcctccgccgtatgcgcatcctccagattcttttcgcagtagaatttgtaggctgccgaaagggtgcgttgctccattttgtggaaaatcacctgcacgtccacaaatttgcgcttcgtcatgtcgatatccactcccgcacgcagaaattcttccgccagcacaggaatgtcgaaacggttggagttgaatcctgccaaatcgcatccttcaatgtcacgggcaatgctctttgccacttccttgaaagtagggcaatccgctacgtccgcatcgtaaatgccatgcacggcggaagaggcttcgggaatatgcatctccggattgatacgcaaagtcttggattcctcattcccgttcggataaactttcaaataacagatttcaacaatacggtctgtgttgatattggttccggtcgtctcaagatcgaaaaagacgatgggatttttcaaatttaatttcatttctggttattttttcgtttcaccacagaggacacagaggacacggagggttgtttaataaatattcaaaattttcctccgtgtcctctgtgccctctgtggtgaataattaatcattcaacatcatcggcatcagcaacatcagcaagtcttcgttctcttcctgctctacgggaatgattactccggctcgtgagggatcggccaattcgataataacttcgtctgcggaaatgttgttcaggatgtcgatcaggaacgtagatttaaatccgatactcatggcagctcccgcatattggcacacctgtgtttcttcggcagaggtggagaagtcgatgtcctgtgcggaaatgacaatctggttttcctgcatacggagtttaatcaagctgcttgcctgcgaggagaagatagacacacggcgcaaagctcccatcagctgctggcggtctacggtcaacttatgagggttattttgaggaattaccgagttgtagttcggataacgcccttcgatcagacggcaaaccatgcgatagctttcgagcatgaacacggcgttgcgttcgtcgaattcgattgtcaccatgccctgttctttcggcagaagattcttgagcagcgtagccggtttcttcggcaggatgaacgccgcacgctcgttgcctttagccgccaatgtcttgcaacgcaccagcttatgaccgtccgatgcgaccatcgtgatgtcttctgtcgtaatatcaaaataaataccgttcatcaccggacggagttcgtcgtcagcagttgcgaataccgagcggttgatacctcccagaagcacttccgcttccatctccacgcgaactgcattgtctcccaatgtagccgactgagggaattcgtccgcattctgtcccatcagactatattttccgttctgatactgcaccgtaatttcataattgtccgggttgacatcaaacgtcaatggctgttccggaatctctttcagtgcatccagcaacgttttcgccactacggcaaaacgtccgttcgtatcgctttcattcacttctacggtagtaaccatcgttgtctcgctgtcggatacggtgacagacaatgttccatcttccagttcgaagagaaaacaatcgaggataggcaatgcgtttttcgaattgatcacgcggcttatagcctgtaaatggctagaaagagcagtacttgaaacgataaatttcatatattttcgtgtatttaagttttaaatattctaacgcacaaagttacgaaaaaagattcgggcagcccaataaaacaaaagaaaaaacagtctttgtgtgagggatattcctaaaaagtcgtaacttcgccgcagaatttaaattaatcgcaatggaatttacaggaaaaatcatcgctattctccctccgagaggtggagtatcaagaacaagcggcaacgagtggaaatcgcaagagttcgttatcgaaaatcacgaccaatatccgcgtaaaatgtgtttcgacgtattcggcgcggacaaaatcgagcagttcaatattcagatgggcgaagaactgaccgtatcatttgatattgacgcccgtcaatggcaggaccgttggttcaacagtatccgtgcatggaaagtcgaacgtgtaggcgcaggcgctccaatggctccgggtgctcccgttcctcctccggctccgtccgctactccggaatttactctgggcgacgcgaaagacgatctgcctttctaaacaaaaaaatcaaggcgtaacgatacgcactgaaaaactcccggtgaatttgatttctgccgggagtttttttatgcccgcactttgtaaagattccgcccacaggtaaacacttctcagcccacagatgaacaacacccggacacgggctcaggggaataagcccacaggtgaaaaaaggtcagcaataacgtcggcaaccaaaacccagaaatactatcgctgatagtatttctattctcttctaatctcttcttttctcttctcttgggttatggttgggttatggttgggtttttgcgccctgccagaaggcgtttcagcgcttttagtttttgcaaaaacagtgttttttcgcaggtagttttttcacctgtttttcctcttttcaaatccggtttttctccgttcggaaatctttttccaatcaacccgaaatgatttttccagcttgtctttagtcggctttatacttcaaaacgatggtgggatatgccacttcatcagcacaagtaaactgagcaaaaagtatgaaattgcgaaaaaattccgcattgcgcacaaagaaatcgggcacgaaacagacctgtttttccacttgccggaagaggtgttcgaaatctgccatcagcataaaatgataagaatcggacaggttactcatccccgctttataggtaacagcactgtcaagcacttcgcctttatccaaccggagtatatagtccgacagactgtcttcgtccggtgctaataataaacgaccggcataaaaggcagcgtacagctccgaagccggctccacgaaactagaaagttgcgtaaacaacgttgtctgaggcagccggtagacaggataggctttatccgcagtataacaaaaagttatacggggattcttatgcctttctacagaggatgccgtatttgtcagggagcgcatcatcctctcagcctccgtcacatcgggcacagaaagactcagcacagacgccgcgtcccgcaatgtatcttcccgttggaaaagacaggtcaccaaatcatgcccggtgttttccatcagataacgcgagatttcacggtttctttcctgcattccgctatcatcgtccacccctgccggtatatattcacgactgtcgccataggcaagcagagagttccagtccgtgacactttgtttgctaaaatagaaagtggtggaaggcaacacttcgcccggaaatcctttgacagattcttgttgccgaagctggttgataaaggcgatacaggtatccggatcatgactgacacctgtaaaatagacataatcgtccttcatcttcatgtcaaactccgtccaccctatcatgccgttcacacgggtataaatggtagcgaccgctctgctttttttcggtgcgtttatctgcatgaaagcaggatcatccgccagagaatctcccttcttgcaggtatcaatgacttcttctatcagttttttctggaagctcaacaccatgaaatcggacgtgagatagcaagcgaggaaatcaccgtccgccatcgggtagattattatcttttctcctttgtaatcgaaggttttcggcggatagagtgatgaaatgtatttttgcacgaatctgtctatcagctctttatcaccttctcccaatctgcaatagagcacttggtcgcgttcgctgtccggagcatggaaacttatcagcatttgattcatttgccgactcaatccgtggggactatcttcggaaagttcgtacagggaatgttttaagtaggaaaacagcttggatacatacaggtattgccgttctttgctgcaagtcagattatcggtttcagtcacaaactcaagcacatcatcggtagcaaacactgccgaagtagtggcgggaaccagctcgtaaagattgaaatttctctgtccgtcagccgccgacagcctgaaaaaagagtacatgacgaaacctgcgcacagaagtacaacagaagaagtgaccgctattttcactatcgtacgaagtttcataatatttgctgtttatctgctcggtgcaaaaataataatttctacaaagaaaacaaaacttttactaaaaaaccaccggtaattaaagaaggatttccaatccgtcaaatgccaggtgaatattctccggaagtctccgttcagcttcggcatgcaagcccatatcatgactcatgtgtataaagtatgtcttctttgcctgaatgcgccgcgcaaccgccaaagccgcctccagattctgatgtgtaggatgcggggctatgcggagtgcattcacaatcagaacatccacgcctgccaattgttcataggattcttcgggcatggtcagcatatcggtgatataaccgagttttccgatccggtatccgagaatcggcaaccgcccgtgcatcacacgcaggggaagcacttcggtatggtttatgtaaaagggttgtcccgccacaatctcttgcaaaggaatattagggacaccgggatacgaatgttccacaaaacaatagggcatacgcgaacgcaatccgcgtgctacgtattcttccgcataaataggaactgaaccaaactggcagaacggacgaagatcgtccagaccgcccacatgatcgtaatgctcatgcgtaatgagcactccgtctatcttctcgaaagggagatgcagtacttgctcccgaaagtcgggaccgcaatctatcaatatgcgcgcatcttccgtctctacaatggcagaggcacgcaacctgttatctttcggatcggcagaagtacaaactgcacatgtgcaaccaatctggggcactcctgtcgatgttccacttccaatgattcttaccttcatacttcattaaattacgtttacttccgggtggatatcgataccgaatttatcgcgtactgaagcccgcaccgcatctgagagtgcgacaatgtcactgcctttcgctccaccccgattcaccagcaccaatgcttgtttatcgtggacggcggcaggtcctaaggattttcctttccatccgcattggtcgatcatccatccggcagggattttcacacgcccgtcaggaagctcatagtaaggtatgcggggatagtcccgctgcaaggcttccagcttttctttcgccacaatggggttcataaagaaactgcctgcatttcccatcactttcgggtcgggcagtttactttcgcgaatctcaataatcactttacggacaatgggcaacgtcggtgcaggatactttgcaagttcctggcgaatcgttccatagtccagcgtgtaccgttcttctttactaagacggaagcggacataggtgacaaaaacggatttgttctcaggacgcttgaaaatgctgctgcgataggcatactcgcattcttcgacagagtagacacgcccgtatccttgaacgttcactgtctctaccgccgttatcaggtctttcacctccactccgtaggctccgatattttgcacggcactcgctcccacctcaccgggaatcaacgaaagattctccgctccataccatccatgctccacgcaacaggctacaaaatcatcccacacaactcccgcaccgacacgcagggatacggtctgagagtcttcggccgtcacttcgatacctccgatgcgggaatgcagtatcagcccgtcgtagtctttggtaaacagcagattgctgccgccgccaatatgcaaaaaaggtgtcgtaacggcaccttgcgcaatatactccttcagttccgctactgaggcgtattccagaaaacgggaggcactgacatcaatgccgaaggtattgtagggcaaaagagaatacatagtctatctgtttaaaaaagttatatactggtgtcttcaaacttatacagctcccatcctccggctttccgacggaagtacaggatgttggagaaaccgttgccgatacctttcaacgcaagaatcttcgttgtcgagttatcatcgtttctctgtccgtagttgatattggagagacgttcggaaggaagttccggtttgaaggcaaaccattggtcccggtcgagcgttgtctccaaaatggagaagtcgtcatccggatcgcaggtaacaaaaatcaacggttcgcgtatgcgccgactctggaaaaggctgtcgacggcaaaacggccgaagaactccacaaagtcctcattgtcgtcctgctcgataggacgcaaattgatggcttccagcatccacgctcctttgatgcgttcaaagtaatactttttcatcatccgtgtcttcacgaatatccactccacttgcacagaggtaagcgcagtatctcctactaaatccatatcttcttctttatcaaacaggagcgtatagtaatgctgcttggtaaataagtcgtcatgcttccaacggtgttcgtcgatgttcagcttcttgtctccattgtagtagggcaacggaaacttcacacgctgacgctgcaacacgtcgtcggaggcaaaattatagatgaaatcgtcgaaagactcgtcggcctgtataggctgcggctcttccggcaattcttcctggtggactgaatcggttttgtaccggatggaatccacctcttttgtaatagatgcgaaggggtcaatcttagctttcttgtttccacaggaactcagcataccgagcagtatgacccctgcaattagttttttcattattttaatttctctcgtaacttttcaagcatatccaccgtcatgctttccaaatcgtaggcgggcttccatccccactcttcgcgagcacaggtgtcgtccagactgtcgggccagctatcggctatgcgctgcttcaaggggtctatttcataaaccatctcaaactgcggcacgtgcttcttgattgcctggtatatcgtttccgggtcgaaactcatggaagcgatattgaaagcattgcggtgtatcagtctttccgactcagcttccatcagtgtgatcgccgcgttcagcgcatccggcatatacatcatatccatcaaagtgccttgcttaatggggcacacaaacttctctcctttcactgccgaatagtaaatatcgacagcatagtcggtcgtacctcctcccggaggggtcacattcgaaataatgcccggaaaacggacagcacgggtatcgacaccgtatttattaaaatagtagtcactcagcaactctgtcgttactttcgtgactccatacatggtacgcggacgctggatcgtgtcttgcggcgtcttggtgtgaggcgtacttgcaccaaacgagccgatagaactgggagtgaacaccgcgcatccttgttcacgtgccacttccagcacattccataatccatcaatacctatcttccaagccaatttgggtttcgactcggcaactacggacaacagggcagccaaattataaatcgtatcaatgtgatactcttttaccacagatgccaccgcctgcgcatccgtcacatcagcaattgccgaaggaccggactctttcaattctcctttaggctctgcacccggtatataacctgctacaacatttgtatttccatagcgtttacgtaactccattgtaagttcggacccgatctgtccggtagctccaataatcaaaatgtgttccattttttttctgacttagaataataagcttaaatagtgcgcaaagtaagcacttttttttcagattttaatcaaaaagacattgttattccaagaaaaattgtgtcctttgcaatataacttaatcacataaacaccatgtacggtaaaatgcaagaattcctcagccagacactggctgaaatcaaggaggccggactttacaaagaagaacgcctgattgagagtgcgcagcaagctgccattacagtaaaaggtaaagaggtactgaacttctgtgccaacaattacttgggactgtccaatcacccccgattgatcaaggcttcccaagagatgatgaatcgccgcggatacggtatgtcgtccgtccgttttatctgcgggacacaggatattcataaagaactggaagcggctatttccgactatttccagacagaagacacgattctatatgctgcctgcttcgatgcgaacggcggggtattcgaaccgctcttcaccgaagaggatgcgattatctcggactcgctgaaccacgcttccatcatcgacggcgtgcgtctgtgtaaagcgaaacgctatcgttatgccaatgccgatatgaaggatctggaaagatgtctgcaagaagcgcaggcgcaacgtttccgtattgtcgtgacggacggtgtgttctctatggatggcaatgtagctccgatggatcagatttgcgatctggccgagaaatatgatgcgctggtgatggtagacgagtctcactcggcaggagtggtaggcgccaccggtcatggggtcagcgaattgtataagacacacggccgcgtggatatctacaccggaacgctgggcaaagctttcggtggtgcgctgggaggatttacgacaggccgcaaagagattatcgacctgttgcgtcaacgcagccgtccgtatctgttctctaattcattggctccgggcattatcggcgccagccttgaagtattcaaaatgctgaaagaaagcaatgcgctgcacgacaagctcgtagagaacgtgaattacttccgcgacaagatgaccgctgccggatttgatatcaaaccgacgcagagtgcgatatgcgctgtgatgctgtatgatgcgaagttgtctcagatttatgctgcacgtatgcaggaagagggtatttacgtgaccggtttctattatccggtggttccgaaggaacaggcgcgtatccgtgtgcaaatctctgcaggacacgagaaggctcatctcgacaaatgtatcgctgcctttatcaaagtgggtaaagaactcggcgtattgaaataaaactttttcatatcttccattgttattatcggggtgcattagaagtgccgacaagataacaatggaagatttttttatttatatatggaagaattgactctcacgactcctgcccttcttttctcggcagtctcactgattttattggcttacaccaatcgtttcttatcgtacgcacagcttgtgcggcagttacgcgaccgctatatggagaatcctacggatatcacggtagcacaaatagagaacttacggaaacgtttgaatctgacccgcaccatgcaaggactgggaattgcgagcctgtttctctgtgtggtcagtatgtttttcatttatatcggactgcaactgctgtccgcctatgtattcggagtggctctgctgttgcttatcgcttcattgggcgtgtctttccgcgaaatacagatttccacccgttcgctggagatttatctgggaacgatggagaaaggaaagaataaagacagaaaatgacctgtaaacaaaaaagagggtgtgtcgaaaccctcataaactaaaaggggagttttgacacatcccctttcataacttttatttgtagcttattaagtatgtgtaacttattaacgctgtcccaattgtgagtctacaaagaaaattccggtatcaccggctttcttgattttgtcaacaatgccttgcactgtagcttcttcttctacttgttcgcgaacgaatccccacaagaaatcctgtgttgctttgtccttctcagcagcagctacatctaccagtttgtctaccaattgagaaacatggcattcatgtttgtaaacgtgctcgaatacttccagcggactaccccaaccgttaggaacaatatctattttatcaactttagcggttcctccacgtttgataatataatctgccatagcataagcatgcgccatctcttcctgagactgcttcttcatccaatgggcaaaaccactgaaaccttctttctcgaaatagaaagacattgccaaatacaggttagcagaccacatctcagcagtaatctgttcgttaattgcattttgtaatttttctgaaatcataatcgtatcttttattaagttgttaatgtagtttctttttgaactcattacaaaaataacaagatttcagttcagattgttccatgtaccccgtatttttaaactacattcacactttgattgtagcggtttattttttatttacaccagctcgtcggaagtatatcctttcggaagctcacgacagttatagccggaagccattatttcaccgtatgcaccggcagaacgaagggctatcaggtctccacgcttgactttgttcagatcaatcgcctttccgaaaacatcggacgactcacatatcggacctactacatcgtacgcttccatcggttcttcggaggtcaggttttccatcttatggtatgcctgatacaaagccggacggatcaaatcggtcatacctgcatcgaggatggcaaatttcttcttggctccttgcttcacatacagcactttagatatcaacgtaccgcactgccccacgacggcacgccccaattcaaaatgaagtgtttgataaggacgcagtttcagttgtccggcataggtggcaaaataatctttgaagttcgggatagcctgacggttgggatggccgtaatctatccccagaccaccaccgacatttatatgttctaccagaatccgatgcgcttccaacttgtcctgcaattcattgacacgattgcacaaagcgacgaaatcgcccatatcgagaatctgcgaaccgatgtggaagtgaaggccgataaacttgatattcttcattcccaaagccacgtctatcactttatccatatcctgcatactgataccgaatttattttcggcaagaccggtagtgatattggcgtgagtatgcgcgcctacatccggattgatgcggaaagcgacattggctattttgttttgagcggctgccagctcgttgattacttcaagctcgggaatagattctacattaaaacagaagattccatattctaatccgagattgatttcccagtctgctttacccactcccgcaaaaacgactttattggccgggaatcctgcacggatagcggcacggatctctccaccgctcacacagtcggctcccattccgctttcacggatgatggcaagtaccttcggattggcattcgctttgacagcatagtgtactgaataattaggatatttggcaacctcatggttaatagccgacaatgtatcacgcagcactttggtatcgtaataatagaaaggtgtctgcaaagtgcggaatttatcgattggaaatattcccttcataattcaaaaacttgtttagttggttaaaaaaagcgcttttatcagttcggtaaaagcgctcatattattgatggaattatttgccgttgaaaagcatatcgctcaacgactgtaaagccgccttcttgtcacactcccgaatgaggaaggagatattgtagttgcttcctccgaatgaaatcattcgcaccggtatgtcgcgcatcgcatcaagcgctttggcttcaaaaccgacattttcccattccaagtcacctacaacgcagatgatacacatttctttatcaacggttaccgttccatatttcttcaggtcatccagaatttcattaagatgtttcgtgttatctatcgttacagaaacaccgacttctgacgtacagatcatatcgatggatgtctgataactttcgaagatttcgaacaccttacgcaagaaaccgtgagccaataacatacggctggatttgatcttgatagcagtaatgttatctttggcggctactgctttgatttttcctttctctgtatcattggaaatcaatgtgccgggagcggtcggatccatcgtattcagcaaacgtacaggaatattggcatatttagccggctggatgcaggtaggatgcagaatcttcgcaccgaaataagccaattcggctgcttcttcgaaatgtagctgacgcaccggagctgtcttgtcaacgatacgcggatcgttattgtgcataccgtcaatgtctgtccagatctgaatttcggaagcattcaccgctgctccgatcagagaagccgtataatcgctaccgccacgttgcagattgtctatctcaccataagcattgcggcagatgaaaccttgcgtgatgtagatatccacatccggataaagttcgagctgtgcctgcaacttctccttaatatatacggggtccggctccgcgttcttatcagtacgcatgaattccaaagccggaagcagtacggacttcgcaccgcattcctgcaggtagaagttcaccattgccgtagagatcagctctccttgcgccaaaaccactttctcttcaaacaaagtgaaaaggtctttcgtataggagcggatgtagtcgaagtgagacttgatgacttcgagacctttctgtttatattcctgagttgcgaatagctcatcaacgtgctgtttatatttagcttccagcttattgataatctcgttggcaccctccggattcttcttatacagatagtccgaaatttccaccaatgtgtttgttgttcctgacatagcagaaagaacaacaatcttctgttcaccatcggtaatcaatttggctacttccttcatgcgctgagcagaacctacggaagttcctccaaactttaaaactttcattttcgttactgttttagttatctatatttaaatctatttctattgttctctgccggggcatatattcatcggtcacatctacaatctgatggttggcacaacgatacacccgacccggatattctttcaataattgcagattgtgcgtggtcatcacaacggatgaaccggaactgcaaatattatgcaacaattcaacaatcgatttccccgtttccgtatccaggtttccggtcggttcatccgccaggatgatggacggagaattgagtacggcacgtgcaatcacaatgcgctgctgttcgccaccggaaagttcgttcggcagcttgtatcctttattggacattcctaccaaattgagcacttcttcaatacgttccttgatttcctgtttgttcttccagcctgtggcacgaagtacaaattccaggttattgtaaacggtacggtccgtcagtaactgaaaatcctggaatacaatgcctaacttgcggcgcagttgcgggatatgcttacgtttgatagaccgcatattataatccagtactttagcctcaccgtcaattacatccagttcgccataaagggtcttgagcagactcgtctttcccgaacctacttttccgatcagatagacaaactctcctttgtgcaattccagatttacatcactcagcacacagagttcctgttgatggatttctacgttcttatatcgtatcaacgccccgtcatccatgccgactcccgctttaatttttaattattaatttttatttatttaatgcttcttccatgtactgctatgcctttcctgcaattcacgagcaagatcttcgatacgatagccttttgaagtcagcaatacaatcatgtgataaataaggtcggctccttcgtagatcaggcgttcgtcagtgccgttggttgcttcgatcactgtctcgactgcttcttcacctactttctgcgccatcttattgattccggactcaaacaggctggttgtataagagcctgcgggcatttcttcgtgacgtttgtcgataaagtcttgcaatgctttcaggaacatcacaggttcttcattcttctcgccccaacaggtatctgtacctgtatggcacacaggccctgccggattaacctggatgagcaacgtatcattgtcgcaatcggccttgatagaaacaacatgaaggaaattaccgctttcttcgccttttgtccacagacgattctttgtacggctaaagaatgtcacttttccggtttctaccgttttatcataggcttccttattcatgaagcccaacatcaagactttgcgcgtctcattgtcttgtatgatagccggaacaagtccattcattttctcgaaatccaattccattttattcaatatcttaatttactatttacgcattataataccttcgccgcaaagatacgattttaaatcgggaattttaatttctccgaaatgaaaaacgctggctgccaatgccgcatctgcttttccttgcaaaaagacgtcacggaagtgttctttactgcctgctccccccgatgcaatgataggaacagaaagctgtccagccaaaacggcaagtgcttcgttcgcatagccggtcttcacaccatcatgattcatactcgtgaagagtatctctcccgctccgcgttcctgcgcttccttagtccactcgaacaggtctttatccgtttcgatgcgtcctccgttcaagtaacatttccaaccgttctcggtctgtttcgcatctaccgccaacacacagacctgtgagccgaaattctttgcaatctcatcaaccaatcggggattacggatagcggaagaattgatggaaatcttatccgctcccgcattcagcagacggtccacatcactcaattcattgattcctccccctacggtaaacgggatattgatattagcagcaatccgttttaccaattccgtaaaagtcttacgtccctcatggcttgcagtaatgtccaggaaaacaagttcatctgctccctgttcactgtaagcacgacccaactccaccggatcaccggcttggcgcaagttgacaaaattcgttcctttcacggtttgtccgtcttttatatccagacaaggtactattctttttgctaacacaatcttattttatttactattcaacaatttacaatctatatgcctaagcttgcttcttaaatttttcttattacatcaaatcctcttatataacttctccttattatataaggtatattctgatatgcgaattataaaaagattctcaaatcttgtaaggtgatatggccttcatacaatgccttaccgaaaataactccgggaacaccggcctcatccaaagcaacaatatcatccaccttgcttaccccgccactggccatcagatagagatcggggaatttagccaacatttctttatacaaatcgatagaaggaccactcagcattccatcacagctaatatccgtacagattacttttcgtatacctttatccatataattttccagaaacggaaaaagctcacaggcgctttcgtctttccaaccattgacggctatcttatgatcttttacatctgctcccaaaatgatcttctcactgccgtatatttccagccaatgacagaataattccgggtctttcaccgcaatgcttcctccggttaccatctgcgcaccgctctcaaaagcaattttcaaatcttcatcgctctttactccaccgccaaaatctataacgagagaagtacgtgtcgcaatctgttccaacacccgatagttaacgacatgatgagaagcagcaccgtccaagtctaccacatgaagcctgcgaacaccgttcgcttcaaactctttagctacttccaccgggttctcattatatacctttttactatcataatctccctgggaaagacgtacgcactttccatcaataatatcaatggctggaataatttctatcatctatttatttactatttgacgattcactaaatatttatttcaaacatcgaaatgtttttcatgacacatcatccatactgttaccggcagaggttcaagaaatttgtcagaatcttctctcctgtcttgccgcttttctccggatggaactgggtagcataaaagttatctttatgcaacgcagcactgaacggatgaatatagtcagttatagcagcagtaaagtcgcaggtcggcacatagaagctatgcacaaaatagacaaactcctcttcggtgaagctttcaaacaatttgctattcgtttgcccaatggtgttccatcccatgtgaggcactttatcttcatgtttctgcgggacaaaacgttttacgtccacatcgaagatattcaaacaatcgacttctccttcttcggaataccggcacatcaactgcataccgagacaaattcccaatacaggctgacggagattctttatcagttcgtccagtctcgtagctttcaagtggttcatggtagtttccgcctctcccactccgggaaaaataactttatcagccgattggagttcttctttatcagcagtaatcaccgcttctacacctaaccgctttaaggcataatctacagaacgaatattgccggcattgtattttacaactgctactttcatcagctaaatattacagttttatttttgtaagtcaagactttgcgctcgatgtgcttctgcactgcacgcgaaagaacgattttctccaaatcctttcctttatttacgaggtcttcaatggcgtctttatgagtgatgcgcactacatcctgttcaataatcggtccggcatccagctcggtcgttacataatgactggttgcaccaataatttttactcctctctggaaagctgcatggtaaggcttcgcccctacaaacgcgggaaggaaagagtgatgaatattgataatcttattcggataagcgttaatcatctgttcggagatcacctgcatatagcgtgccaatacaataaatgtaatcttatgtttggcaagcagttccatctctttgcgctcctgttcttctttcgtctccttggtgatagggaacagatagaaaggaattccgaaacgttctgccacgtgctgcaaatccggatggttacttataataagaggtatctctacattccactctcctgccgtataccgggccagcatatcgaaaagacagtgcgacagcttggatacgaaaatagccatacgtggttttacatcagagaaataaagacgaaaatccatttcatatttt

SEQ ID NO: 12025 - DNA, 284 bp, Unknown
  gut microbiota DNA sequence
tctattatcaccgaacttttaagctgacctttcttgtttatcagcttcactattctactgttatataatcccagtgccgccgaatagatgttctgacggtcgggattgttgccgacaaccaagattttaggctctttcgggttgttgatgtcaagcgagaaatcatcacctgtcattacccagtaaagagcgggtgaaatcatccttgaaagcgggattttcgcacttgctatttgaccctgcaactgctcttgagcgtctgattcccaagcatccacgaacgg

SEQ ID NO: 12026 - DNA, 487 bp, Unknown
  gut microbiota DNA sequence
ctgaataggcaggatgcggacaccatccgcaagctggcaggggaagccaacaacatcaaccaactggcacaccgggcaaatgccggaggtttcgcactggtggcggtggaactggtgaaactgaaaaacaggattgtcgaaattataaaccagttgtcggatgattggaaaaataaaaaagggaagcgggtttaagggctgcgtaaactatgtgttgggcaaggaacaggcggctttgctccatgcggacggggtactgacagaaagtcagggagatataatccgcagcttctgtatgcagaccgggatgaatcccgacttgaaaaagccagtcggacatattgcgttaagctattcggcagtggatgcacccaaattgacagacgagaagatgatacagcttgcgcaggaatatatgcgtgaaatgaaaattaccgatacgcagtatatcatcgtgcgccatcaagaccgggagcatccgcacgtg

SEQ ID NO: 12027 - DNA, 551 bp, Unknown
  gut microbiota DNA sequence
tgtgaaatgaaaattaccgatacgcagtatatcatcgtgcgccatcaagaccgggagcatccgcacgtgcatatcgtgttcaaccgtatagacaacagcggcaagactatttcggacaggaacgatatgtaccgtaacgaacaagtatgcaagaagctgaaagccaaacacgggctttatttcgctggtggaaaagaacaagtaaagcagcaccgcttgaaagagccggacaaatcgaaatacgagatttacaacgctgtaaagaatgaaatcggaaagtccaagaactggcagcagttacaggaacggttagcggaaaagggtattactatcctgttcaagtataaggggcagacgggcgagatacagggcgtttccttttccaaaggcgaatacacgttcaagggttcggaaatagaccgtaatttcagtttctccaaactggataaatgttttggggatgtagggcaggcgatagtcgggagcaataagcagacggttactgcacctattcagaaatcagtatcagcacccgacaaagcgaataattc

SEQ ID NO: 12028 - DNA, 367 bp, Unknown
  gut microbiota DNA sequence
taacacgattaggaagaacgtgcgcagcgtgtctataatcagccccgccgcctgaaagagcatttccagcagttccctgaaccagtcccggacggacttctttatattgtacgccgccctgtccatatacatacccgtcatagttaccatatcggagggcgaccagcccagttcttccagttgcctgtcaaattcctcgtccgaagcgaggtaagccgtttcggggctacgcatcagggcttcatattccagtcggtctttctgtgcccggtattcgttcatgtcgaaagtctgcgtttccataagttggttgcaccctttcaccactggcgacaataccgtgttgatagtccccagcacgaacgtg

SEQ ID NO: 12029 - DNA, 137 bp, Unknown
  gut microbiota DNA sequence
ttcgcactggtggcggtggaactggtgaagctcaaaaaccggattattgaaatcataaaccatttgtcagatgattggaaaaataaaaaagggaagcgggtttaagggctgtgtgaactatgtgcttggcaaggagc

SEQ ID NO: 12030 - DNA, 1135 bp, Unknown
  gut microbiota DNA sequence
tgggcggataaagaaaaaatcaaaccgctgttcccgttcggacacggattgagctacactactttcgcctatggaaagccttcggctgacaagaaaacaatgacagcagatgatactatctctttcacggtcaatgtgaagaatacaggaactcgtgaggggcaagaagttgttcagctttatatcagcgataagaaatcctctctccctcgtccgatcaaagagttgaaaggtttccagaaagtgaaactggctccgggagaagagaaagcggtaacgctgacgattgataagaaagcattgagcttctttgatgatgccaaacacgaatgggtggccgaaccgggcaagtttgaagcaattatcggtagttcatccagggatactaaaggtattgtaccatttgagttgaaataggtagatgtttggttagagattttttaaggagatgacagagagtctgggtactcggaaaacgctaagtgattgcaacaaattgacttagcgttttttattgcctaattttccccgttaagatttttaaggaggatagggcagattatatcctttctttacaacaggcgcaagatgatgaaaccaaccggccttttggggatttcatggcggtgcaattgagaaaatcactgtctttggaaattcaaaaatataaagcttctcacaataaaggatttagctttatgttttaatcttgtaggacttcttttgataagactttcatccatttgtatatctttcaccgcttagtaccaacagactttccggtcccatattgaacaacaggtctatgatactcaaattaggtagaaaacccagtttggactcaaaaacctgatagtagggttgcggaacaaactctttatccacttccctgaaatcctttttcggatgaatcacttcccgaaaatcggattctccgggagcaaactccatcttatattcggaagtgcgctcaatggtggggtgaatatctatcaattcacagaccatccggcatagttcttcgttgaaatcgattaaaaattcgtatttcttttcgtagaaaggacggaagtcgtccttgtagtactcaaagaaaggagtattgttgtaggccgattcgatggcgttccagtgc

SEQ ID NO: 12031 - DNA, 38743 bp, Unknown
  gut microbiota DNA sequence
tactaaatatttatcatgaaacggctgcaaagttaccatttatttatcatattctgaacttcttcgttcaaaattttagcaaattcttcaaatttcatggtccccttatctccttcgccttgtctacgaacagaaacttcaccattttctgcttctttttcgccgacaatcagcatataaggaatacgtttcatctcattatcacggatcttgcgacctattttttcgttgcggtcatctacaatcgcacggatttcgtgagttttcagatacatcttcacttgttccgcatattcattgaacttctcactgatcggcagaatagcaacctggtcgggtgtcaaccacaatgggaacttaccggcggtatgttcaatcagcacggcaacaaagcgctccattgatccgaacggtgcacgatggatcataaccggacggtgtttctgattatcagatcccatatattccagttcaaaacgttccggcaagttatagtctacctggatagtacccaactgccagcgacgaccgattgcatctttcaccataaagtcgagcttaggaccgtagaaagccgcttcaccatattcaatcttagcaggtaatcctttttcttcacacgcctcgataatagcctgttctgccttttcccaattatcatcgctaccaatatatttttcgcggtttactttatcgcgcaatgatatctgagcctcaaaattctggaaattcatagaacggaacacaatagagatgatatccattacacgaaggaattcatcttttacctgatccggacggcagaaaatatgagcgtcatcctgcgtaaagctacgtacacgagttaaaccgtgcaactcaccactttgttcataacgacaaactgttccaaattcagcaatacgcaatggaaggtctttatatgaacgcgggaagttcttataaatctcacaatggtgagggcagttcatcggtttcaagaagtactcttctccttcttccggagtatgaataggttggaaagcgtctttgccatattttgcatagtgaccggaagtcacatatagtaacttgttgccaatcggcggggtgattacttcctgatagtcatagcgagtctggatacgacgcaagaattcctgcaaacgcagacgtaatgcagtacctttcggcagccacatcggaagtccctttcctaccgtctccgagaacatgaacaactgcatctctttgccgatcttacggtggtcacgttttttggcttcttccaacaataccagatactcatccagcattttcttcttcgggaacgtgataccataaatacgtgtcaacatcttacggtcttcctgaccacgccaatatgcaccggctaccgtagtcagtttgatagctttgatcggagcagtcgtcatcaagtgaggaccacggcaaagatcagtaaatgccccttgcgtataagtagtaatatgtccgtcttccaattcggaaatcaactcacatttataagtttccccacgatcgccaaacatcttcaatgcatccgctttggcaatgctctctctgactacatcttctttcttggcagccagttcctgcatcttagcttcaatagcaggcagatcactttccttgattaccgcttctcccggatctacatcataatagaatccgttttcaatggccggaccgataccgaactgaatacccggataaagttcctgcaaagcttcagccaacaagtgagcacttgtatgccaaaaagcatgtttgccttcttcatcatcccatttataaagcacgaaatcagcatcttcattaataggacgtcctaaatcataagtctcgccattcacgccacaagccaaaacatcttgtgccaaacgcgaactgatactttctgcaatctgtaaaccgttcactccttcattatattcacgaacagagccatcgggaaattttatctttatcataatagatgatgttatattttcacaatttgaacgcaaaagtaagtaaatcttttgagttttccattttttatcaaataaatgttattccgtctgatccgtaaaacgtttgattacgttataagcagaaacaatgcccaactcaccggctttacttaaatcagaaatgcccagcttgttattacctaaaaatatatgggtaaggcctctattaaagtaagcatccgcaaaatcaggattcagctcgatcgccttgtcataatcggcaatagcagcccggtagtccttcagcatagcagagacattcgcacggttatagtaagcataaacaaagtccggcgccagattgatcaccttgtccaggtctttccttactacttcataatcaaccgcagtaatctctttacgtttatcacccggaatattcgtttcggcggcttgttccgccttctgatattccagttgcttacagcggataagcgcacgcataaaataagccgggaagaaatcaccgtccaacagaatcgtctgtgtcaagtcagccacagcacttgagaagtcctgcaccagatagaagtcaatcgcacgggcaaaacgcttcgaagcgctcttttcatcagccacgatagcggacgtatgtgtatcgatcaaagcaaaatggaatttcacctgttcttctgtcaacggagcttccatattcgtaatacgaagacgtttagagaggattcccgtacggttcaagtcctcaatatacttgtgaaaattcaccgaacgcttcacgtcactcattttctcataataagtcaaagcaaacatgggctccagtgtgatatttacattcttgtcctgcacacgtccacgataatcactcgtataacgctgttcggcttcagagtcatcggcaattactatcttacgatagttattcatattcttatccgacttcttgcgtgttttttctccatcttcatctccacttccgtccgctttatctttattctgggcaacatccttattagtcgtcacaccgttctgcttgtcaatctgggctttcatgaccttaaactcatcttgttccgctcctttcttatccccaatttttctacgggcttccgaacgctgataatatccggccagaaagttaggatactgattgataacagtcgtatagtcttgtatggccccacgataatcacctgtctgcgcacggagtaaaccacggttaaagacagccatcatattatccggttccatttgaatgacaaaatcaaagtcctcaattgcccggttgtcatcccctacccgtgcacgaagcagaccacgattataatgtccgataaagttattgggatcaatatccaatgccaaatcatagtcactcatagcccccctcagattattctgatggaatcttgccaatgcacgattaatatagtttccggcattcttcgcacttaaatgaatagcccggtcaaaatccgattccgcctccgcatatttggattgctgcaatttcacaattgcccgtgcagcccatgcgtccggatcatatttatccaattcaagcgccttattgaaatcggtcaaggcagcaatggtgtccttctgctgcaaagacacttcccccctcattaaataagcacgtgtataacggggagacactttcagcaaactttccagatcctcttttgctgaattataatcctttttctgaatatgagataacgttaaattatgccacagagtgatattctccggatcataatgcaaagccttctgataatcttcaatagccccgtcaaatttgctctgacggattctggcaaggccacgaatctgataagcacctaccacaaacggattgcgttggatagccgcatcacagtctgcttccgcaccttgaaaatcttccagattcagtttggccaaagccctgaaaaaataaggctcatacaaataaggtttagcgttaattacctggttgaagtactgaatggaaagtacataatcctcaaaataaagagcgtttcgggcgatagtcatcacccgatccgtatttatctgagcacataccagtgtgggaaacagtaataatactgttaatattctctttatcatcgacattttatacttgtaaacgaagcaaaaataatgtttttcgtttacttaacagggatataaacgttttttatctttattttacctgtttcatcttataagaactacgagctttccccttcaacatcgtattcagttttcccttaatcatttgcttacgaagtggagaaatatgatcaataaacatcttaccgtccaaatggtcgaattcatgttgcattacgcgagccagatagccttctacaacttcctcgtattccacaaaattctcgtccatatatttcacgcgaatcttatctcctcttttcaccgtctcatggatacccggcagactcagacatccttcttccatacttacttcttctcccccgacctctagtatatggggattgatataagctttattaaaatctttaaattcaggataatcctccgagagcggatctaatgtaatggtaacaacacgaattggcaaaccgatttgcggggcagccaatcctacaccatccgcatgcaccattgtttcaaacatatttgcaatcaactctttcagattcggataatccggagttatatcctctgccacctttcttaaaacaggctggccatatacataaataggtaaaatcatatctgatattctactaaaaaattaagttattctttgtctatattaaaaacgtttactttccaaatatgtttgcagaataattgtagcgctaatctcatctaccaaagccttgttctgccggtctttctttttcagtcctgcctccagcatagtccgatgtgcaagaacggaggtaaaacgctcatccacatactccacaggaagctcaggaaaacgttttttcagtgaacggacaaaaggttctatatttttcatattctccgaaacttcattattcatttgcttaggcaatccaataataatccgctctaccggttccttagcgatgtaatcaccgataaaattcaaaagctcatgtgtaggaactgtcgtcaagccattggcaatcagctgcatggtgtcgctgacagctattcctgtacgttttcttccgtaatctattgctactattctgctcatggggcacaaaaatacaaaaaagacgcttcccgtgaaaggaaacgtctcttttattataatatttcaagtgtatattattcttcaacaattgctacacgactcagtttagcatcatcatagaacatgttgccaacaccacccttataatcaaccttcaactgagaagcaggaactccaaattcgttaaccatcaagtcacgaacagcttcagctctcttcttactcaacttcatgttgtattcagcagagcctgtacccttatcagcatatccagttatagtaaatacttttcctggattttccttgatacccttagccatagcttcgatattcatgtactctctcttgctgatattgctcttaccgatattgaatacaacaacaagacgtggaaccaatccagcttctttcttaacaatcacttccggtttcttattacgtgcttcaaccaggtcacgcttcaaagattcattttcacccttcagtgcgtttactctgtctctcatatcgttcaactggctctctggaaccatcggaaccgtaggaactgcattccaaccgcgtttcttaaatttataagtaacacctacagtcagtcctaacatagcttccttattctcaccagccaatgtatttttcataaacaggctacgcatttccacgttgaagtccaaagcagacgacaaacggaaacggttaatcaaacctaaattaaaaccaatattatcatctgtcggtttcgtccaagaatgaacccatcctgcacctgcataagggatgaatgaatacagacggtcttccttatacccgcagaacatattagtaaggttcaacataacatcagcatggaaattagcgatattccatttctgcttataatatccgttagacataacgccaccttttacgtaagcatcatcttcaagcaaagtagctcccttagcctgaagaccattataagcaatacgcaaaccgattccgggagtaaaccactttcctacagcaatgtccaatgcaggagcaagtcgttttccaaaatccaacttaccgtcattatctccaaaatacatctgggctcccagaccaccactaataaaccaattagctccaaagcggtttgtctctacgctatagctggttgctgctttttctttttcctgagcaggcagacaaacagaaactgccgccaataaaataaataataaaccctttttcatctcaatttattttagtaaataatatatttccatcaaaaagagaataagatgaacttattttcttaaaaattactgcaaatatagatatttaatataatacacgcaaaaaatcacgtaaaaaatcacacctccattcttttttttataaaacaaaaatagccaacgacaaatttatcattggctattcttatttttctgctgtacctttaatatactaactttacattatcaatccataatgtatttcccggagaacctatatatgcccctccgtgactggatgtaaactgaagacacagatgggtaggaacgtcattttcatccccccaagccacctcatgaataggtacactttcgcctttactattgaccgtgtaactttcagtaacctgcagacgcatcatgtgagccttatattcaggacgacttgtaatatcaccatacataatttcataggaaacattattcttccaatccgtagagtgataataataggtcaccattgtaccgatacgtttcgcatacacgtttccttccgcatcttcccaacgtttctgtaaaaacagaatagctgcaggataatctttaccgggaacatccgtaatcttactgaatccggtagcacggatacgattttcgcgatccgacatcttcaccttgtaatcgaactgaagggctaccggtttcttagtaaacggaataccggtctgcagcatcttctgtggattcttagtacctttaataggttcatgcaccgatccggtaaaaatagaaccagccgccagcaccgtgatattgaccagtcccaacaccttcacactttccatgcgagtatccagccgcgcacagtatccattccctcttttttcggggaaaaccgatgtgttcgtcttggtaattccggctacttttgccatcacgtttgaagtaccccaaggcgaaccacccatatttttataaacctgatctcccttgattacagtggtcggccctatcgcatatacattctttgtatttccgccaataatgctcgactcctttatttgacggtctacccattgatccatgtctccaaaaggaaccatttcgactttatgttgcgccatcaaagacaaggaagaaaaaaatgcaacaaaacctgtcatcaacaggcgacgaacaattttctgaaccattactttcctttcttttttcttcttcttataaattatactcccattgctttaaagcaaatccccaattctcttcaaccagacgaattgtgcgatcatcatatttatacttgttctttttatatcctttcttaccgcccacatacttttctatgtcagcacgcgcttccgtgaatcccggaatagaaagtgacttataaatattctctgtcattcccatcgcatctgcttcaaaatcttcaaacttcacctccatcagattaccttcggggataaactgtttatccgattcatacttatgataaagttttgcataaatagaaaggatattttcctccaattgttcattgctgatatcctgcaacttcaacggttgaatcgtatttgtaaagaaactgcgtgtagattcgaataccgtatacggattacgcatcaagtaaataaacttagcgttcgggaacatctttaccagttctttcacccgaccggtgtgcggaggattcttgctaaggaattgagtaccatgtgtattccacaaagaaatcttaatcagtttcgtaaatacctcttcaaaaactttcaactccgcgtctgtaatatcatcaaacaacagatacttgtctgcatattcctgttgacatttcggtaaaaaccaaaaattataataagtataaggcatcatattcgacaatgcaaattcctcttcctgcggaagatccacagccagttccatattgtcggtcggacgtttatccggcatcagccaactcatattctttttaaagaaaggctgtccccacatcatcaaatgaggaaacacagtctgatacgttgtattatacccaaaatgcttgtcgcaagagaacacattatgaacaaaagtagttccgcttctccaatgtcccagaataaataccggatcatgttccaatggctggttggccaatagcttttcataccgactattctgcaatccggctaatggagagagtaaacggcacaccgcctttgtcaaccggtattttcctttgtaagccgcatctatttcacgaccggcagtgatagccttaaacgttttccaatctgcacctaccagcgtattaatcggaagtttattaaattcgagtaatcccatacttttcttactttattattttcacagcaaaaccctgacgttccaattcctttgctgctttctccacagcttcataatgttccggagcaattcccaacttcggtaagtccaaaacaggaatatcatccgtattgctcatatccttcacctcaacccgatcgataatcataccgacagccgaagtattattcgtaataggatcaatcaagataaatgaaccgcatgacttattcttcttatacggatcaaagaaaagttctttggcagtagtcagcaccacacgtgcaatctgattgagctgcaatggcaaactatctgccgtcaattgtccattatcaacagaaaggtgttccattgtgtttacatccaccttatatttaatcgcatcaatacgggtacggctcagattagtcgtttgcttgataaagaaagacttattgatatccatcggttcctcgtccatccacaccatcattgcctcaaaattacggtcgataataggcaagttatccggatgtaccagcatttcaccacgagacacatcaatctcatcttccaaagtcaatgtaacagattgcggtggaaacgcataatccaactccccgtcataagttacgatactttttaccttagacgtttttcccgaaggaagtgccatcactgtatcccccttacggacaataccggatgcgaccttaccgcagaaacctctaaagtccagattcgggcgaagtacatattgaaccgggaaacggaaatcagacagattatggtcattatcaatatgaacggtttccagaaaatccaacaaagagattcctttataccacggagtacgttccgatttatccactacattatctccatccaaagcggaaagaggaatacagttcacatcaggaattcccaacggagcaacgaatttcttgtattcggcaacaatctcgttgaaccgttcttccgagaagtccaccaagtccatcttgtttacggccaatacgacatgcttgatacccaacagagataccaggaaagtatggcggcgtgtctgtgtaatcactcccatacgggcgtctaccagaataatagctaagttagccgtagatccgccggtgatcatattacgagtatactgctcatgtcccggagtatccgcaataataaacttacggccgttggtagaaaaataacgataagccacatcaatcgtaataccctgttcccgttcggctttcaaaccatcgagcaacaatgcgtagtctatatgctcacccgcatttcctacacgtttgctatcacgctccaacgcatccaactggtcttcgtacaatttcttactgtcaaacaacaaacgtccgatcagcgttgatttcccatcatcaaccgaaccggcggtcaacagtctcagcaagtctttctgctcatccttatccagaaaagcctttatatctaatttattatctgccatcacttgttacaattaaaagtatccttcacgtttcttctgctccatactcgcatcctggtcgaagtcaatcacgcgagttgttcgctcactcttagtagtagtcatcatttcttccacaatctcctcaattgttgaagctccgctttctatagcacccgtcaatggccaacaacccaacgtacggaaacggaccatcttcatttcaatctgatcacggtatttttccggcaagcggtcatcatccgccataatcagattaccatccatttgtactaccggacgttcctttgcataatacaacgggacaatcggaatattctccagccgaatgtactgccagatatccaactctgtccagttactcaacggaaatacgcgaatactttcccccttgtgtacacgggcattataaatatcccacaattcagggcgctggtttttcggatcccactgatggaacttatcccggaaagagaaaatacgttctttcgcacgtgatttctcttcatcacgacgggctcccccaaacgctgcatcaaacttatacttatccagagcacgaagcaatgcctgtgtcttcatcagatcagtgtgtactttgcttccatgcgtaaaaggtcccacccctgcattgaaagcttccatattactttctacaatcagattccatccatatttctttgcatattcgtcacggaactgaatcatctccttgaacttccatttcgaatcgatatgcatcaaagggaatggtactttacccggataaaacgctttttccgccaaacgtaccatcaccgaagaatcttttccgatactgtaaagcatcaccggattctcaaattccgccgccacctcgcgaatgatatgaatagactctgcttcgagctctttcaagtgacttaatttatattcttccatttattttaaaagttatgaattacgaattatgaatttgccgacaaccgcataccaattcttcattcctaattcttcatttcacattcttcactttaggtaaaatcagctccagcaaacgattcacagattcttccaaacttagtttagaagtatccaacgacaaagccggatgttccggtatctcaaaaggcgcggagattcccgtaaaattctttatttctcctttgcgggctttcgcatacaagccctttacatcgcgtctctcacactcctccaacggggtacttacgaaaatttccagaaaatcatcctttccgattatattcgctgccatttcgcgaatatcattattcggactgataaaagcagcaattgttataatgccgctgtccaaaaacaactttgacacttcggctatacggcgaatgttctccacccggtcggtttccgaaaagcccaaattattattaattccgctacggatattatccccgtccagaatacggcaaagcagtccacgcttatgcagttcgcgttccaatgcaatggcaactgtacttttccccgacccgctcagtccggtaaaccatatcatgacactatgctgtcccaaaagctcttctttgtcttgccgtgtcatcatgcggtcaaatataggatatatatgattcttttcttccatctataaattagttttattaaaagttccagatcatcgggatcagaataacagaaattaagaaggttataatatttagcggtaatccgatacgcacaaaatccataaacttatagttaccgataccttgcacaatcagattcgtctgataaccaatcggtgtagagaaactggcagatgcagccatacaaatcaccacaaagaaaggtgtcgggctgactcccatctgtgtcgagatcgacagtgccaagggaaacgccaaagccgccgctgcattattggttatcaactccgtaaacagatttgtaataataaatagcattgcaagcaacacgtgcggaccgtaatcatcacttaacccaatgatgaacttagcaacgcaatccgccactcccgaatttaccatcgccttactgatcgcaaaagcacaagcaatcgtaatcaggatatcccacgaaatgtatttagtatatttgcgggcaggaaacagatttgtccatgccataataatagtagtaatagaaacaaagaagaacatatccagtttgatatccggaaacatttccctcacaataggaagttcacccactgttgcacctacaatcatcaacaccaaaagaaacaaagcaaaccaacgttttttctttccggcagtatcagggtcacttccatttgtcaacagcacgaatacggaagattctccccatgtcggaataaacgtatcatcagccatcaccacaagagtatctccttcatgaagcactatatcttccagattcgtaacaaaacgttgcccgttacgtgtctttatctccttcacttccgccccataatggcgttggaaattaaaatccttcagtttcttattaataccgggaaaacgcgcacccaatacagcctctacccggtgcagcttctccccttcctctacttcctcatccggcaccgccgtatccggacgtgcatccggcaacagacgcttcgaaaaaacaaacagataaataataccggcaatggctataaagattcctacctttccaagttcaaacatcgagaagccttcgaacccggcatccaatatcataccatgcaccaccagattagtagaggtaccgatcagcgtacaaataccacccagaatagtgacataagaaagaggtatcaagaattttgtagcaggaagcttcaccgaattggcccaatgcttgattataggagcaaagataaccacgacaggagtattattcaagaaagcggagatgaacgccaccgaaggtaaaagacgcaactgtgccttaaacaccgttgtcttcccctgaggcaacagcttctttatcacctgtcccagcgtacccgactgtcggatcccttcactcaccagaaatagcaaagcaacagttatcatacctttgttgctaaagccttcaagcatctctttgggagtcagaataccggcacacaaaaataataccactactgaaaaaagtatcatacccggacgcatcttatctgcaaccaaggcagctaccattcctaatagggccaatagtacaaatacaatttcaaatgtcatataaacatcaattagtgttctctcttgggctcaacaataaaccaaggattcaataagtcctccttattatatcgtaacggttcatcctttccggcttgatacacttccattccagcagcacgtgcaatcgcatgtccggcagccgtatcccactccatagtcggagcaaagcgcggatacacgtcagcctctccttccgccaccagacagatcttcatagaacttccacgcgatatcaactcaatgccaccgcgtttctttttcctcaggtctgcaatatattcttccgtttcaggcgacaagtgcgaacgggaagcaacgactatgaaatgatcgcgaggatcatccaaaggcaaccgttccgaatcttcgatcatctgtttcaatgtcagcgtattatcttccagaccgacaagaccggagcacttatatgctcccacaccctcaaccgcaaaatagagtattctctttacaggcacataaataacccctatcacaggcaccgagtcttgcaccaaagcaatatttacagtaaattctccattacgcttgataaattcctttgtaccatccaaaggatccacaatccataacgtatcccatttacggcggacctcataatccagatgtctcccttcttcactaaggatcgggaaaggagtcttgctcaaaacggcaacaattgcttcatgtgcttttctgtccgctattgtcagtggagaattatcagcctttctttctatttcaaaatccgatgccggatcctcataaatagacagtatttcttcacttgctttcaatgctgcatcaatagcagccattacatatttttgttccatttaattcttttattaaaacctcatttccatcaaggctttgaattctccaaattaagaattgacaaaagtaaaaactttctttgctataaaagtttccccgctggcatttataacttcttttagtagaaagataaaaatatctaaatagatattcaaccctttcttcaataaaaaagcagtaacttcccagttaccgccttcttatttggaaacaacatttgttctttccaagtatatattaccaaaaagaaatcaataaacacgatacagcaaccaggctccctggaaatccgaacggttcggatacttagctttaaaagcatcacgggcttcagctgctgcagctttatcggcaaatgaacttacgataacacgatacatcgccttatctgcattgaacgcaatagttgactgataaccttgtgcgtccaaccaatctttcagaccttccgcatttgctttaacgccaaaactacctgccactacactataatctttcaatccctcattgccggaaaccactgtaactttttcctggcgaacgccggatgtatctgccactttaggtgttgccacaggagctgccactaccggagtcacttctaccggaacttccacctgcggttccgccagttcctgctgttttgctttctcgtaagctttcttataggcgctttcgctggatttacaagatgcaaaagccagcaccaagcatactcccattcccaatacgactaattttttcataatcctatactcatgttttaattaataattctatatccttgtccatctacatttagtttcgggcaacaaaataatagaaattttatcatccggcaaagaaatccggcaaaaaaacctctattccgtctttttcttgtacgaaatagtacccgtagcctgataagtaggcattaaaagcacttccgcaatctgaatatgctcgggagccgatgcggcaaaatagacagtctcggcaatatcatctcccgtcaacggacgaatccctttgtaaaaattatcagcagcctctttatctccacgataacgtactaccgtaaaatttgtttccaccatacccggcttaatattcgttactctcaatggtgtatccaccaagtcaatccgcaaaccgtccgacagagcttttacagcagctttagtcgcacaatacacgcttcctccgggataagcggcatcaccggcaatggaaccgatattgacaacatgtccgcgcccgcgttccaccataccaggtactaccatgcgtgtcatagccagcaaccctcttatattcgtatcgatcatgatgtcccactcatccaaactcccctcaaactccttatccacgccaatcaccagtccggcattgttgaccagcacatcaatcgctttccactcttcgggcaaagattccaaagctgcagcagcctgcttccggtcacgtacatcaaaaggaagtatatatacccgcacaccatacatcttttccaattcagccttcagttcctccaacttcgacacggtacgcgcattcaaaatcaagttccatccctcttttgcaaacttacgggcacaaccttcaccaattccgctactggcaccggtaataaaaacaattttagcttccattatgtttcgatttacaatattagttagcaaaagtacgccttaagttatattgattagcctcgaaagtcagttaaataagattaaaaccgaagaagaaaaaaaaaaaatataaaactgagcacttttttttcgttttcatgaacaacctttcaataaaaatgttatatttgttgtatcataatcattttaaacattacaaattatgaaaggattgaatgtattagcagcttttctgggtggtgcagccgtaggcgcagcccttggtattttatttgctcctgagaagggagaagatactcgtcataaaattgcagagattctccgtaagaaaggtatcaagctcaaccgtaatgagatggaaaatcttgttgacgagattgcagctgagatgaaaggagaaatagcagagtaaatgagtaacaacagactaaaacagagcgaccatgtttgcagacgataaaagtattgaaaatttccagcagttatttttcgagttcaagaaatatttagaacttcagaaagaatataccaaattagaattaacggaaaagttaaccatactattctcaacgttaatcatgatattagtacttattatcttaggcatggtagccctgttttacctgctttttgcattggcttacatattagagccattgctcggtggtctcatggctagttttgccattattgccggtatcaacattgtcctaatcttcctagttattattttccgcaagcagctcatcatctctccgatggtgaacttcctcgctaatttatttttaaccgatccaaataaataaattatgagtgcacaaacaccagcacagaaaattactttagaagaaatcgcagaacgtaaaaagaaacttctaaatgagattcatgttcaaaagaaagccatgactgccacaacacgcgagatattcgctccgctagctccggctaccaacaaagcggatgccattatgcgttcgttcaatacaggcatggcgatattcgatggggtggtaatgggaatcaagattatgaggaagatacgtgcatacttcaggaatatgagataaaataagggacttcactatatcctacttaaaagtcaacaaatcctccattttagaaataaacattacagtcttatcaataagcggaagaatttcttcttctgcacttaacataaatcaccccctctcgttccacattcttgtaaaatgatgaaaaactcctttccatccagtccttaaaagtataaagaatgggatgaatttgtatgtcaatagtccatccaagttccaaaaaggataagaaatataatcatggtcatctaatccaactttatctttattcagtaaaataagaatattccccatccaaatcctccctcgcatctccacgagcttgtgatccgaataaaataactttagcgccagatggtattgtcttagctattgtttctttgatcaatcgtaatatttcctctttttgcatattaaaatacaattaatagcatcttcactacaaacgataataagtaaacctgaaaacacacagcctaagccacaattattttcttctgaatgaagaaatcatctaaacatagtactctaaagcaatatatcaaaaaggatttatttctataattttaaaacaatattttaactctgccataaatttttgctgtgactgaaatccccactctattaataaaaaatcaattaccgaatcaatgcgttcctccgctctaggaaatataatgagattatactgactcatttctcatacttattcataaaagaagaaatactacgatattctcctctcttatactattttaatccaatacggatatcttctttcacataatcaggtatctcttttgtatagaacatactagaataataagcacctgcctgttctttagctgctcctttgtacaggcttcctctttttttctatgtgaataatcctctgtcatttgttcctttattttttgcaaagttatctctttagagataaaaagtcacccggctttgcccattatcataacagaacaaagtcggatgactaaattatggcgattaagtattaattatacgtacgtttccaacagtttcacattacctcctacgggagtaatagtgacatcctgcgtcgtagcaggcagcaagatcgattctcccgcattgaccgtcagttcattaccttcattatctttcatcacacatgctccctccatacagataaagatcacgaatgagtcgagttccgaataatcgcaactgatttcttcagtcatgtcatacaaagaagtagtgaagtaaggacaagccaccaattccaccggttcatccttcaaaggttcgtacttcgtgcgataatcatccaatacctcatagttgatggcttcacgggctaaatcagtgtgaagctcacgggttttaccattcgcatctttacggttgaagtcgtagatacggtaagtgatgtcggaagtctgctgaatctcggcgatgaatgaacctgccccgatactgtgcacacgtccggcaggaagaaagaacacatcacccggatgaatctcgtattcctgcaatacgtcagtgatcgtattgttcaacacacgttctttatattctttcggagtaatctgttcggaaaatcccgaacgcaactttgctcctttgtcggcatctaccacataccacatttctgtcttacccattgaattatggcgtttcttcgccagttcgtctgtcgggtgtacctggatggacaaatcctgtttagcatcgataaacttgatgagcaacggaaatttgtttccgaaacgagcatagttcgcttctcccaccaattcctcgcgataccttcttaccatatcagccaaggttaaacctttgtccgggccattcgccacaacggactcattgtcttcaacgccggaaatctcccagctttctcctactcccttcaagtcagcgttcagatgcttgaacggaataattttgtcgcccccccaaagcgtctgcttcagaatgggttcgaattttaatggatacatttttgtttttcttgttataaacttagattaaattcgctcggattgtttcaatccgggaacaaacatacgaaaaatagttcaaattttagactatatttaataggaatatttgtgagtaagaaagaatttccttttatttgcaggaaattttaataataccagacatgaataacacattcccaacagaagggaatctatcagggctcagccggaaagatttccaaaaggagataaacaataaagagactgatttatttatcctcaaaaacaagaagggaatggaagtagctgtaacaaattacggatgcgccattctttctattatggtaccggataaaaacggtaagtatgccaatgtgattctcggacacgacagtatcgaccatgtaatcaacagtcccgaacctttcctgagtacgactatcggacgttacggcaaccgcattgccaaaggaaaattcaccttgttcggcgaagaacatgaactcaccatcaacaacggaccgaactccctgcatggaggacctaccggtttccatgcccgcgtatgggacgctgttcagattgatgaaggcacagtgcaattcaattatgtttccgccgacggcgaagaggggttccccggtaatctggaagtagaaatgacttaccgcctggatgacgaggtgaatgctctgaatattgaatatcgtgctacaacggacaaagctacagtagtcaatctgaccaatcacggtttcttcaatcttgccggcatagccgctcccactcctactgtcaacgaccatatcgttactatcaacgctgatttctatacacctattgacgaagtttccatccctaccggagaaatagccaaagtagaaggtacaccgatggatttccgtactccgcacaccgtaggcgaacgtatcgatgataagttccagcaattggtattcggcgcaggatatgaccattgctacgtattgaacaagacagagagcggttcgcttgagttggccgcgacctgcaaggatccgaaaagcggacgtctcatggaagtatatacaacggaagccggtgtacagctttataccggaaactggctcaacggattcaaaggcgcacacggtgctaccttccctgcaagaagcgctatctgctttgaagctcaatgtttcccggatactccgaacaaacctcattttccatcggctaccttgctaccgggcgatgagtaccaacaaatcactatttacaaattttccgtagaagaataacaattaaaaataactaacctaatttataaactaacattttttttgaaccatgacacaagaaaaaaagaacggtaaaatcattgcaatcattacgatgattttccttttcggtatgatttcatttgttactaaccttgctgcccctatgggtatcgtgctaaaaaatcagttcgacgtatcaaacgcattaggcatgctgggaaacttcggaaacttcattgcttatgcagtaatgggtattccaagcggtatactgctgcaacgtgtgggatataagaaaacagcacttatcgcagtggctatcggtttcataggcgtaggtattcaattcttatccggtcattcaagcccggaaatggcttttgccgtttatctgatcggtgcattcgttgcaggtttctccatgtgtctgcttaacacggtcgtaaacccgatgttgaacaaacttggaggtgaaggcaacaaaggaaatcaacttattcaggtcggtggatctttcaactctgtaatggctaccattactccgatgtttgtaggtatccttatcgccggttctatcgaaaaagcgactatctctcagatattccctgtgatgtataccgcaatggctgtatttgcttttgcattctttgttctcctgttcgtacatataccggaacccaatgccgctacttcaacagaacctattggaaaattgatgaaaggcgctttgaaattccgccatttcatcttaggagctattgcaatctttgtatatgtaggtattgaagtgggtgtgccgggtactttgaatttgttcttgacagattctgtagaaaaaggtggagcaggtatagcgtctacaatctcaggattcgtagtaggaacttattggttcttaatgttggtcggacgtctggccggtgcttcactaggtgccaaagtctccagtaaagctatgcttacatttacttccggcttaggcttgatcttggtaatccttgctatcttctcatctactgagacattagtgaatcttcctgtacttcaacaaagcgaaacgggtggtttgtctttcggatttgccgaagtacctattaacgccatgtatctagttttagtcggactgtgtacttccattatgtggggcggtatctttaaccttgcagtagaaggactgggcaaatatcttgctgcagcttccggcttattcatggtattggtttgtggtggcggtatccttcctgtcattcagggtatagttgccgatatcgcaggtttcatgccgagctactgggttattatcgctgctcttgcttatctgctgttctacggtctggtaggttgcaagaatgtaaacaaagatattcctgtggaataataatataccaatttattcatctttaaaatatcaatatcatggatacagaatatgtaagaagtcgctttatcaaacactttgacggaactactggttttttatatgcttctccgggccgtatcaacctgatcggtgagcataccgactacaatggcggattcgtttttccgggtgcagtagacaaaggtatgattgcagaaatcaaaccgaacggtactgacaaagtaagagcgtactctatcgacttgaaagattatgtagaattcggcttgaacgaggaagatgctccccgtgcaagttgggcaagatatattttcggtgtttgccgtgaaatgatcaaacgtggcgttgacgtaaaaggattcaatacggctttcgcaggtgatgtgcccctgggtgcaggtatgtcttcttcggctgctttggaaagtacatacgctttcgcattgaacgaattgttcggtgacaacaagatagataaatttgaactggctaaggtcggtcaggctacagagcataattattgtggtgtgaactgcggtatcatggaccaattcgcttccgtattcggtaaagccggcagcttgatccgactggattgccgttcattggaatatcagtattttccgttccatccggaaggttaccgtctggtgttgatggattcagttgtcaagcacgaattggcttcttccgcttacaacaagcgccgccaaagttgtgaagctgccgttgccgctatccagaagaaacatccgcacgtagaattcctgcgtgactgtacgatggagatgttggaagaggctaaagctgaaatcagtgccgaagactatatgcgtgcagaatacgtaatcgaagaaatccaacgtgtattggacgtttgcgatgctttggaaaaagatgattacgaaactgtaggtaagaagatgtacgaaactcatcacggcatgagcaagctgtacgaagtaagctgcgaagaactcgacttcctgaacgactgcgctaaagaatacggtgtaaccggttcacgcgttatgggtggcggtttcggtggttgtacaatcaaccttgtcaagaacgaattgtatgacaacttcgttgaaaagaccaaagctgcgttcaaagctaaattcggcagaagcccgaaagtgtacgatgtagtaatcggtgacggttctcgcagattggaataaaagaccatccggttgtatcagataattatgtagggcggctttccgtaatggagagtcgcccttttatataccaaaatcatttatacaatgatgaaggagaaattatcggagaaaaccgtttttcgatgaaaggacatgagtcatcaggaactaataaattatttgacttagcggctttagttatcggccaattggattttggttatccgttaattgtggatgaacttgattccaagcttcatccgttgctaacccaacatataattaaagattgaagcacagagacaggcgaatccgacacagccacaccgattgactttccgggaatcgtcttatgttccaccgtcacataccagtaaaacttaccgtcccgttcaatgacctgacttgcccatgcttccccctttgcccaactgaaatctttcgctttcaaaggaacgggatgctccgtccatgtcttcaagtcgggagaagaaaagacacaccactcattgattaaataatgctcattgagagggggacactcatcgtgtccgtcataaatatacactttcccatcatgtaccatagcagcggaatcacctacatacttatattttataatggggttttcattcgcaacaaacgtagtatcattctgcgccgacagcccggtaaaggctgccagcacaaatgataaaacaactaatctaaccccaaccaaccttgctttattaaaacgaatcatgttatcctttatttcttcgtaaatttataaacagcgaatgtgttcggctccagctcggcagtaaacacgtggccctgaatagacacgggtatttcctttggagtgatggcaaaaggctgttcaagcgtattatccttgtccaaatcaagtgagcgaagcttgatgcaacggccgtcagataatacgttttgtttcttcaagccttcaaatttcaacgaaaccggttgagccgtatcggaagtattggctacttttacgataagctcattcttattcttgtcgtacaccgcactggcgaaaagcccgttctgtccttcagctcccgtcacatttctcttgttcatggtaagcggaagaacattggtccccttattatgggcaaacaactgttgcacatagtagcttacagtgcgtacggaattcagattgtcgaaccagatcatgtccggacaccattgccatccttccacatgagcgaaaagcggagcgtatgtagccatatggacaatatcggcattacgttccaaaccggtcataaaggcagcctcgagcaaggctgcgtggaaatgattccatttcttacctttaccgtgacaagcatattcaccggcaaaaactttcggacctttgcggtcgtaattatcataacgcgcaccttgagccaagaaccaactttcagggcgatagaaatgctcgtctaccaaatcagctttcaagcgtttcatttcaggccacagataatcaaattcttttccttcggaattagggccggaactacctacaatcttcatatccggataagccttacgaatagcctttatgaacggttcaagacgttccggatattcttttccccattgctcgttaccgataccgataaatttcaggttgaaaggagcaggatgtcccatatcggcgcgcacctttccccatgtagagttcacatcaccattggcgaactcaatcagatcgagtgcatcctgaatataaccgtccagatcgcaaacggcaacgtgcgctttcggatcgttattctggtattggcaggaaagaccgcaattcaaaataggaagcggttcggcacccatttcttccgataacaggaagtattcatagaatcccaatccgtaactctgataataatccggatagaaacgatgggtaaaagtgtactgccaacggttctcgttcaaaggtcggttttctaccggacccaccgatttcttccagtcataacgggtattcaaatcagtaccttccacaatgcaaccaccgggaaaacggaagactcccggatggatatctgccaaagcctgtgccaagtccttgcgaagtccgttttcatgtcctttccacgtttcgaccgggaagagagagatatgctccagatccactgttcctttggaagtaaggaaaatacgaagtgtcgatttcggctgggtcatacccggcttcaagatcagctggtacttcttccattctttcgaatcgactgtcaaatcagcggtggcaaacgcctgatgttcacccatagatttggtatccaccaattcaatccgcaatgtttcttttccgttcccctgcggcagacgtgcccaaacagagaaacgatactcctccccttttcggacaccgataccgaagaagccttcgttatccagtccggtatgtttatgggcatgtcccggattggaaagacgcacataatgcggattccgttcaaaaggaccgtcgtccatcaaagttactttaccgtaagttttccatcccatcaggttctgcggaaactcaaacgagcggttcttcaccagttcggcgtacaagccaccgtcggccgcatagttgatatcctcaaaaaaaagtccgtacatggtaggctggatttccgctcccagtttctttgtctgtatcaccatttcattggtttgcgcatgaagtgccattccggcagataaggccactacagccaataaatttgtgtatcttctcatggttttcaataaaaaattatatagttattctattctttttccccagacagaacgtccccgactatcgagtccggtaaagagaatggtttccgtctcattctcccagtcgtgtcctgcaaagataatcagattttctatcttctccgtacccaaatcaagcattaacagatagttttcggtcaaaaaaggccacttcccgcttgcaaggacaaactttccctccacatcaaccatttcaccgttgcaagtaccgtcttttaataaatggaagcgggaagaatctgtccggcttccaactgacgctcatatctcggctcctgtacccgtatgatctcccactcccctgccagatcggcttcggtgaaacggcgtgacggtgtgcctgcatacctttcgggagaaacgaccagccaaccttccggagtaaaggacaactggcgtaaatgcagcaccatcaactgattctgcggagagaggcgtccctgatgtgccagatagtaatttccttccccatcggagatcagtgtatttgttcatcaatcatggtacaaaaatacgccccgttacactaatcacaggtggacatacgaacacatatcataaaaaacgcccttatttctcatgcaaagagaacacatagaccgatatacattcgcaaccgaatatttttcctttatcagaaaaatattttttttatatccgcccttttatatataataataaggtataacaataagtgcattttttacgttttatgttgtataacatacatcagtgtattgaacacaccgaaacaaagtgttacttttacacccgaattaagataatcaactcatttacataaaaaatataaccatgaaaaaacattttctactagcaggatttgccgcacttatgctctttgcgtgcaataacaagccggtttccgagctgactctatcaggtcttgatccggcaaaatttcaaacagaagtaaataatacccaaaccaatctttatactttaaagaataaagcaggcatggaagtgtgcattactaatttcggaggtcgtatcgtgtctatcatggtaccggacaaaaacggaaagatgcaggatgtagttttaggcttcgatagtattgccgactatatcaatgtccccagcgacttcggtgcttccatcggacgttatgccaatcgtatcaatcaaggacgttttgttcttgacggtgataccatccagctaccacaaaacaatttcgggcactgtctgcacggaggtcccaagggatggcaatatcaagtatatgaggcaaatcttattgatccgatgacattggaactaacccgtatctcacccgacggtgatgaaaattttccaggtaatgtaacagccaaagtcacttacacactgacagaagacaacgctatcgatattaaatatagcgcaactaccgacaaaaagacgatcatcaacatgaccaaccactcttatttcaacctggccggtagtccgtcgaaagcctcaaccgacaatattctgtatgtgaatgcagactactatactccggtagacagcactttcatgacaacaggtgaaattgccccggtaaaagatactccgatggacttcacgactccgaaaacagtagggcaagacatcagtaactatgattttgtccagttgaaaaacggaaacggttatgaccacaattgggtactgaacactaagggagacatttcgcaggtagctgccaaactgacttcaccggaaagcggtatcactctggaagtatataccaacgaaccgggtatccaggtttatacaggtaacttcctcgacggtactgtaaccggaaagaaagggatcgtttacaatcaacgtgcttccgtatgtctggaaacgcaacattatccggacagtcccaacaaagttgattggccttcagtagttctggaaccgggacaaacctataacagcgaatgtattttcaaattctcagtagagaaataatattaacttataaatcatatttattgtggaagcattagattggggggtaatcggcgtcttttttttggcgctgatcggtattattgtttgggtagtcagacaaaaacaaaatgactcggcagattatttcttaggcggacgtgacgcaacttggctcgcaatcggagcctctatcttcgcatcaaacatcggttcggaacacttgataggactggcaggtgccggagcctccagtggtatggcgatggctcattgggaaattcaaggatggatgattctgattttgggatgggtgttcgttccattctatacacgaagcatggtatacacaatgccggaattcttggaacgacgttataacccacagtcacgtacgatcttatctgttatttctttagtaagttatgtattgacaaaagtagctgtaacagtctatgccggtggtttggtattccaacaggtattcggtatcaaagaactttggggaatcgacttcttctggattgctgcaatcggattggtagttctgacagcactttatactatcttcgggggtatgaaatccgtattgtatacttctgtactccagactcctatccttctgcttggttccttgatcatcctcgtgcttggttttaaagaattgggtggctgggacgaaatgatgaaagtttgcggtgcggtaactgtaaatgattacggagatacaatgactaatctgatccgtagtaacgatgatccgaacttcccttggctgggtgctttgatcggttccgccattatcggattctggtattggtgtactgaccagtttatcgtacagcgtgtactttccggaaagaatgagatggaagcacgtcgcggtaccatcttcggtgcttacctgaaactgctgcctgtcttcttgtttcttattccgggtatgatcgcatttgcattacatcagaaatatatcggtgccggtggtgaaggattccttccgttactggctaacggaacagcaaatgccgatgccgctttccccactttggtcgctaaattgttgccggccggtgtgaaaggtctggttgtatgcggtatccttgcagctttgatgagttctttagcttctttgttcaactcatccgccatgttgtttactattgacttctacaaacgtttcagaccggagactccggaaaagaaactagtaggtatcggccagattgcaacagttgtaattgtaatcttaggtatcctttggattcctatcatgcgtagtgtaggtgatgttctttatacttatttgcaggatgttcagtctgtattggctccgggtatcgcagccgctttcttattgggtatctgctggaagcgtacttccgctcaaggtggtatgtggggattgatagccggtatggttatcggcttaactcgtctgggtgctaaagtatattatagcaatgccggagaagtggcagactctacattcaaatatctgttctatgatatgaattggctgttcttctgcggatggatgttcctgttctgcatcattatcgtaatcgcagtcagcctggctacaaaagctccgacagcggaaaagattcaaggcttggtattcggtacggctacgaaagaacaaaaagcggctacacgtgcaagttggaatcattgggatattatccatacagcaattatcctggctattaccgcagctttctactggtatttctggtaacaattaattaactaatataaaaaaacgatgaacaattattatagctcgaatcctagctttcatgtaggcattgactgcatcatttttggatttaacgatggtgaattaagtctgctactgctgaaaagaaattttgaacctgcaatgggcgaatggtctttgatgggaggattcgtgcaagaaaacgaaagtgtggacgatgcggccaaacgtgtacttgcggaacttaccggattggaaaatgtgtatatggaacaagtgggaactttcggagcggtcgaccgtgatccgggagaacgggtaatctccgtcgcatactatgcgttggtcaacgtcaatgaatatgaccggaaactagttcggaaacataacgcttactgggtaaacatcaatgaacttcccccactgattttcgatcatcctgcaatggtgacaaaagcaaaggagttgatgagacaaaaagcttctaccgaacctatcggtttcaacttattgcctaaacttttcacactatccaaattgcagagtttatatgaagccatttacggtgaaacgatggataagcgcaacttccgcaagcgtgttgccggaatggattatgtggaaaagaccgataagatagataagctatgttccaaacgaggggcagccttatataagtttaatagcaaggtttatcgtaaagatccgaaattcaaattataatcaatatgctggaagaactgaaagaaaaagtatttcatgccaatctcgaattggtaaagcatggattagtcatctttacttgggggaacgtttctgccatcgaccgtgaaagcggattggtagtaatcaaacccagtggtgtaagttacgatgaaatgaaagcagaagatatggtagtagtggatctggatggcaaggtcgttgaaggacggctgaagccatcttcagatactccgactcacgtagtactctacaaagcattcccggaaatcggcggagtggtacatacccactctacctatgcgaccgcttgggcgcaagccggatgcgacattccgaacatcggaactactcatgccgattatttccatgacgctatcccctgcacggcagatatgaccgaagcagaagtgaaaggtgcctacgaactggagaccgggaacgtgatcgtgaagcgttttgaaggtttgaatcctgtacatacaccgggcgtgctggtaaagaatcacggtcctttctcctggggaaaagacgcacacgatgcagtacacaacgccgtagtaatggaacaggtagcaaaaatggcaagtatcgcatacgccgttaatcccaatttaacaatgaatcctctgctgattgaaaaacatttcagtcgcaagcatggtccgaatgcttattatggacaataatcaattaaaaactagaaattaaaaattaaagcaaaacattatgaacgcatttgatcaatatgaagtatggtttgtaacaggagcacagctcctgtacggaggtgacgcagtaatcgcagtagacgcacactctaatgaaatggttaacgggttgaacaactccggcaaactccctgtaaaagtggtatacaaaggaactgccaactcttccaaagaagtggaagctgttttcaaagctgccaacaacgacgagaaatgtgtcggtgtcatcacttggatgcatactttctctcctgcaaaaatgtggattcacggtttgcaacagttgaagaaaccgttgttgcatctgcatactcagttcaacaaggaaattccttgggatacaatggacatggacttcatgaacctgaatcagtcggctcatggcgaccgtgaattcggacacatctgtactcgtatgcgtatccgtcgcaaagtggtagtaggttattggaaagacgaagacacactgcataagattgctgtatggatgcgtgtttgtgcaggttgggcagattctcaagatatgctgatcattcgttttggcgaccagatgaacaatgtagccgtaactgacggtgacaaggtggaagcggaacaacgtatgggttatcatgtagactattgtccggtaagcgaactgatggaatatcacaaagatatcaaggacgctgacgtagacgcattagtagctacttatttcaaagaatacgaccacgatgcttctttggaagacaaatcaaccgaagcttatcagaaggtatggaacgccgcaaaagcagaattggctcttcgcgctatcttgaaagcgaaaggcgcaaaaggattcacaaccaattttgacgacttgggcgacttggaacataacggtttcgaccagattccgggacttgcttctcaacgtctgatggcggaaggttatggtttcggcgccgaaggcgactggaaatccgctgctctctaccgcactgtatgggtaatgaatcaaggacttccgaaaggctgttctttcctcgaagattacacattgaacttcaacggtgcacaaagttctatcttacaatcacatatgttggaagtttgtccgcttatcgcagccaacaaacctcgtctggaagtgcacttcctcggtataggtattcgtaagagccagacagctcgtcttgtctttacttctaaagtcggtacaggttgtactgcaactgtagtagacttaggcaaccgtttccgtctgattgtaaatgatgtggaatgtatcgaaccgaaaccgctgccgaaattaccggttgcttccgctctttggattccaatgcctaactttgaagtaggtgccggtgcatggattctggcaggtggtactcaccattcttgcttctcatatgatctgaccgctgaatactgggaagattatgctgaaatcgcaggtatcgaaatggtacatatcaataaagatacgactatcagctgcttcaagaaagagttgcgcatgaatgaagtatattatatgttgaataaagcactttgctaaacactatccaacatgaaatcagatgcaaaatcaacaatcgaaacaggcaaagccattcttggaatcgaactcggttctacacggataaaagccgttttgattgatcaggaaaacaagccgattgctcaaggaaaccatacttgggagaaccagctagttgacgggctttggacatacagcatcgaagccatctggtccggtctgcaagattgctatgccgatctccgctccaacgtgaagaacttatacggcatagagatcgagaacctggcagctatcggtgtcagtgccatgatgcatggttatatgcccttcaatgcaaaagaagaaatcctcgtacctttccgtacctggagaaatacgaataccggtcgcgcggcagcagctttatcagacctgtttgtctacaacattccgttgagatggagtatttctcacttgtaccaggcaattctggacaacgaagcacatgtcaaagacattgacttcctgactactctggcaggttatgtgcattggcagttgacaggcgagaaagtattgggcataggcgatgcatccggaatgctccccatagacccgaccacccacaactattcagccgaaatggtggcgaaattcgacaagctgattgctcctaatcagtacaattggacactgcaagatatcctgcccaaggtactgtcggcaggtgaaagtgcaggtgtccttacacctgaaggaagcaagaaactcgatgcatccggtcatttgaaggcaggaataccggtatgtccgccggaaggagacgcgggtaccggtatggttgcaaccaatgctgtgaaacaacgtacaggaaacgtatcggcaggaacatcctctttctccatgattgtattggagaaagagttgtcaaagccatacgagatgatcgatatggtcaccactccggacggaagcctggtagctatggtacattgcaacaattgcacatccgatctcaacgcatgggttaacttgttcaaagaataccaggagcttctgggtatacctgtagacatgaacgaaatttatagcaagctctataacattgctctcacaggtgatgccgattgcggaggtctactctcctacaattatatttcaggtgagcccgtcacaggacttgcagaaggaaggcccttgtttgtacgttctgccaatgacaagttcaatctggcaaacttcatgagaagccatttatacgcttccgtcggagtactcaagattggcaacgatatcctgttcaatgaagagaaaatcaaagtggacaggatcacaggtcacggtggattattcaaaacaaagggagtaggtcaaagaatactcgcagctgccatcaactcgcctatttctgtaatggaaacagccggtgaaggaggtgcttggggtattgccctgctcggttcttacctcgtgaacaatgagaaaaaacaatcgcttgctgattttttggatgagaaagtatttgtcggagacgccggtatcgaggtatcgcctaccgctgaggacgtagccggttttaatacatacatcgagaactacaaggcaggattgcccatcgaagaagcagcagtgaaattcaaatagccctcatcatggagggctctccgcttctttcttaatcacctaagtattaacataaactattcccattccctctccggaaaggagagggacaaggggaaactattatcatgaaaaccacaccgttcatacttgcacttcttctatccgcctcactgtctaaagcacagaacgttccacaggtttcatacttccccttacaagacgtcaaactattggatagcccgttcttacaagcccaacagactgatttgcattacatactcgcccttaatcccgatcgcttgctggctcctttcttacgcgaagcgggactcactccgaaagctccgagttatacaaattgggaaaacaccggactggacggacacatcggcggacattatttatccgcactctccatgatgtatgccgctaccggagataccgcaatttacaaccggcttaactatatgcttgacgagctataccgtgcccaacaagctgtcggaacaggttttatcggaggaactccgggcagtctccaactttggaaagaaattaaagcaggtaatatccgtgccggaggtttcgacctcaatggcaaatgggtgcctctctacaatatacacaagacatacgccggattacgggacgcctacctctatacaggcagcgaccaggcacgccggatgttgattgcttttacagattggatgatcgacataacttccggtctgagcgatcagcaaatacaagacatgctccgtagcgaacatagcggactaaacgagactttcgctgacgtagctgcaattacgggagataaaaagtacttggaactggcacgtcggttctcccataagattatccttgatccgcttatcaaagataaagaccgactgacaggcatgcacgccaacacccaaataccgaaagtgatcggttacaaacgaatcgccgaactttcacaggacgacaaaaattggaatcacgccgaagaatgggatcatgcagcccgtttcttctggaatacggttgtcaacaatcgctctgtctgtatcggagggaatagtgtacgcgagcatttccacccggccgataattttacctccatgataaacgatgtgcaagggccggagacctgcaatacctacaatatgctccgccttactaaaatgctttatcagaactctcacaatccctgcaatataaatgagcccgaccccaactacatcaactattacgaacgtgcgctttacaaccatatcttagcgtctcaagagccggataaaggcggatttgtatacttcactcctatgcgaccgggacattaccgcgtttattcacaaccggaaacatctatgtggtgttgtgtcggctctggtctggagaaccataccaaatacggtgaattcatttatgcgcatcagaaagatacgctttatgtcaatcttttcatcccctcacaactgaactggaaagaacaaggcgtcatcttgacacaggaaacccgctttcccgatgacaataaggttactttgcgaatagataaagcttctaagaaacaacgtactttaatgatacgcattccggaatgggctaaccaatcttccaactattcaattagcattaatgggaagaaagaaacgtttcccacgaaaaaaggaaatcaatatcttcctctttcccgtaaatggaaaaaaggagacgtcataaccttcaacctgccgatgaaagtcactattgaacaaatccccgacaagaaagattattatgctttcttatacggtcctatcgttcttgcagcttccacaggcacagaacatctcgatggtctgtatgccgatgacagtcgcggcggacatatcgcacatggcaaacaaattcctttgcaggaagtcccgatgttgataggagctcccaattcaatatgcaaagatcttcacaaagaaaaggggaaccggatcgctttccgctacaatggagatgtctatccggcacaaggcaaagcattggaactcgttcctttcttccgcctgcataattcccgttatgccatttacttccggcagacaagtgaagagcgcttcaaagccattcaggaagaaatggcaacagccgaacgagaaacggccgaattagccaatcaaactattgatcttatctttcccggtgaacagcagccggagtctgaccatgctatccaatatgagcaggcagaaaccggaacggataaagacagacacttccgccgtgccaaaggttggttcggctatcaactgaaagtaaaagaggaagcaagccgtctcctgattacgatacggaaagatgaccggaacaaaatggctatcctcttgaataatgaaaagttggctgttaaaccgacaatcagtgaagcggacaaaggcggttttattactctttcttatgccctgccccaaaagttgaacacgggcaattgtccgatacgtttcatccctgacgggacggaatggactcctgccatctacgaagtacgtttgctaaaataaaaaaacaatcattaaacaaataccatttatgaaagcaaaattattagtcagcacagcctttttggcagcttcagtatctctttctgcacaaaagagcgctaccatcactttacacgccgatcaaggtaaagaaattatccccaaagaaatttacggtcagtttgccgaacatttgggttcatgtatctacggcggtctttgggtaggcgagaattcggatattcctaatataaagggatatcgcacagatgtattcaatgcattaaaagaactcgccgttcctgttcttcgttggccgggtggttgttttgccgatgaataccactggatggacggtatcggtcccaaagagaaccgcccgaagatggtaaataacaactggggaggaaccattgaagacaatagtttcggtactcatgagtttctaaacctgtgtgaaatgctgggttgcgaaccatacgtcagtggaaatgtaggcagcggtacggtagaggaactcgccaaatgggtagaatatatgacatctgacggtgactctcctatggcgaaccttcgccgcaaaaacgggcgcgacaaagcatggaagattaaatatctgggtgtaggaaatgaaagttggggatgtggcggcagtatgcgtcccgaatactatgcagacctgtaccgtcgttactccacctattgccgcaactatgacgacaaccgtctcttcaagattgccagcggagccagtgattacgactataactggactgatgtattgatgaatcgtgtaggacaccgtatgcaaggtctttctcttcattattacaccgtaacgggctggagtggcagtaaaacttccgctactcaattcaacaaagacgactattattggacaatgggcaaatgccttgaagtggaagaagtcctcaaaaaacattgcgccatcatggacaaatatgacaaggataaaaaaatcgcccttttactcgacgaatggggaacttggtgggacgaagaacccggaaccatcagaggacacctctatcagcaaaacacattgcgcgacgctttcgttgcctctttgagccttgacgtatttcataaatacaccgatcgtctgaaaatggcaaatatcgcacaagttgtcaatgtacttcaatccatgattctgacaaaaggaaaagagatggtactgactcccagctattatgttttcaaaatgtataaggtacatcaagacgccacttatctccctatcgacctggagtgtgaaaagatgaatgtacgcgataaccgtaccgtaccgatggtaagcgccacagcctccaaagacaaaaacggtgttatccatatttccctttcaaacgtaaatgccgatgaaacacaggaaatcaccatcaatctgggagacacaaaggcaaagaaagctaccggagaaatcctgacctctgcaaaactcaccgattacaattcttttgaaaatcctaatattgtaaaaccggcacctttcaaagaggtaaaaatcaataaaggcacaatgaaggtaaaacttcctgctaagtcgattgttactttagagttacagtaaatcaagggctattacttattgtattataaacaagaagacaagtaaaatggtaacaaaaaagatagctcttttggattgttaaatccacataaagagttatctttgccaacaatcttacagaaatcaattaattttaataatatgaacgataataaacttatgaatcgtgcagcggataacatccgtattcttgctgcttcaatggttgagaaagccaattccggtcacccgggtggcgccatgggtggtgctgactttgtgaatgtactcttttctgagtttttagtatatgatccggagaatccccgctgggaaggacgcgaccgtttcttcctcgatccgggacatatgtctccaatgctttattcaacattggcactgaccggtaaattcacattggatgaattgaaagaattccgccaatggggaagccccactccgggacatccggaagtggacatcatgcgtggtatcgaaaatacttccggtccgctgggacaaggacacacttttgcagtaggtgctgccattgccgctaaatttctgaaagcacgcttcaacgaagtgatgaatcagactatctacgcttatatctctgatggcggtatccaggaagagatttctcaaggttccggacgtattgccggtgcattgggtctggataatctgatcatgttctacgactccaacgacattcagctttctacagaaacgaaagatgtaactatagaagatactgccatgaagtatgaggcatggggatggaaagtactgagtatcaatggtaatgatcctgacgaaatccgtgcagcgatcaaagaggcacaggcggaaaaggaacgtccgacattgattatcggtaagactgtgatgggtaaaggcgcacgcaaagcggacggtagcagctatgaagctaactgcgctacacacggtgctcctctcggtggcgacgcatatgtaaa

SEQ ID NO: 12032 - DNA, 3053 bp, Unknown
  gut microbiota DNA sequence
acgtgcagaagaattgaaaaagatcgtagctgaaagatatgcagtgaaagccgcatgggcaaaagctaatccggaacttgcagccaaactggaactgttcttctccggcaaagctccgaaagtggattgggccgctatcgaacagaaagcaggcagcgctactcgcgccgcatcggcaaccgtattaggtgctctcgctacacaagtagaaaatatgattgtagcttctgccgacctttccaactctgacaagaccgacggtttcttgaaaaagactcattcgttcaagaaaggcgatttcagcggagcattcttccaggcaggtgtatctgaactgtcaatggcttgtatctgtatcggtatgtcgcttcacggtggtgtaatcgcagcttgcggcacattcttcgtattctccgattacatgaaacctgccgtacgtatggctgcattgatggaacaacccgtgaagttcatttggacacacgatgcgttccgtgtaggcgaagacggccctactcacgaaccggtagaacaggaagcacaaatccgcttgatggaaaagcttaaaaaccacaagggacacaactctatgttggtactccgtccggcagatgcagaagaaacaactatcgcatggaaacttgcaatggagaatatgtccactccgacaggtctgattttctcccgccagaatattgctaacttaccggaaggaacagattacgaacaagcagcgaaaggcgcttatatcgtggccggttctgacgaaaacccggatgtagttttagtagcttccggttctgaagtttccactttggtagccggtacagagttgctccgcaaagatggtgtaaaagtacgtattgtatctgctccgtctgaggggctgttccgtaaccaatccaaagaataccaagaatctgttctccctgcaaatgccaagattttcggtttgaccgccggtttgcctgttactcttcagggtctggtaggctgccatggcaaagtatggggcttggaatcttttggtttctccgcaccttacaaagtactggatgagaaacttggattcacagccgaaaatgtatataaccaagtaaaagcaatgctctaatgaaaacaatcggattagcatgcgaccacgccggttttgaactgaaagaatatgttcgcggctggctggaagtaaaaggctgggcatacaaagacttcgggaccacctctgcagcaagtgtagattatccggattatgcccacccgctggctcttgcagtggaatcgggtgaatgttatcccggtattgctatctgcggcagtggaaacggaatcaatatgacactgaacaagcatcaggggattcgtgcagctctttgctggaatgcagagattgcgcatttggcacgtcagcacaatgacgccaatatcttggtcatgccgggacgcttcatcagcacagaagaagcggacatgattttaaccgagtttttctctaccgagtttgaagggggacgtcatcagaaacgtatcgacaagattccggtgaaatgagcctaaaataaagtaaacaaagcagtaaagctgttcttctttcaggagagcagctttatttatatttatcaaacaaaaccggcaataaactgataacagaaataaccgcagacaaccagttttaacaaggttcccaatatgaatcctatcaaggaaccgaatcctgatttaagcgcctgtgagaaatccttatttcccagcagttccccaatgacagctcccagaaacggaccgagaataatcccccatggtaagaaaagaagaccggcaagagtacctattatacatccccaatttccccacttactgccaccactgtatttactgcccaacattggagtaaaataatccaggacctgtaatacaaccacaatcagcaaccatacaattagttgcgtagtactgtaccccaccttatctgtacaatgaagaataaacagtcccaaataagcaataggaggaccaggaagaaacggaagaatacaaccggctaatccggcaatcatacagagagcaccaatgaaaatcaaaataacgtccagcataatctgttcaaatttaattctgtatagattagatagaataccatctacaaaaatacaaaaagaaaagtaaaagaaaaaccgtcactcacgtgaaagtaattcttttacttctctataacttaatgaacaaacttaataattaaccttatgacttaaatgtcttcagtgtacatcataaacatacaattatcttattattcccattagattttaaagggtgtcattttcagatatacccgataatctttaatcatacctgtcttaccggcttctgctctcggcaaatatgaaaatccggttactaccttatcttcaccaagattaatcacaatctgatgcgggaatttatgtttggcagccgaagaatagcttgtgtgccaaaaggtagattcctgcaagtcgaacacattcgttgcaatattattcgcttcttctgtttcctcactatctgcataaacaactttccaatgttgacgtgacaagggtttcccatcagctcccagtaactccaactcagcaatagctgcaaaatctttcccatcatgtgcattcaatgcttcgagacagaagaaacgagtttccacctcttttccaaacttcacatgttgccaaccattacccgccctgaaagaacctttataaacgggtgtttctccgctcaagtccaagttctcacctactttacgatgtgcataggcagcaccatgaacgcgtaaattatcgagaataggttgttgcaagcctgccgtttccggttgtacaggtccagccatatccaatataatcacttcattctctcctttcttcaaccaacatcccggcacatataaggtttgttgtggcccaatttcccagtaacgtccaatagcataaccgttcacccaaaccatacctttactccaggtagtcatattcaagaatgtatcacctgttttgtccaacgtaaaggttccccgatag

SEQ ID NO: 12033 - DNA, 137 bp, Unknown
  gut microbiota DNA sequence
ttgtctatgcggttgaacacgatatgcacatgtgggtgttcccggtcttgatggcgcacgatgatatattgcgtatcggtgattttcatttcacgcatatactcctgcgcaagctgtaccatcttcccatctgtcaa

SEQ ID NO: 12034 - DNA, 194 bp, Unknown
  gut microbiota DNA sequence
ggaacgaaagaggaaaaggacatatccgactacttcaaagccgggaacacccgtgaagatttcctgaagctgtttatcgaatttttagacaacctgtatagcgacacattgattatgctaaaatcatgcgagatagatttcaacaacccgcccgccaaagcacaagagattatttcggcgggtgacgttccgct

SEQ ID NO: 12035 - DNA, 3427 bp, Unknown
  gut microbiota DNA sequence
ccatcatctgacagccacggccgtatatgaggtgacctcctccgaaaccaggacaatgggtataaccggtaacaacctgctgaccgagggtgtgggctggtggaatgtgggtatggcttcctctcgtgatgcaaacaatggttacgagcaatgggcgctgatgtcgggagtggcccgtgtcatgtacaattttaaggatcgttatatgcttaccggaacatttcgtgccgacggttcttctcgctttgccaaaaagaaatgggggtactttccttctattgccgcagcttggacgttgagcaatgaggatttcatgaaggatgtttcctcggttcaggacattaaacttcgcgccagttatggtattgtgggtagccaggccatcagtccttacgcaaccatgggccttatgagtgctactgcatacaattttggaaccaacagtaattttaccggttattgggcaaatgacatagcaactcccgagcttacgtgggagaagaccaagcagttcgacctgggcctggagttctccctgttcgacaggcggctgaatttcagtgtggactatttctataagcgtactacagatgcgttgcttaaaagaagtatccccggatatgtcggcggtaactctttttgggtgaatgacggcgaaatcagtaatcgtggtattgatttgagcgtgaccgcccggattatgcagaatgaccggttccaatggacctccaccttgaacggtacttatttgaagaaccgcgtggaacgcctttccggtggtgagaatgatttcatcaacggctccagtccggctgccggtatggttgattatgccaccattatcaagccgggtgaggccatcggtactttttggggatatgaatggaccggcttggatgaaaagggacatgacacttacacggatgtagatggaaatcagatgatagacggtggcgaccgcaaggtcatcggcaaggccaatcccgatttcaccctgggatggaataactccctgtcttataaaaactgggatctgaacctgttcttcaacggatctttcggagccaagcgtttgaatcttgtaagatatactatggcttcggccgaagggaattcccgctttgtaactctggcagacgcctatctgaagggattcgacaagattggctcttcggcaacatacccgagcctgaccgaaggtggaaataatctgcagccggtttcaaccaaatggctggagaacgcggacttccttcgtttggagaatatcagtctttcatacactttccccaaaaagacaacgggattcgctgatttgcggcttactttcagctgtcagaacctttttacaataaccgggtacaaggggatggatccggccggtactaccttctcgaacagcagcgttgacgttgacgcgggtattgacatgggagcctatccttccccaagaacattcacattcggtctccggatgaatttttaaatctaaaatagaagaacttatgaaaataaaaataatagcaggcactatggttgccctgtcattttcactgatgtcgtgcagtgatttcttaacggaagatcccaggggaaaactcactccggaaaacttcttctctacccaggatgaattgaacatgagcatatatgccctttaccagaaagtcaatctttcacaggtatatacgaacatgcagctgccccagtggcagggggatgatataacgaccaatccggggagcaacaaacagcctgccgcagaaatggacaagtttgccgcagcaaacaacaacaagggtgtcaaagatgcgtggaacatgcattatgccattgtaaaggctgccaatttgatcatacagggggcctctaaaacacctaccactcaagatgagataaatatcgccctcgggcaggctaaattctggagggcatacgcttattttaccctggtgcgactttggggaccgctgccgatgaatctggacaatgtcaacgatgattataccaaacctctatcccccgtggaagaagtgtatggtcatattgtgcaggacctgaccgaagctgaggccgtattgcctacgggttacagtggcagcccccgctttctgaacggagtgaatgtgtatgtaacccggcaggcagccaaatctactttggcagcagtgtatatggctatggccggctggccgatgaacaaaacggaatattacgcaaaggctgctgaaaaggcgaaggaggtcattgagggtgtgaacagaggtgaatacgagtataagctcgataaggattacaaagatgtgtatgctatgagcaataactataataatgagacggtgctcggcataaactattcaccgttcgtggattgggcccaggattcggagcttacttcatgtaaccagtttgaatcgctgggcggttggggagacgcctggggtgaaattcgtttctggaaggagtttcctgacggtccgagaaaagatgcgacttatgatcccaagattcgtctgaaagacggaacgttggttgactggtgggagttgaaggaggacggtacccctgtcgttccggaacatcaccccatgttcagtatattctccgtcaactgggatcctgcgtcaaaagtgaatatcagtgccccgtatgattatacaaaaccggccagtcagaacatgtgtaatgaccatcggcatagaatcattcgttattcggaggttttgttgtggtatgcggaggccaaggccaggacggggcagacggacgagttggcattcaagtgtctgaatgatgtccgcaagcgtgccggactggaaccgctcaccggactttctgcagatgaccttgccgaagcggcttataaggagcatggttgggaggtggcaggctactgggtggcccttgtcacacgccgtgcggaccagttccgtatgaacagactgaaagacacctttaaggaaagagcggagaacacggctgttgaagtcgccgacgggattcaggtaaaggagtctgtagaatatacgaacaggacatggagtgacaatctgatgtatcttccatatcctgatatggattcccagaaaaacccgaatctggtaaggtgattttttattttaagccagagggctacccgccaatcacctgttgattggcgggtagctcctctgattttcaatgtatatttttttaatatcatgcactaaattttgaattgttttttccgtgttctctgctcctgcctttccggtcatatgttttcggaaagaagggtatgtgacctgcacgtgacttttgaactgatagagaaatggggtgtggagatcgttcccgtgacattattgttcattcttatgtttttctcccttttggaaactcaggaggtatcattcgtgttccgattaatgtcctttttttgaatagt

SEQ ID NO: 12036 - DNA, 158670 bp, Unknown
  gut microbiota DNA sequence
tactcggtgctggacaaaaccaaaatcaagaccaccttccagatggacatcccccactggagggaggcaatgatctactgcctgaaacaactcgccgaataatccaatcactatgcagcgcactatcctcatcacgggcggcgcgggcttcatcggctcgcatgtggtccgtcttttcgtgaccaaataccccgattaccggatcgtcaacctcgacaagctgacctatgcgggcaacctcgccaacctgcgggacatcgaggagcggccgaactacactttcgtcaggggcgacatctgcgacttcgaggcgatgcgtgaactgttccggcagtacggcatcgacggggtgatccacctcgcagccgagagccacgtggaccgctcgatcagggatccgttcaccttcgcgcgtacgaacgtcatgggtacgctgtcgctgctcgaagctgcgcgggagtactggaacggtgactgggcaggcaagctgttctaccacatctcgaccgacgaggtgtacggggcgctggagctgacccgccccgcgggggaccctgcgggctgcgagagcggcggcggtcctttcggggaggagttcttcaccgaggagacgaagtacgacccgcacagcccctactcggcgtcgaaggcttcgtcggaccacttcgtgcgggcctaccacgacacgtacggcatgccgacgctggtgacgaactgctcgaacaactacggtccttaccagttcccggagaagctgattccattgttcatcaacaacatccgccgcggaagggcgcttccggtgtacggccgcggggagaacgtccgcgactggctctacgtcgaggaccacgcacgggccatcgacgtgatcttccacaagggcaaagtcgccgacacgtacaacatcggtggtttcaacgaatggaagaacatcgacctgatacgggtgatcgtcaaaaccgtggaccggctgctgggcaatcccgaaggcgcttcggaaaagctgattacccatgtcgccgaccgcgcgggtcacgacctgagatacgccatcgactcgcgcaaactcaaagacgagctgggctggcagcccagcctgcagttcgaagaggggatcgaaaagaccgtccgctggtacctccagaaccaaaaatggatggacgacattacttccggcgagtatgaaaaatactatcagagtatgtatgatcaaagagaataagtttgtatttctattgtagacaagagaggtttttgctggttttaatgtttcatttatgaaatatgtgctattctggtcggtcttcctcgtcctgttttatatgcttttgtggtggctgatacgccggactccggtgacgggggatgatgagaaagaggtgagccgtatctcccgcttgctgaaatggctcggcgataagtggggtgtaaaataacaccgaatagcatgaggaaagccggagcgtcgctccggctttcctcgttgctgaaatgcgctgaaaatccgcatgaaataggcttgaagtacgtcggtgcccgactgcagtccgtgcggcgtgcggattacttaccttttgcgctttatccccggtattgcacggggatcttccccttttcgcggtcggggggccgacgtccgatctccgttcgggcgataattcttcggggcgcgttcttgtctggcggttgtgcgccgttccggaaccgtcgggtttccggtcggcttttcattgaagaaatacgatttctgccgccgtttctcctcctgcgagcgggcgacgtagaccttttcgtgcgtatagggattctctccggtgtagaacatcaccgacgaaagtgtcatcggcgtgggggtgaggtcctgcacctgttcgaggttgaaatggagtttgccgaggactttctccgacagcgaacgcatgtcgcgttcggtgcagccggggtgcgacgagatgaagtagggaatcagctggtagggaagtccttcgcggcggcagatgcgctggaaatcggcggtcagccgctcgaagagcgcgaacggcggtttgcgcatcagtttcagcacggcatcttcggtgtgttcgggcgcgactttcagtcgtcccgacgtgtggtattttacgaccgtatcgagatagggactctcgtcgaacaggtcgtagcggatgccgctgccgacaaaggcctttttgacgcctttcaccgcgcggatcttttcgtaaagcgccagcagcggacggtggtcgttgttcagattggggcacatcttcggatgcaggcacgacgggcggcggcatttgcggcacaactcccggtcgcgtccgcccatgcggtacatgttggccgacggggcgcccacgtccgacagataacctttgaagtccggcatccgggtcacgcgctccacctctgcgaggatggaacgttcgctgcgcgagttgatgaacttgccctgatgggccgatatggtacagaacgaacagccgccgaagcacccccggtggatattgaccgagtgtttgatcatctcccacgccggaatatcccctttgccgttgtagcggggatgcggagcgcgctgatagggaaggtcgaacgagtggtccagctcgtcggtcgagagtgtcgtgttgggcggcgtgacgaccacataacggtcgcccacggcctcgatgagcgtcgccgtcggctccatcaggttgctctgggtctcgatgatggtgaaattctcgccgaaggcccgtttgtcccgcacacactcctcgtaggaatgcagccggatcgtctccgccgggtcgagccgctccacgtaaccgtcgtcggccatgaaggctacctgccgcagtttgcgcagcagtttggcgttgtagccgttgcgcatggctttggcgacctgctgcacgacccgttcgcccatgccgtagatcagcaggtcggcgccgctttcggccagcaccgagggtttgagcgtgtcgttccagtagtcgtaatgggtcagccgccgcagggaagcttcgatgcctccgacgaccaccggaacgtgcggaaacagccgtttgaggatttgcgtatagaccttgacggcgtaatcgggccggaaccccgccttgccgccgggcgtgtaggcgtcgttgctccggaggcgcaggttggccgtgtagtggttgaccatcgaatccatcgatcctgccgagacgccgaagaagagccgcggcgcgccgagtttggtgaagtcgcgcaggtcgtcccgccagttgggctgcggcacgattgccacgcggtagccttcggcttcgagcagacggccgattaccgccgcgccgaatgccggatggtcgatgtaggcgtcgcccgaaaagaggatgacgtccaactgctcccatccgcgtgcgcggacctcttttatcgtggtcggtagaaacaaagcgtggtttattttcgtaactgtttatttcgtatggctttccggccggcgcaggcggcatttgcaaatccgttcctattctcaaacccttccctctggaagggctttttgccgccctgcggcagcaggtgaaagcatgccgctgtactttccggtgcggcgggtgtcttcgggacctctccgtatgcgatgtccgcgcgtatgcggttgccgtgttttcggggacaggaccgcggatttgtgccgaaagaccgctgccggaccgcttatccgttattgctctccttcgacgccgcggcgtaggtgtcccatttttcgagcagcgcgcggaaatcgtcgggcagttcgctctcgaaatagacagcctcgtgcgtcatggggtgtacgaagcccagcgactgcgcatgcagagcatggcggggcattactgcgaagcagttttcgatgaactgcttgtatttcgagaaggtcgttcccttgaggatgcggtcgccgccgtagcgttcgtcgttgaagagcggatggccctgccacgacatatggacgcggatctggtgcgtgcggcccgtttcgagccggcactcgaccagcgtcacgtagccgtaacgcttcagcacccgccagtgggtcacggcgtgcttgccgtccgagccgtcctcgaagacgaacatcttctgccggtcgcgggggctgcgccctatgttgcccgtgatggtcccttcgtcctcttcgaaattgccccataccagcgccacgtaacgccgtccgatggtgtggtcgaagaactgtttggcaagccgcgcgtgcgactgttcgtttttggcgaccacgagcagccctgaggtgttcttgtcgatgcggtggaccagccccgcgcgcatgtcgccctcctgaaacaggggcaggttgcgcagatggtaggtcagcgcgttgacgagcgtgccgctgtagttgccgtgaccgggatgcacgaccagccccgccggtttgttgacgatcagcaggtcgtcgtcctcgtagggtatttcgagcggaatgttttcgggaatgatctccacctcgcgccgcggatagggcatcacgatctggatgcggtcgagcggcttgaccttgtagctcgacttggcggccttgccgttcacgagtatgctgccgcagtcggccgccgcctgaatgcggttgcgcgagcacttctccatgcgtacggtcaggaacttgtccagccgcagcggagcctgccctttgtcggccaccacggcgaaatgctcgtagagtccggcgccctcgccgtcctcgtccgccgtctgcccgtcatcgagttccggatcctcggttatgtagcgttcgtcggccatcagtcgaaaaatccgtcgttatcggttgcgggcaggatttcgggctgttcttccccggcggcggccgcctgttcgaattcggcctgcgccagcgagtcggcgcgctcgcgttcgagccgcagccgctcttcggcggcttcgcgggcctgtttctcggcggtggcgcggtgctgggcgagttttttctcgtcgagtgtcagtttgagatcgacgcgcgaacccagcgcggcgctccgctcggccgtcggaacctgcacgtagacgcgggcgtctttctggttcaacaggttgatgccttcgtcgaagtcgatcttgccgacattaagccccagctcccacaaacggcccttggcctccttgagcgggaatcccaccagccgcggcacgaccgtcgagccgaaaccgccctcgacgcccacgtagagcgttacgcccgatcccatttcggcctgaatcctgctgttctgggtgacgggacgcccttcgcagtactcttccagcacatagttggtcgccatgtcggcgcggtagatcagttcgccgatttcgagtcctgcgatctccagcatgttcttggcttgccgcagcgaacggcctgccacgtagggcacgggcaccatcttctgccggaacgagttgatcgtgatgtagaccgtacgtccgggcttgacctccacgccgccttcgggcagctggtcgaggacgatgccgccttcgtaggccggcacgaacagcgagtcgttgatatgcagttcgagatcgtatttgcgggccgtgcgctgcgcgtcgtcgagcttcacgcccgaaaagtcgggcacgatgcggcgggcgccgtggcgcgtgccgacctgcatgacgaaatgcgccgtgacggccattgccagaatgatcgccgctatcagcacgaggttgtatgccagcttgttctgccgcagtttcttccagtaatatgtcagtttctccattttcgcgggagttgtgttttgtgttcgtctgttttctccgggcggggcggactgtccctactggtccggaagttcgttgtaaaacgtgtcgcgttccacggcgcggcagcctgccgcccggacgatgcgccgcatctcctcgacgctcatcgaggggcgccggtcgtcggccccggccatcgagtagattttcgtcgtgtcgtcgatcgtgccgtctatgtcgtctgcgccgaaggccagcgccagttcggtcgtcgccttgccgtacatcacccagtaagccttgatgtggggcacgttgtccagatagatgcggctcatggccagcatccgcaggtcttcgatcaccgatacctcgccgatctccgacatcgggttgccgaaattgcggtatttgagcgggatgaaggcgttgaagccgcccgtgcggtcctgcagttcccgcagcctgcgcaggtggtcgatgcggtgttccagcccctcgacgtggccgtagaggatcgtcgcattggtcgggatgccgagccggtgggccgtttcgtgcacttcgagccattcgtccgtcgatcccttgtcggggcagatgcggctgcggatctcttggtcgaaaatctccgcgccgccgcccggaatggccgccattccggcctctttgagtcgccgcaggccctcctcgaccgagagtcccgccttgcggatcatgtacgacagctcgatcgccgtgaaagccttgaccgccgcttcgggcagtatcgccttgacgcggcggatcatgtcgatatagtattccagtccgtggtcggggtgtacgccgcccacgatatggacctcggtgatgcctttgccctgccggccgcgggcgatctgctcgatctcctccattgtgtagtcccacgcttcggggcttcctgccggacggcggtaggagcagaaacggcagttgaagacgcagcggttcgtcggctcgatgtggaaattgcggttgaagtagaccttgtcgccgctcacgcgccgcttgcgctccgtcgccagctcgcccagcagccacaggggggcttcgcgccagagccgtgcggcttcggcgtcgccgatacgcgctccgccgcgtacctcggcggctatgtcgtcgatctgctgcatcttatttgggggctttccggtagaggtagacggcgatgaataggtagatgatgttcggcagccagacggccagtccgggcggcagcgtgccgctcttggcgaactcctcgaagaaacggttgaacaggatgtacgagaagcagaggccggtgccgatgccgatgtggagtcccgttccgccgcgcaccttgcgcgacgagagcgacacgccgatcagcgtcaggatgaaggtcgagagcggataggcgaagcgggcgtgtttctcgacctcgatgatgttgatggcgtcggaacctttggcccgctgctggtcgaggaattcgttcagctccgtgatgttcatcgtctgtatcaggtcgttgatctcgcccagctcggtcacttcgaggttgatgagcgtgtcgaggttgcggaactgctcgaatttttcgacgcccagcgagtcgaattcgcgtttggtgtagcgcggcgcggtccagcgtttggtttcggggttgaacttcacgtcggacgcttcgagcgagcgggtcatcgtgccgctgtagtagtgttccagcgcgaggaacgacgcctgctgcgatccgtcgttgtagccgcggatgtaggcgaacgtgcccggctcgatctgccggtagatatggcggttgaacttgttgttctgcttgcgcttgatgtactgcgattcgaaattgacgatgtgtcgctgcgaaatggggatcagccagaggttgagcgtcagcgacaggctgccgatgatcagtgcgccgaggaagtagggccacatcaggcggcggaacgacatgccgcccgaaagcatcgccacgatttcggtctggtaggccatcttcgaggtaaagaagatgcaggcgatgaaggtgaacagaccgctgaactggttgatgaagaaggggatgaagttcaggtagtagtcgaagatgacgtcccgcagcggggcgtgcagctccgtgaagtcgtcgatcttctccacatagtcgaacagcaccacgacgatgatgatcatcgcgatggcgaagaagtaggtcgcaaggaacttgccgagtatgtagcggtctaagatcttaaaccccggaaatcgcagtttcatacgcttttatagtcttcgtgtcagttttgcgaccatcgcatccttccacggcttgaaatccccggcggcgatatgttcgcgcgccatccccaccagccgcaggtaaaaggcgatgttgtgcagcgaggcgatctgcgccgccagcatttcgccgcacgtcaccaaatggtgcaggtaggccttcgtgtagagcgtatcgacgaacgccgtgccttcggggtcgatcggcgaaaagtcgtcctcccacttcttgttgcggatgttgatgaccccttcggccgtgaacagctgcccgttgcggccgttgcgcgtgggcatcacgcagtcgaacatgtccacgccgcgctcgatcgcttcgaggatgttgaccggcgtgccgacgcccatcagataacgcggccgctcctccggcagtatggcgttcaccacttcgatcatttcgtacatcacgtcggtcggctctccgaccgcgaggccgccgatggcgtatccgtcggcgtcgtactgcttcacgttctccgccgcgtgcgccctcaggtcgggataggtgcacccctgcacgatcggaaacagcgcctgataatgcccgtatttgggttcggtctgatggtagcggttgaaacagcgctccagccaccgctcggtgagcgccagcgacttggcggcgtattcgcgcggtgcgtcgcccggagggcactcgtcgaaggccatcatgatgtcggcgccgatcgtgcgctcggtgtccatcacgctttcgggggtgaagaggtgtttcgatccgtcgatgtgcgaacggaagtgacacccctcctccttgagcttgcggcatgccgcaagcgagaagacctgaaatccgccgctgtcagtcagcatcgggccttcccatgtcgagaaacggtgcacgccgccggccttttcgatgatctccatgccgggccgcatgtagaggtggtaggtgttggccagaatgatctgcgcacgggcttcgtcgcgcacgtcgcggtggaaaatgcccttgaccgtcgccgccgtgcccacgggcatgaaaatcggggtgcggatgacgccgtggtcggtcgtcagctcgcctgcgcgggctttggtcgccggatccttatgctgtaatgtaaacttcatgctcatatattcggcaaaaatacataaaataatctgatttgggaattctgaattctgaattgttttgtacctttgcgcatatttcgcctgtatgcaatttttcgatacgcttctgacatgttacggctgggaaggcatcgcccttgcgggggccgtgctggccatgttcggcgtgcagctgtactactatattttcgtttacggccggattcccggctacaagaacaaccgccgcagcgcggtgctcgacgccgaacctccggtgtcggtggtcgtgccgctcttctcggaggattattcgttcgtcgaggagcgtctgccgctgatgctggcccagagctaccccgacttcgaggtggtgatcgtctacgtgggccacgactccgatttctacgaggacctcgtgcggctcaaacagtcgttcccgcagatcgtgacgaccaagatccacctcgacccgcgtttcccgatttcgcgcaagatggcgctcaacgtcggcatcaagtcggcgcaccacgagcatatggtcttcacttcgaccgacgcctgcccgcagaccgaccgctggctgtcgctcatggccaagggcttcacgcggggcgagatcgtcgtgggctactgcggcgtggagcgcaaaaagggcttttcgaactacatgatgcgcgcttggcgcatgatgcactcggccgactggctcgcccgcgccgtgcggcgccgcgcctaccggggcacgctccacaacttcgggttcaccaagcacatctacttcggggccaacggcttcagccacctcaatatgaacatcggcgaggacgacctcttcatgcagaaggtcatgacgcgcgacaacgtgagcgtcatcctctcgccacgggcttcgctgcgcgaaaagacgtggggcggcatgggctggtggatgagccagctgcgctattacggctcggcgttccgcttctatccgcagacggtccgcaactacatccagtgggagctgggatcgcgctcgctcttcttcctgacggtcgtctgcgcggctgcggtgatgccgttcgagttcaagatcgcggcgctggccctgctggtgatccgcttcctgatcgtggcgatcgaggtgcggcgcatcgcgcgccgtctgggcgaatcgggcatgatgggccgctatttcgtctacgacctgctgagtccgctctgggccttggcgctgagcgtgatgctgatgcgcaaagacgaccgcgtatggagatagccgactatatcgtcgccgaggaccggcggctggtggaactggtgctcgaaggcgacgatacggccttcgaataccttttcaaccgctaccgcgacgctatccaccggctgttcgtgcagcggctgggcggggtgaacgacgccgacgacctgctgcaggagactttcatcaaggtctatatcaacctgcaccgctacagcaccgactataccttcggacagtgggtctataccatcgcccgcaatacgttcatcgacttcgtgcgccgccgtcaggacgacctgtcgatcgacgagcgtttctcgtcgcccccctcgacggccccgacccctgaggagagcgtcatcagcctccagcagcggacccagatcgagcattacctcgaacggctgacgccgcgttaccggacgctgatcgtcatgcgcttcttcgacgaatactcctacgaggagatcgccgccaagctcaccctgccgctgggcaccgtcaagacgcagatccaccgcgcccgcgagcagatgtgcaaactgatcgcgcagggcgacgaacgatgacacgatttaaggattaaaagtcaagatttggaactgattctcaaatatttccccgaactcaccgactgccagcggcagcggtttgcggcgctgtacgacctttacgccgactggaacgcgaagatcaacgtcgtgtcgcgcaaggatttcgaccagctgtacctgcgtcacgtgctccactcgctggctattgccaaggtctgcgcgttcgacgccggggcgcgcattctcgacgtcggctgcggcggcggctttccgtcggttccgctggcgatcctcttccccgaagcgcgtttcacggccgtcgattccatccgcaagaagatcgctgtcgtcgaaggcgtgaccgcgggactgggtctgcggaatctggaaccccgctgcgcgcgtgccgaaacgcttccggaacgctacgattacgtcgtttcgcgcgccgttacggccatgtccgaattcgtgaactgggtttggaaccgcctcgaacgcggacagcgcggcaccctgcccaacggcattctctacctcaaggggggcgatctggccgaagagctggcgctgaccggcaaacggtgggatgtctacgacattgcgcgcttcttcgaagaggagttcttcgagaccaagaaagtggtctatacacctaagaaataacgcttctggcaactcgcggcgccgctattcctgcggctcctccggataggttatccccgcgaaaaatttctcaagcgagatattgtaaaatttgcagaatttggcgatagactccaaagaggggaatcttactttgttttcatagccggaaatacccaaacccgtattgtgcagaacatactctttcgtgtgattgtgctgttcccggatttccgttagtcgccgggcaatcaaatctaccaatatggggtttgtaggtttcaaatcatctgtattttagaaaaaatgattcacatttgacagaagtagggtatggtgcgctggctgtgaatttcgtatgattgatttattcctttgccggatagtctattggtgaaaagaattcgacgatagttatattgtagaacttgcaaaggatagctattgtcgtcagcgacggaaaatcccggcctgtttcaagatgcggaatatccaagccggtgtattcatttacgtattcttgtgtataatggtggtcttcacgtaaattttttatacgttgaataaccattttgaataattcttcgtcgcggcgttgctttcttttgggcattttaactcatttttacaaaaaaatgaatcttcacgcctttttatattggagcatcttccaatattgagtttttttacttatatttgttgcgtgaaacaataaaaactaattacagaaattatgctaactttgccgtactattacggtaaagtgacataatacagaggttaagacaacctttacgcatactggtaaacttgcaaactgctatattccaaacggatatggcaggtttatggagtagtgtaaatgttgtctgaaacccaatgtcatgcctgcggcttcggccgtgggcggcttgggcgtaagggcaattttactccacggcattgcaaggccatccagtagaaattgtacctgcgcccttgctttttttcggcggggccgggtcggaaggaatataaactgatttcaaccccggcgcaatgtcacgagcaatctgttgtaaggcgaatgtattatccggcggccggcggtcgccgggcgttgccgtgccgtctgccggggttgattccataaggacgggcggcgcggccctgcgatctggtgagcggcacgatgaaatcccgcatcgcttcgtcctttttttgttacagccgggtgcgggctgccgaaatgaattcttcatatatctgatgagttgcgtcacggagttgtttcggtcctgcatccggctttttattcggcaaagagggcggttattcggaatattgattatctttgtgtcatgattaagactctccataaatcggattcggtgttgtaaacgattcgtacccgccgtacggatcgtcctttcgttcgctcccggactctctccgggggtaattttcatgtaattggttcagtttttttaatccgcgtacgacgataagggcattgccatgcctttgcgtgtacgccgcaatacttcaagacaatgagtaacgaaaataacgccattcacggattcgacgtcaatctgatctgcgattttttcctgaataccgaacggcaggggccgggaagtcccgaagcgaccctcaaggcgctgagtttcatcgacaacctgaccgacggatccctgatcgccgacctcggctgcgggacgggcggtcagacgatgacgctggcccggcatgcgccgggacgtattacgggtctcgacttctttccgggattcatcgaccggttcaacgccgacgcccggagactgcacctcgccgaccgggtgaagggcgtcgtcggttcgatggacgccctgcctttccgcgccggggagctggacctgatctggtccgagggggcgatttacaacatcggcttcgagcggggcctgaacgagtggcgcgaatacctgaagccgggcggctatctcgcggtctccgaaagcgtgtggtttaccgacgaacgtccgacggaaatccatgatttctgggtcgacgcctatcctgagatagatacgattcccaacaaggtggcccagatccatcgggcggggtatcttccggtcgcggccttcgtcctgccggagacctgctggacggaacactatttcgctccgctggccaaggcgcgggagctgttcgcggcgaaatatccgggtgacagcaccgccgaagggctgatggcgttccagcgttatgaggaagagctgtaccgcaagtacagtgagttctacgggtacgtctttttcattgcgagaaagccgaatccgcgccggacgccgtgttccggtgcgatgccgaattccggtgcgacgccgggcgacggggtgcggagccgcgctgcggaccgctgatcgccgccccaaggggcgcatcaagcccttgtccaatgtgttcgcccctgccgcaaaactgcggcaggggcgatttttgtttttcggaagttgcgggacggcccgcgttttcggcgtcccggtccggcggcggttacctgcgcttcgagccgtcgatgatcttctggacgctctccatgaactccttcggagccgatgcgccctgtatgcgtcccagcagctcgccctgcgtgtcgaagaccagatagagcggaatggctccgctgccgtaacgcttcatcagctccttgcccgtgggtttgtcggtgtcgtatttggccgcgacgaaacgctgctgcatgaagtcgccgacatccttgcgcgagaagacttcgcgttccatcatccggcagggcgggcaccacgaggcgtagaggtcgatgaagaccagcttgccgctcttgatcgccatttcgcgcacggcgtccgtcgatttggtttcgaattttacctgtccctgcgccgcacccgctccgagcgccagcaacaggacgaagatcagttttttcatggcatcttgttttacggctaacgtgcaagaaccgtgctctattgcccgtcctccgccgccgcggtgctcagcagtccgcaggcggcctgaatgtcctcgcccctcgaagcgcggatcgtggtctgtatccccttcgccgtcagcgtgtcgcggaagcggatcatcgcctcgtcgtcgggcgagaagaagggcgatccggggattttgtggaaccggatcaggtttatgcggcacttgatgccgtccagcaggcggcacagttcgcggatatgccgcggcgagtcgttcaggccgctcatcacgatatattcgaacgacacgcgccgctggtgcgtgaagtcgtaccggcgcaggatggccgcgacttcggcgatcggccatgcccgttcgaccggcatgatcgcggcccgctcctcgtgaaacgggttgtgcagacttacggccagatgcactttcgttgcgtcgagaaaccgctgcagttcgggcgctacgcctgccgtggagagggtgatgcgcgtcggcgaccagccgaagccccactccgaagtcatgatttcgagcgcccgcagtacgttgtccgtgttgtcgagcggctcgcccatgcccatgaagaccacgttcgtcagactgtcgcgttcgggcagcgagacgatctggttgaggatttcgggcgctgtcagcgagtgctgcagtccttgccgtcccgtcgcgcagaatttgcatcccatgcggcatccggcctgcgacgagacgcacaacgtggcccgctcgccgtcgggaatgtaggccgattcgatccatgcgccctgctgcgtgcggtagaggtactttttcgttccgtcggccgactcggtgatccgcgcgggcgggatgaatgcggggcggaagcgttcggccagcttcgcgcggtgggccgcggcgatgtcgctcatccgcatcgggtcctcgacgtgtttcgcgtagagccagcgggccagctgtttcgcggcgaagcgcggcattcccaactcggcgcacacggcggcgagctgctccggggtcttcccgtataacgtttccgaaagggccatttttccgtctcctgcgagctgttttccggcacaaaagtaggtaaaaaataaagatttttgtgcgggatggcgcatttttgaatttttatccatatatttgtggtgcatagcatgcctgtgcgtgatttttgactttgccgaacaattaaaattcaaataaatggaaattaagaaatcacccaaagcagaccttcagaacaagcggggtcttttgcttgaaatcggccttgtagtggctctcgcgctggttatcgccgcttttgcctacacgccgaaggaacaccgtatcgagaaagtcgacctgaactacggtccggtcgaagaggagattaccgagattacccgtcaggaccagaagccgcccgaacctcccaagaaggtcgaggtgaaggttatcgccgacctgctgcaggtggtgaccaacgacacgaagatcacgaccgaagtggacttcgccgagtttgacgagaataccgaggtgattcagcaggtggacgtcgtcgaggagaccatcgaggacgaccagccgttcctgatcgccgagaccatgccctcgtttcagggcggcgacctcaacaccttccgcaactgggttcagcagaacgtcaagttcccgcagatcgcccttgagaacggtattcagggccgcgtggtgctttcgttcgtgatcgagaaggacggccgtctgaccaatattcaggtgctccagacccccgaccgttcgctttcggaagaggcgatccgcgtgctgaacaagtcgccgaagtggagtcccggaaaacagcgtaatcaggttgtacgtgtgaagtataccctgcccgttgatttccgcgtgcagaactaaccggatgaaagggcttcggcgtgaccggagtgctccgtgacaataaatagggtatcctgcttccggcggatacccttatttgtagcatagtgtttgctcccctccggggtgtgcggcgccggattccggagcgcggcgcatgtgtaacgttaaaatttgaaaaacgaattggaagaaaacagaaataagactccgaatgccgggacggcttccgacggccgggaacgtgccgtactggtcgccgtcgtgcgtgacgatcaggacccccgtcaggctgccgaattcctcgacgaactggagtttctggccgagacggccgatatcgagagcgtgaagcgcttcacgcagcggcttccgcagccttcgtcccgtatttacgtgggtcccggcaaactggaggagatcgccggctactgcaaggagcaggagatcgacgtggtgattttcgacgacgaactttcaccgtcgcagacgcgcaatatcgaaaaggcgatgccgtgccgtatcctcgaccgtacgcgcctgattctcgatattttcatgtcgcgggcgcagaccgcctatgccaagacgcaggtgcaactggccaattacgagtacatgctgccccggctttcgggtatgtggacccacctcgaacggcagcggggcggcacgggaacccgcggcggcgcgggcgaacgcgaaatcgagaccgaccgccgtatcatccgcaaccggatcgccaaactcaaggaggacctgcggaaaatcgaccgtcagatggcggtccagcgctccaaccgcggttcgatggtccgcgtggcgctggtgggctataccaacgtcggcaaatcgacgctgatgaacctgatttcgaaaagcgaggtttttgccgagaacaaactcttcgccacgctcgacaccacggtccgcaaggtggtcttcgacaacctgccgttcctgctttcggatacggtcgggttcatccgcaaactgccgaccgagctgatcgaatcgttcaaatcgacgctcgacgaggtgcgcgaagccgatctgctggtgcatgtggtcgatatttcgcatccgcagttcgaagagcagatcgacgtggtgaagcagacgcttcaggacatcggcgccggcgacaagcccgtctatctggtcttcaacaaggtcgatgcctacacttatgtcaagaaagacgaggacgacctcacgcccgccacgcgtgagaatctttcgctcgacgacctgaagaagagctggatcgcgcgtgccaatacgccctgcatcttcctttcggcccggatgaagaccaatatcgagaagttccgcacggatctctacggcatggtgcgcgagatccatgccggacgctacccgttcaacaatttcctctattgaccaccaaacctcatacccatatgaccttgcatactctgaacagtcagaacaccgttctcaacaaattcatcgcgcagatccgcgacaagtcgattcagaccgactcgatgcgtttccgccgcaatctggagcgtatcggcgaaatcacggcgtacgagatttcgaaagagctgtcctatacgccccgcgtggtcgagactccgttgggcgaagcgaccgtcgagacgatcgacgaccggatcgtcgtggcgacgattctgcgggccggtcttccctaccatcagggttttctgaattacttcgacgatgcggagaacgcgtttgtttcggcctaccgtaaaagtacgaaagacggtaagttcaccgttaaggtggagtatatctcgtgcggcgacctcgaagacaaggtcctgctgctggtcgatccgatgctggcgaccggctcctcgctcgtgctggcctacaatgcgttgtgcgaaaagggcggcacgcccaaatatacgcatgtcgcggccgtcatcgccagcgagcagggcatcgactacgtgagtaagaacatgccgcgtcaggccacgacgatctgggccgcggccgtcgatgaggagctgacttcacgttcgtacatcgttccgggcatcggcgatgccggcgatctggcctacggcgagaagatttagggagtgcccggcatacgctcttcgagccgggtgtttttggacgggtgattcgcagacagaatgcctgtccgctctgaacgacttttcggccggataatccggaaggggtgattcctgcggccgaacgacttcccgaaccggacttttcgggcggatgattttccggatgaacggctcccggtctggacgattccggcggatggttgctcccggcaggacggatttccggaccggatttttcgagcggaggacttttccgcaggacgatttcccggatcgaacggttccggaccggatttcccggcggcggaatctccttaggaagggggattgcggttgcagtatgcgccgcggcgtcctgcccggctgcggagcggtatcgcgcccggcgtattgtgcattattttgctcgtatggtaaagaagaaactggcttttgttttcggggtgttctgcgcgaccgtcctgctgatggcggtgcagaaacccgtttttctggcctattatgccgcggatgcggcgcaggcttccgcgggggagtggctcggcgtggtgtggcacggcctgacgctcgacagcaccgtcgcgggatatgttgccgccctgccgctgctgctgacgctcgcgtcgctctgggtgcggcttcccgaacggatatggcggcgcgtgctgaacgtttacttcgtgctgatcgccgtcctgacggccgcgatcttcgccgtggacgtcgaactgtaccggcattggggattccggctcgattcgacggtcctgatctaccttgccgatccgaaggaggccatggcgagcgtcgatttctggctcggcgtgcggcagacgcttctggccgtcgcctatgccgcgctgatgatctggacctaccgccgcgtggtggggcttttcgacggcgaacccctgcgccggcgcgccgcactgccgtggagcttcggcctgctgctgcttgcgggctgcgattttctggcgatccgcggcggtacgggggcatcggtcgccaatgtttcgaaagtctatttcagctcgaacatgttcctgaaccatgcggcgacgaatcccgtcttttcgtttctgacaacgctcggcgaccataccgactatgcttcggaataccccttctttgacgaagagacgcgcgcggcgaaattcgacgccctgcgcggcaacggccctgcgtccggaccttcggaacgcgtgctcacgaagacccgtcccaatgttgtggtggttattctggagagtttcgcccgcacggtcatggatgccgacgtcgacggccaacccgtcatgcccaatatgcggcggttgcgggacgaaggcgtctggttcgagaactttttcgccaattcgttccgcaccgaccgcggcgaagtggcggtgctgagcggatttccggctcagacgcgcatgtcgatcatgaagcttccggccaagagccgcagcctgccgtcgctggcccggtcgctggcccgtgagggctacgccacgagtttcgtctacggcggcgatctcaatttcaccaatcaggcctcctacatgtatgccacgggctggcagcagctcgtctggcagagggacctgcggttcgatacgccgccctccgactgggggtatgacgatgcggtgatgtgcgactggttcgccgaccgcgtgatcgcgcagagcgggacgggtgagccgtttctggcgggactgctgactctgagcagccaccggccgttcgacgtgccgttcagcaggttcgatgacagggagctgaacgccttcgccttcgccgacgactgcgtcggccgcatggtcgacaaactcaaggcttcgtccgcatgggacgacctgctcgtcgtgctggtcgccgaccacggctacccgtggccgcgcagtctgtcctacaacgagccgctgcgccaccgcatcccgatgatctggacgggcggcgccgtcgccgggccgcgcgtggtcgaggagtacgcttcgcagatcgacatctgcgccacgatcctcggtcagctggaggtcgcgcacaacgatttcgactacagcaaggatattttcggcccgacccccccccgcaagttcgcgtactacaccttcaacgacggcttcggcgtggtcgatgcttcgggcgaagccgtctgggacgccacgagcgggaaagcggtttcagagacctctcccgccctgatggacgtgggccgtacgatgctgcaaaccacctataccgacatcggaaaccgctgacggccggtaaaatacctgaaattaggtattgcgggacctgacatgaatcgctaattttgcagatattgagaatcttatgtatagaattggacgatacgatgccgacgaccgcatgtgcgatctggtctgcgaccgctaccccgtactgcttgtcatgagccgtttcggcattgcgctgggcttcggcgacaagacgatcggcgaagtctgccgcgacagcggggtcgacaccgggacgttcctgaccgtggtcaatacgcatatcgacggagaagctcccgatcccggcgctgtttcggtcggagcgctggtgggctatctgcgcaattcccacgactatttcctcgatttccggctgccgggcattcgccgcaagctgatcgaggccatcgattgcagccgaaacgacgtggccttcgccatcctgcgcttcttcgacgagtatgtcgccgaggtgcacaagcatatggattacgaggagcgcaaggttttcccctatgtcgaagccctgcttgccggagagcgtcccgaagggtattcgatcgacgttttccgccgccatcacgatcaggtcgaggccaagcttgccgaactgaagcgcatcatcatccgttattatccttcgggaagcaccaacgagctgaacggcgtgctttttgacatcttcacctgcgaacgcgatctggcttcgcacaacgacatcgaagaccgtctgttcattccggccatcaaacggctggaggaggccggggagacttcggccgacgtccggtccggggacggggcgcggaaacggtcgtccggtgcgaaaggaggcgtccgatgaaggcgttgaaactcgccgtggccgagccttcggctattctgcgttacggcattgtcgccctgctgcgccggatgcctgcggcgaacgtcgatattctcgaaatcggggatatctcgcagcttgccgcgcagctttcgcgccacaggcccgacgtgctgatcgtcaatcccgcgtcgctgggactctgtacgccgccgcagctgcggacgcagaccggatgcgaggggatgcggtgcgtcgccctgcagctggcgatgaccgatgccgtgacgctcggcgcctacgacgaggttctttcgatctacgattcggaggactgcgtgcgccgcaaaatcgtacagccggccgatgaagcgccccgcggggagcgtcaggagccgctgagcgtccgcgagcgcgaaatcgtcgtctgcatcgtcaagggcatgagcaacaagcagatcgccgatacgctctgcatttcgacccatacggtcatcacgcaccgccgcaatatcgtggccaaactgcagatccactccccggcgggcctgacgatctatgccattgtcaacaagctggtcgatctctcggaaatccgggatacgatcaccgaaatataaacgatcatgggacacgaccaccatcacgaccatacggtctcgtcgctcaacaaggcttttatcctcggcatcacgctcaacgtggcgttcgtcgtcgtcgaattcgccgtcggactctattacgggtcgatgggactgctgtccgacgccgggcacaacctttcggatgtggcgagcctgctgctggcgatgctcgctttccgtctcgcgcaggcgcatgccacgccgcgctatacctatggctacaagaagagtacggtgcttatctcgctgctcaattcggtgatcctgctgatcgccgtgggggtgatcgtcgccgagagtatcggccggatgatgcacccggcgcccatcgagggcggtgcgatcgcatggacggcgggcgtcggcgtggcgataaacggattcacggcgtggctcttcatgaaggataaggataaagacctgaacgtcaagggtgcgtatctccatatggccgccgatgcgctggtatcggtcggagtgctggtgtcgggactcgtgatctcgtggacgggctggacggtcgtggacccgatcgtggggctggtcgttgccgcggtgatcgtggcttcggtctggtcgcttacgcgcgccagcctgcggctttcgctcgacggcgtgcccgacggaatccgggtggacgaactcgaacggatgatgactgctgtgccgggcgtcgaagccgtgcatcatatccatgtctgggccatcagcacgaccgaaaacgcccttacggcgcatgtcgtgctcacggacctgccccggctggaagcggtgaaacgggagcttaaaacccggctcgacggggccggcgtgcaccatgcgacgctcgaattcgaatcggtcgccgagaactgctgcgatttcagcgactgacggattcgcagacggctctgcctttcaaatcacccggcttcgcattctcaaaataaaatccggcccgaaaagggtcggattttccgtacgggcttcgacgtgccggagcgtcatccgccgaaaggttatgcttcagagtgcagggccatttcagggtgccggcccatttcagagtaacggtccgcttctggttgccggatcatttttgggcaccggaccatttcagggcaccggatcgtatccgctgccgccccacgggtgacagcgcgacagccgtcgcagggtgagccacgagcctttcagcagaccgtgtttgcgcagggcttccagcgcgtactgcgagcaggtcggcgtaaaccggcacgacgggggcgtgaaaggcgagatgcagagctggtagaacttcaccagtgcgatcagcggcagggcgcagatacgcttaaagatgctccgcgaccgtttccagaattcgccggactgcatttgagatcgttttataggacagctcctccttcgaagagtagatcagcgccagatcgagattgaccggccggccgttgtgcagcagcagcttttgcagccggtaggcctctttggtgcggcggcgcagcaggttgcgtttattggcccttttatggaacttcttgggtacggagaacaacacctcggccgaaggtatttcgtcggcttcggcgaaccatacgtaccggaacgggaagataaagccgctctcgccgctctcgaacatccgacgtacggcgccgagcgagcggagccgttccgtacgggggagcgagcagtcgggcataagcgtattatttgcggggttcggcaggacggcgtgcgcggcttttcttggccagcttgtgctgttggctgcggatgaactcctctttctgcgtgtcggtaatcagctcgacgggggctatctcctcgcctttctgcactttgttgaggtagatgtcgatcgccttgaccatcgacggggcttcgggcgtgggggcgttggccagtacggtgattccggcgtcgagtgcggcgcgcagcgtgccttcgccgaagacagccacggcgggcaggttctccgtgccgaatttctcgaccagcgtcttgacgtccgacggggagtagagcgccagcaggccgtaatcggtcagcgcgatgtcgtccatgtccgcagcgaccgtacgggccagaatagccggatcgaacgacattttgagcttggcgagcgtttcgggaagctcaggtttgtgaggttcgctcagcgccagcaggaacttctcgtccttatgcttgatgatcagctcgatgaacgaggtgaacgagccgtcggcaaacgaaatcttgcgtttgcggtagacgatgtatttttgcagatagagcgcgacggcttccgtctggcaaatgtatttcatggtttcgggcaccgtgatgcgggcctcttcgcaaatgtggaagaaactgtctaccgtcgtgcgcgaagtgaaaattacggccgtgtgcgtcagtatttcgacccgttgtgcgcggaactctttcagcgaaacgcctactacgcggataaacggtttataggcgatctctactttgtatttctcggataattcgtagaacggggacttctcgataattgcaggcctcggctgcgaaaccaatacttttttgactttcaattctaacctaatttatgttgttcttcaatcactgaatcatcttgccgcaagcagccctatgaggctgattgggaatatctccacggtgcaaaggtacaaaatccaatgcaaaatcgaaatttttttggaaagaaacagattcagtgtctctctgagatataagaagaccgttgcgagcaactcgatgacaatgatgcagaaccacacgtctcccgtgccccgcgggcacaatgcgaagagcagcagggcgggaaccgtgacgatgacgcccagcgtgaaataggtgcgtttgagcagtatcagctgcgagacgaagggctgcgagagcgttacggctccggccagccggacgactccccgctggaaaagccccacgcacagacaggcaaacgtcgccagcaggctgagggccagtacggcgccctgcggaatcgtttcgatcaggctgtccggaatcagcgaatcgccgtacttgacggtcatgacgcccacgaagaggacgccgatggcggttgcggtgttcaggaagtgcgaaaaaccgctgccgcccggatcctccataaggcgtttgcccgtggcggtgtcgtgcgatacgcgcgtcagcagcagccgtatgtcgcccagattgcggtagagcaggatggcgtaggttgcggcgagcagcaggacgaagccctgaaagacggggttttcggtgagggacggagccggggctgccggcaggacgcgggccggaacgagggtcgatgccggaccgaataccgcttctgccggcgcgtcgcgccaaagcgtgtcggctgtgccccgcagcgggccttccagcgaaaagaacggcagcgagtcagccgcctgcggcccggaatacagcgtatccgccgccagcgagtccgcgccttgcgccggggcggggtcggtcggcagtgcggttcggggtgtgatgttccgggctgaatcgcccgtgccggacaggccgtgcgtcgtctcttgggccgtattgggggtattcgccgcggtttctgcggacggataggccgcagaacggtccgtgccgcggccatgtgccgatgccgatgtgtcggccggagcctgctgcgcagcgggagcggcggcttcgcgtacaaacgcggggccgggttcctgcatggcggggagcgggaccggcgcggtatgtgtcagcggagcggtcatccttcgaagatgcgtttgagcgtgatgcggatcgtggtgcctttgccgatttccgattcgatgacggcgattttaccctgatggtagtcctcgacgatgcggcgcgagagcgaaagtcccagaccccagccgcgggtcttggtggtgaatcccggttcgaagatgcgtttccagttgctcttgggaatgcctttgcccgtgtctttgacgtcgatcatcacgtttttctcgtccgacgagatatgcacgtcgatcgagccgtggccctgcagggcgtcgagcgagtttttcatcaggttttcgacgacccattcgaacagtgcggcgttgatgttggcctgcaccggagcgatggccagtccgttgtagtcgagcgtcacgttgcgcgggatgcgcttgcggaaatacatgaccgattcgcccacgatttcgttgatattggccggcgtgaggggcgtctcggagccgattttcgagaagcggtccacgatcttcatcaggtgtgtgaggtccttgttcatctcctcgacggctccctgatccacgtcctgcgaacgcaggtattcgatccatcccagaagcgacgaggtcggcgtgcccagctggtgggccgtctctttggccagaccgatccatacgcggttctgctcgtcgtgtttcgacgaccggaaggcgatgaatcccagcatgatgaaggccgtgatgaccagaatctgcacgtacgggaagtagtagagcgatttgagcagcgccgagcggccgtaaaagatgatgtggtaatggtcgttcgaccaccagaaccgcaccgtgcgcggcggattctcctccgtcagtttgtcgatcatcctgcgcagacggtcggggtggtcgatgatcttgtccggaatcaggtgcgaccggaacacttcgaggttctcgttggtgatgatgaacgggatgttgttgccgttggagacgatgtcctgaatgagcgggtcctccatcgagccgcccatcacgtcgcggttgacccgctccatggcgtgcgcccacaacgccacgtcgtgctgctccttctccttgagccgcttggccatgttgttggtgtagagcagcgagaccatgccgagggctatgcccacgatgataaccaccacgcggttgcggaacgagaatatgtcgcggcggatcttcatggctgtcgggttatttgcgcggcgtgtcctgctcggtgacgatgcgggtgtattccgcgccgtcgccgagtatctccgtggcgcgcagtacctccggatcgtctttgagcgagtgttcgatgaccccttcggagtacccgtggcgcatgacgatgtcgttgttgatcgtctcgacgatctccttgcggtaggtttccagattggtctgcgtgtcgtccttcagttcggcttcgacgcggtcgaacttctccttgaggtctgcgaaacggtcgtcctcggcggcctttttcagcgctttgagggcgcggcgggtgtccgattcgtagggcaccttcttgtctttcatgaattcggcgaaatcggcgtaatcccggtccgtgatcgagaagttgcggatgtcgatccgctgatccggatgacgccgcatgtagtcgtcgccgaaatcctcgacgaatcccagcgcatagagcgtcatcgcgaagcggctgatgtattcgggttcggtgcggatgtcgggcatgatgcccccgccgtcgtagaccttgcgcccggcgcgggtccggtactcggtgatgagcgagtcgggtatggcctttaccgaaccctcctgcgagtgggagtagtcgatggcctgaatgcagcggcccgaaggaatgtagtatttggccgtggtgagcttcagcatggcgttgtagcccagcggccgcggcgattgcacgagtcccttgccgtagctgcgctggccgatgaccaccgcacggtcgaggtcctgcaaggcgccggtcacgatctccgacgccgatgccgaattgccgttgatgagcaccgccagcggcaggtcggggaggatcggctccgacgaggtgcggtaaacctgccgcgaatcctccgtacggcctttggtgcttaccacctcggtgcctttgggaacgaacatgcccagaatcttgatcgcctcctgcatgatgccgccgccgttgctgcggtaatcgaggatcagacccttcagttctcccccggtgcgcagcttctcgacggctgcgcgcatgtcttcgtaacacccttcggtgaagtcgctgtgacggatgtaaccgatgccgtcggccacccatcccgtgtaaggcacgcccggaatggagatgcgctcgcgctgcagggtaacggtctctgtgctgccgtcgaggtgctcgacggtcaccttgaccttgctgcccggctctcccttgagccgggagctgacctgttcggtcgtgaagcctttggcatccttgccgtcgatggcgaggatcttgtcgccgatcttcagcccggcccggtcggcgggcgaacccttgtagggctgggctatcttcacccagtcgcccttttggcggatgagcgatcccacgccgccgtatttgcccgtggtgagcagttcgaagtcggacatctgctcttcggggatgaattcggtgtacggatcgaggtcgcggaccatgccttcggcggccccttccatgagtttgtcggggtccaccgggtctacatagttcagcgacagttcgcgcatcatattgaccgtaatctccatgttgcgccctagcccgaagtcgttgcgggcggcgaaggtcagcagggctgccgtcgaagcggcagcggcggccgtgagcagataacggtatccttttctaatcatgttttgtcatttgtatgtacgaatccagcttgtatccggctctggccacgccgcggcgtatgccgtcgagcaggatccactgtccgtactgtgaaacttttatctcgtcttctcccagcagcgtcagcttgcgcagcaggccgtcggcgcggaacgtcattacgccgtcctcgtcggtgcgaagcgaaaagcctgccgatttgaaggcgtttacgatctgttcgcggttctccccgacgtcgccctcgaccttacgctgtacgaagccgaatttggggtagaaggctgcgagcaggacgatcaccgcgggcagcatcatgccgcgcgtggtatggaacatcacgtagaaggtctcttcgagcgtcagcgtcgcgaagcccgacagccggttcagcgccatgatcgctgcacatagaacgcacaaggcgacgaaatattttaacgagcggatgaagtatttcataacagcagtttttgttggattcgtatcgttgcagcgcctttggccggtcgtggtcgccgccgttggcgtcgtttgtaattttgccgccctcccctcttgaggggccttgccgcaggcggctgttctgtcgtctattttccctttccgatcttcccgatgcggtcggcgacctcctgcatgagccatttgggcgtggaggtggcgccgcatatgccgaccgattccgcgccttcgaaccatgcggggtcgatctccgcggcttcctcgatgttgcaggtccgggggttggccgtgcggcacacttcgaagagcaccctgccgttcgacgatttgcgtccgcagacgaaaaccaccgcgtcgaaccgccgtgcgaactcctgcaggtgctgttcgcggctggaaacctgccggcagatcgtgtcgtcgatatgcacgtcggcgggattggccgcccggcggcgcatttcggcccccagcgtttcgaacagggcgatgctttgggttgtctgcgagaggaagtacaccgggcgcgcgaagtcgatctgactgaggtccgcctccccttcgaccacgatcgtttggtcggggacctgccccgtgagtccgaccacttcggcgtggccccgttttccgaggatcacgacctgccctccggccgggcgcatccgttcgtgggccttgacgacgcgggcctgcagacaggcgactaccggacaggtggcgtcgatcacttcgatgcccagttccgcggcccgtgcgtaggtcgtcggcggctctccgtgcgccctgatgaagagccggcggcccgtcaggcggggcatgtcggcatgggtcacggtgctcagtcccagcttttcgagccgttgcacttcgatccggttgtggacgatgtcgcccagcgaatagaccgtttctccccctgcgagggccttctcggcctccgaaatggcccggaccacgccgaagcagaagcccgatttgtcgtcgatttctattcgcaaatccttcatcgtgccgttcgcccggctcgtttatttgtttatacgttccaattccgtcataaaccacgccatctgctgctcgaccgtcatgcagctgttgtccagcacgacagcgtcgtcggcctgccgcaggggcgatatggcacggctcatgtcggccttgtcgcgctcgcggacattgcgctcgatctcctccagcgatacgtcgtcgcccttggcgcgcagttcgtcgtaacggcggcaggcccgcaccttggggtcggccgtcatgaaaatcttcagttcggcgtcggggaataccaccgtgccgatgtcgcggccgtccatcaccacgccgcggcggcgtcccatctcctgctgcatggccaccagcttgcggcgcacggccggaatggcgctcacttggctcacgcagttgctgacctcgatcgtccggattttgccctccgccagatcgccgttcacgtagatgtcgctggcgccgcgttcgggattgaaccggaacgtgatcgtaatttggtcgagcagcccgacgaccgcgtcttcatcgacgatgcccgaacggatcgctccgtgttcgagcgcatagagcgtcacggcgcgatacatggcgcccgtgtcgatgaaaatgtagcccagacgccgggcgatggctttggcgaacgtgctctttccgcacgacgagaatccgtctacggcgattatgattttgtgtttagtatccgacattgggaaatatatcaaggaatgttgaaagtatcgtgtaaatacccagtatgccgatgataaggcccgcgacgtggttgatcgtcagcatgtggcgggggcggaaacggcggcggaagaggttgatgacgaaagccagcatcgtccaccatgccgcggcgccgccgaagaatcccgcgatggtgaacgccgcgcggatgaatcctcccactccctcgtgcgagatgtcgccgcccgaaatcttgaagacggcgaaaaaggcgaggatataggggatgaccatgatgaagttggcgatcgtaagcccgaagatcgaggcgaaatcctgccacagcgaggttttgcccgcgcggttgcggcggatctgggggacagggttctgggcgaagatgtagacgccgacgatcaccacgaagatgccgccgatcacgcgcagcagcgtgttgtactgctcgatttgggtctggagcatcgaatagaagaacagcgccgccatggccatgaaagtgtcggcgcaggcgacgcccaaacccgatacgatccccgaacggcggcttttcgacagcgtgcgctggatgcagagcacggctacggggccgacggtgatcgatgcggcgacacccacgcagatgccgcggaacataacgtccagaaattcaaatcccattttcgcttgttgcggagttttcagtgagcaaagatactaaaaacctcggacatccgccaaagggaggcaaaaaaagggcgcgccgggttgtctgaaatggccgatatgttgataaaatatcgaaaactttggccgcatagttgtatatcggtacttgttagtcagtatttttgcataaacaacaatcgggcctatggcagaaatgaaacaattcgggatcgacctcgaactcgacgatacgatcgctcagggcaactattcgaatctggcgatcatctcccactccacctcggagttcatcatcgacttcgccgcggtgctgcccggcgtgcagaaggcgcgtgtcaaaagccgcatcatccttacgcctgaacatgccaaacggctgttgcgttcgctgcaggagaacatcgtccgctacgagagcaacgtgggcaagatcgagattccgaccccttcgccggcttccgagacgggaccgaaaatgggcgaggcttaaaagataaatgagggcgctgacatgcagcgccctttgtttttgtccgaaggcgtgtctcggtccggccggcgtgcaatccggttgtccgtgcggttcggatagccgtgcggtccggggcggttcgggacggatggtggtgcggaaagcgcttcggtccggtaaaaaccgtccgggcgtatccggcaagtcggttgtttggcggaccgggctgtttcgcgggattcgcgttgcccggcctctatccgggacggtttctgccggccgtcgttgccgggattatctgtatcccggcttgcgccgtccggtgccttcgcagcccgtcaggtcgtcgcccagctccgcacggtaccgttcggcgaccgcttccagtttttcagcgatttcggggtgctgcgacagcacgttgcagcgttcgcccggatcgcgccgcatgtcgtacagttccttttcctcgacacggcgtgggatcatctcgccgggcatgccgtcgtcgccgggcgtcccgtaggcgaggtagtcgtgcgggaaaatcaatttataggtgccgtcggtcacggcttcgagactgttgtcctgataatagagacagagcgcgtcgcggaccggcgccgcgtcggggtcttcgagcagcggcaacatgctcacgccgtcgatcttgtgtgcgggcagcggcgcttgggcgatctgggcgaaggtcggcagcaggtcgatgttcgaggccagccgttcgcagaccgtacccgcgggtatcgtccctttccagcgggcgataagcggcacgcggagtcctccgttgaaggtcgtggccttggcttcgcgcaggcctccggtcgatccggcatggttgccgtaggcgatccacggaccgttgtccgaggtgaagatcaccagcgtattgcgctccagccccagctcttcgagcgtccggagcacctcgccgacgctccagtccagttccatcatcacgtcgccgtaaagcccctgttcgcttttgcccttgaatttgtccgagacggccagcggcacgtgcggcatcgagtgggccagatagaggaagaaggggcgctccctgttctcgcggatgaacttcacgctccgctcggtgtagtccgtggtgagcgtggtctggtcgaggttgtagcccagtattcggttgccttcgtaggtcggcaggtcggggaatttccacttgggatggtagggccacatgtcgttcgagtagggcagtccgtaccactcgtcgaacccgtgctgcagaggcaggaatttctcggcgtcgccgaggtgccattttccgaagatcgccgtggcgtagtcgcgtttcttgagcacttcggcgatggtctcctcctcgtcgctgatgccgtatggacagcccggattgggcgcgtgggcgaagccgatgcggttgggatagcaccccgtgagcagtcctgcgcgggatgcgccgctgatgggctgcgcggcgtagaagttggtgtaccgcatcccttcgagggccagccggtcgatgttcggggttttgtagcccaaggctccggagaaggagaagtctccgtttccggcgtcgtcgaggttgatgaggatgaaattgacgtgatcgggtcgtttcggctccgtgtcgcacgaaacgatccctgcggcggccgcggccgccggcagaatgggtaggtatttcatgttcggttttgttttttaatcctgacggttagtgttttgcgctttcgggggcgtaatgggtctccatgatctcccgcatgcgcgccgacccttcgtcggtgtccttgtattgtcggcgcagttcgagcatctcgcgtttcatcgctccgatcacctccgcataggccgggttgccgtattggttccggttctcgtgcggatcggtttcgaggtcgtagaattcccacgagggcgtcgagacgcagtcgtccgagccggtcatgccgagccggtcgccgtagaagaagatcagcttgtaacggtcgttgcggatgcccatgtgcgccgggcgtatctcgtgctgggtccagtaacggtaatacatgctgcggggccattcctgcggagtgtcgcccgcgaggttgctccggaaactgcgcccctgagcctgctgcggcggttcggcgccggcataatcggccagcagcgaagcgaaatcgacgttggtgacgatatccccgttgcgggtcccggccggaatctccttcgggtagcggatcacgaagggcatgcgcagcggttcctcgtacatgatccgcttgtcgaagaatccgtgctctccgaggaagtaaccctgatccgagacgtagattacgaccgtattctccgccagtccctcttcatcgagcgtgcggagcagacggccgatgttgtcgtcgatcgccgcggcgcagcgcaggtagtcgcgtacgagtttctggtagatggcccggcggttggcgaccgaatcgccttcgacgccgcagaaaggcagttcggggtagtaggtccaccagttctccggatcagtgtaggccttgttccagcgccatgccatcgtttcgagcggctggcccgcgaacgtgcggcccgacttcgcggggccgaattcgagcaggttctccggttcggggaacttcacgccgtcgtaaaggtgcgcgaaccgctccgggaagtcgcacggttcgtgcgtggccttgaagtggcagaacaccgaaaagggcttcgtccggtcccgctctttgatccagcggatcgccttgtcggtcaccagatcggtcgagaatcccttttccaccgcgccgcctacgcccttgtcgtcgtccatccagttttcggccgtcttgaataccgggtcgcggtaggtgccctgatcgtggaaaacgctgtagtagtcgaatcccgccggctcctttttcagatgccatttgccgatcagcgccgtccggtagccggcctgctgcagccgtttggcgatgttgtcctgttcggggcgcagtgcgtcgtcgagcgtgtagacgccgttcaggtggctgtactgcccggtgaggatcgcggcccggctcggcaccgagatcgagttggtgcagaacgcgttgtccagcacgcacccttcggcggcaaggcgggcgatgttgtcgttggcggcgtacggcgccagaatgccgccgtaaatgccccagctctgcgaggtgtggtcgtccgagagaatgaagagaatattgggatgctcctgcggcgcttggtccgtgcatcctgcggtcacggggagaattccgacggcggccgcgcatattttgaatccgcgtgtatccataccgctaatatacgtaaatttcgtcgataaacagaaacggacgcagatttcggtcgaaataggcgtcgggaagctgcgccgagcgcatgacccgcagtttcacgtagcgggcctgaagggccggggagaagttcgcttcgtggcgtaaaatgcgttttacggcgccgtaaggaatttccgggtaactttcgctgtggacctcgcggaatgtttcgccgtcgtccgaaacccatatcttcgctcctgcggcgtccatgatgtgcgaaccgtagtccagcagggcgttgaacgccacttgcgcgatctcctcctgccgtccgaggtcgatcacggcctccatgtcgtcgtcctgccagcccgcccagttgccgtaggtgaagacccgtttgccccgcaggccgtcgttgagcgcggcggccgcgtatttggggtgcggagcggtcagcagccggatcggcttcatggtcgccttgttgaaggtcacctcttcgcggaagggttcgctgcgccgtccgtcgggcaggacggcgaccgcccggacctccgccggcgatccgatccacaccgtgtcggtgcagaggggcgactcttccgtcggctcgctgccgtccagcgtgtagcggatgtccgctccgggcagcgacgagagggtcatccccaccgccttgcggccgtaatccgcggtgaagtagccggttatgtcgtagaaatgggggaagtggctgtaaccgtcgcggtcgtagaacccgacgagccggtcgagccgcgtcatgaagtccgtgaaatccttctccccgtccgaccatgccctttccgcgagcgccgccagccggggcagcagcatgtgttccagaatcgtatcggtccgcatgtaggtcgtccacacgttggcctgcacgccgataatgtggcgggcctgctccggcgtcagctcttcgggaacgggttcggtgtcgtagacctttttcagcggaatatagccgccgatggtgggcggttcggtgtcgatgttcgccgactggtaatagtcgaaataaagcgacgagttgggcgacatgatgacgtcgaaaccctcgtcggcggcccggatgccgcccgccgttccgcgccacgacatgaccgtggcgtcgggcgacatgccgccgtccacgatttcgtcccagccgatcagccgccgcccgtggcgggagagaaatttctcgatccgggtgttgaagtagccctgaagtttgtcttcggcgctgtggcgggtgtcggctttcagccccgccctgcggatcagcgactggcattcggggcactcccgccaccgtgtgcgcggcgattcgtcgcccccgatgtggatgtacttcgaggggaagagtccgatcacctcttcgaggaccttttccacgaaatcgaagactgcgggattgcccgcgcagaggatgtcgcggcgcacgcccggctgcggggtgatgacgtacggcccgcccgtgcatccgagttcggggtaggaggcgagcgccgccgtcatgtggcccggcatgtcgatctccggaacgacctcgatataccggcgtgcggcatactcgacgatgtcgcggatctgccgtttggtgtagtagccgccgaaggtgcccggctcgcccgcgagcgtcgtgtcgcggcggaaagccccggtttccgtcaggcggggataggcgtcgatctcgatccgccacccctgatcgtcggtcaggtgccagtggaagacgttgaggttgtgcagcgccgccagatcgatgatccgcttcacctcttcgacgggatagaacgtgcgccctacgtcgagcatcacgccccggtagcccagatacggttggtcggcgatacgggccgccgggaaaagcaccttggccgcttttgcggcgcccatcgccttgcggagcgtctggatgccgtagaacacgccggcgtcggactccccgctgacggtgatgcggttttcggaaacctctatttcgtacgcttcgccgcctttgcccggcgcgtcggcccgcaggatgactgccctgccgtcgtcgcaaaggccgtccggaccggtgatttcgggggccgagccgacgaccgattcgacatatccggcgagaaactccgcattggcgcgcatgccgtcgttgtcgccggtgcatatgatccgggtgcgggcgtccagttcgaaatcgccgccgtcgccgggcgcgatttcgccggggcacggcacgattcggtaatcggcggtcgttttgccgctctcgccgcaggccgtgagcgcgatgcaggccagcagcaggtggaatgaaaatttcatgtcacggtttttcaggaaagtggtcattagaaaccgcctccccgtaaattcagttttacggggaggctcgtttcgttcggacggttattgggcgagaacgccgtcccatgtatatcccacctcgatgcgtttgtccggggtgaagatgtagggggtgtttgcggacgcccggtggatgagggcgtcgggctgtttgcccgtggcgtctttgaagaggtaggtctccgtttccgtcatcggagtgtcctcttcgatacatttcacgctggagcccggaaccatcgccttgccttcggtgtactcgttgagtttccagtagcccagcagacccggcgtgtcggccggaaccgcatagcggttgttgttcagctcctcgacgctgcgcgctacggaccagaaccggacctgacagtaacggtaacgcaggcttccgaggttgccggaagcggattcgttaccgaagcggatgccgttcagggcgtagaactgcgtcgcggcatagcccgatttggccgtgtagccgatgttgccgttcacgtagagcgtgatgtcaccttcgtcgcacacgatggcgatatggtgccagatgttcgactggagcgggatggaggagatctgtttgccggagcggctgaccatgccgttgatcaggctgttcttcgtgccgccgccgctgtcgcccagacggagcatgaagccgtcctgaatgatcttcgtgccgccctgctcgtagtatccgatggccgacgcgagccatgtcgtcgtgttgccggtgtagatctgactggggttgaacaacgtttcgaaggtccacgacgagagtttgtaatcttcggcgaagcgtgtttgcagatagctgttgcccgtgatctcgactacgttcgaatagggaaccggcgttgcggccaagacgaatgcgtcggcgccttcgagcacctgcatggcatccccttcggcctttacggcgatgggcagcgcatggacgaatcccgtcttgttctgctccgtggtgagcggatgcagggtgattgtcaccggattggagacgaccttgcctgcggggatcaccgcgctgctttcgaattcgtagttggtgttcggaagcagtgtgtaggaggtgttgttctgtttgttgtactcgtcgagggccttctcgtccacgtatacggtgagtttcagatccctgcccagcggtttcgagatgcggggcgtgaccgtgtagacgctgccgtcgtcgggaatgacgaacgagaccgatttggccgttccgaccgcttcgttcaggaagagtctgccggggcccgttacgtcgtcgtatttgagttcggcgttgtcgcaggacacgagtcccgtcacgatcgctgcgacggccgataaataaaatgccttgattttcattgcagtggttttattcggttattcgttcggaacctcttcttcgttctcggaccgatgtacggcgttgatggcctgccgggtccacggatagaagcccgatttgccggacagataatattcgtattcgatgtggtaggagccgaatccgcccttgcggtaggtcttgccctcccatgtgggtttccagagagcctgccccagaagccggttgatgccgcccgtgtaggagccgccgccctcggcggcgtattgttcgaagttgaccgtggtgtagagcttgcggatcagctcttccggctccatgtatcccgaaccgttccggatcaccgtgctgatgtaggtgttgagtcccgaatcggaggaggtgctgtacgcctgccagatgaagtagtcgaaatagggcatgcagcggccttcgacggcgttgatctctccgtcgatgaccagcagtttgtccgtgcccgatttcggtccgaggtatttgcccagctcgtccacgaagatgtagaagttgtcgcggttggatagctcgcgtttgcagccggctccgccgacgttcggctcgtagtccaagtcgatgccgctgtagccgcccgtataaacgctgtcggcgagcatgcgggcgtatttgcggatggaggcttcctgagcggcccgttcgtcggtgccgtcggcggcccgccagcccgacggagtgtcccattcgggcttccagccgaaatactcctctttctgggggttgttctggtaatcgcctccgatcacgtcgactcccacccagccggttatggtggtgcacaccaccttggtgccctttacccgctggacatactccatgtcggccttcatggcgtcggtcaggacgctgggacgccaccggccccagatagccgccagatagaggctgtcgggaaggccccggagcgagttcttgaggttggtggcgttagcgccccagccgccgaaccatccccatgccatgtcgtaatcggtctccgccttccatttgcgcagggcggcgtaataggcgtcgtcgtgcccgtcgcccttgaggaacaccttgctttcgggttccgtccactcctcgcaggagaccagagcggacgcgaacagcagcagggacagacacatcaataatatctttttcatacttgtcgtttttttcgggttacattgaaaaattgccggtcggcagaagcgttctaccaagcgggtttgtccgtttttacatcccaccacagccgggttccgaacttgtcgccgccggcgcccagcagggccaccgccgcatcgtagttgtcggcgttgcgcgtctgttcgttcggggcgaaggggattcgcgaagcgccttcggtcggcaggttaggctcgttcgaggcgttggtgctggtgggcgtggggtagaatcgcggatatcccgtgcggcgctgctcggcccacgcctccgttccgagcggatagagggcgatccatttctgggtgatgatcttctcgcgctgcttttccgccgaaagggcgccgtcccatgcgacggtgacgctgtaggccgtgcccggcgtatagttgttggccctgcgcggatcggaataggcggtcggcgcggccgtgccggtgatgtaggacgtgtagttttcggcctgatactgctcgaacgaaaggcggatgccctcttcgtagagcgtcttggcgtcgcccgtcacgtcccatccgttgacggccatttcggccttcaggaaggccacttcggcggcgttcatccacatgagccggtcgagggcgttggttttcggaagcgaatagtagtccttccactggctggaggagtaggcgcctacgcgcgagccgtggtactcgctgtcccggaccgcagggttgaaatatttggagaggcgcgggtcgtcgaagctcttcatgtaggtgacgatctcggccgccgcatgcacgtcgctgtaatcctcgaccaaccagcggagcggattctggtcgttggtctgggagacgtcgagcgaggcgttgtccgcgttcgattcgatcacgccgtaggggtgcgcgacggcctcttcggcatagcgttcggcatcgggcgacacgttcgagatgcgcatggccagacggagcttgagcgaattggcgaaccggatccatttagcgaggttgccgttgtagacgtaatccgccgacgcggcttctgcgaccacgtccgttccggcgagggtgatgtaggtctccagcacgttcaccgcatggtcgaggtcttcgagcatgaagccgtagacggcctcctgcgactggtagggagcggtcaggtcgtcgttgttctccatcgtgcggtaggggatgggtccctgaatgtcggtgacgcgctgcatggccgccacgcggatgatctgggcgagcgccatgcggtagtcatcttccggctcttcgagttcggccttgatggcccgccagttgctgtatatgttggtcatgggcacctcgtagggaggattggcccagtcgttggcgattcggtaaaaggcgaacatgccggtattccatcccgcatcggtcgatttggcgtaggcgaagtagcggccgtaggcgcctcccgacacgttttccacgatctgatattggttcttgacggtgggaatcacgttgtactgcatgcttttgatgtagtcccagacgtcgcggtctatcgtgctcggctggtcggggttccggttgtaggcttcgaaattgcccgtgcaggacaatgccgccaaggcgacggcgccgaacaacagtctgtttatgatgttcatgtattttctcataacggtcttaaggcttggttagaacttaagttggacattgaaaccgaggcttcgcaggctcggctgcatgaagtagtcgataccttggaggtaggaaccggtggaggccgtgagttcggggtcgaacggggccttgcagtagatcatccaaaggttgcgccctacgagcgaagtggttagtttgacccgctcgcccatccatttcttcgggaaggtatatccgatgctcatctcctgaaggcggacgttcgtcgcgctgtacgtatagtgggagaggagctgtcccagaccgacggtctcgtagtagtgctgcgcgtcgatcctgccgttgttgatgggcacgccgccggcgtcgcgcgcatcggcgctcgccttcgagactccgagtccgtcgaggaacccttgggtgggcgataccacgatgccgccgaagcgtgcggagaagagcagcgagaggttgatgcccttgtaggagaaatcgttgcggaaaccggcattgtaatcgggcagtaccgagccgagtttgatgcgctcgtctgtgaccatcagcttcgggtcgttggggttgatgtagatgtagccgttctcgtcgagccgcaggtctccgtaggcgtacaggtcgcccatggtgccgccttcggtcatgatgaagttggcgccgcccatgctggccacttcatactccttgagcgtgtagtatttgtccgtctgcgggtcgtagtagttgttcatcagctcgacgaccttgttcttgttgtggctgagcgtgaggctggagctccacgagaagtccctccatgtcttgtcgtatccgatcgaaagctcgaaacccttgttttcgacgttgcccgtctgcgcgtacatgttttcgtagccggccgaaccagacaggggcacgaggaaggtctggtgtttggtgttggacttgtagtaggtgaagtccagcgagagcgaattggcgaacagccgggcgttcagacccacctcccacgaggtcgtgttttccgggcggaggttctggatcggtctggtggcgctcgtggaccacgaaccctgcttccatttgtaggtcaggtaggagatgccccaaggaatcgggctgcccacttcggcccacgaagcccgtactttgagatagtcgatgaacgaggggagtttgaccatttcgtggatcagtcccgaaaggccgaccgaggggaagcagtacgacaggttgttcgtgtaggccagattggaatgccattcgttgcggaccgtggccgtgaggtagagcatgcccctccatccggcctccacgctggcgaatacggcctgctcctgctcgcgtttgcgttcctgaagccgttggcccgatgcgccgtaggggttggtgttggtcagcgagaagaagttgggcagttcgagcggaccgcgcgctccggcgatgctggagagctggtcggagatgctggcgccgacattggcgaagagcgagaactgctcccagtgcttgtttacggtggcgatgaagtcaccgtagcggtgggtgtcctcctctttggtgaattcgaagaatccgttgtcgccgccggcgaacagcgggtcggtcgatgcgtagagcttgcgcgacgattcgccgacgctcaggtcggctttggcgcggccggcgagggtgagccagtcggtcaccttgtaggtgaggctcgcgttcatcatggagcgccgccgcttgttgttctggacgttgcggtgcatcatccacaaggggttctgcatgtcgagcgcgccgcggccccacgcccagttctgcacgtagcgttttttgttcgaatcatagatctcgaacatcatcagatcctcgacgctttcgccgcgcgggtaggtgtagagcgaggtcagcgggttgaaatagcgtcctgccgagagcatgttctggtcttcggtctccacgtagctgaagcctgcgtccagcgtcatccgatcctgcaggaacgaggtcgtgttgcgaaccgtgacggagtatttgtcgtatgagttgttgggcaggatgccgttggcatagacgtgcatcagcgaggcgtaggtctgattcttctcgttacccacggagatgctggcgttggtctgcgtgttggctgccgtgttgaagaaatcttgcgggttataggacgaaggggtcgccagtacccccccccagctggagtaggttctcggctggttgccgtatttggtctggaactcaggcattttgagcggcgaggagaaggtcgtctggttggagaacgaaatctggggccggccggcctttcccttcttggtggtgatcacgatcacgccgtttgcggcgctcgatccgtaaagcgccgccgccgaggggccggtgagcacggtcatggattcgatgtcgtccgggttgaggtccgtgagaccctcgccgcggggctgcgactcgaactcgctctttatctcgccgttgttattgttgaagaggggaatgccgtccaccacatagagggcgttgttgctgctgctgatggatttcagaccgcgaagcaccacgcgggtggcgccgccgatgcccgatgccgacgaattgatgaccgcgcctgcgattttaccgttcagcgaattcatcagattgacgtccttcacgatgctgatatcctccgaactcacctgctgggcgttgtagctgagcgccttttccgagcgcttgatgccgagggcagttacgaccacggcgtctacggcctgcgactcttcatgcagcgtgaaatcgatctgcgtgcgattccccacggtgacctctacggggcggaagcccagataattgacgaccagcacggcgttcccggccgagggggatatctgcagcgagtagtctccgccggctccggtgctcgtgccgacggtcgttcccttgacgatgacggccgctccgacgacggggttgccttgtgcgtcgagaaccttgccggaaaccgatctgggttgtgcgctcacctctttgcggaccgccgagagcacgacattcgaagcgtcgatgcggtaggccacgtcggttcctttgaccatctgcgtcagtgcggtctcgacggaggcgtccgtgcaggagacgctgactttctgggaaatgttcacgttcgcgtcgatggcgaagagataactggattgtttttcgatggcgtcgatcacccgttccatcgggacgtccgccatcgtgatcgtgatccggggcggtgccggctgggcaaaagccgcgacggatgacaaagatagggatacagcaaatagcagcgaatataaactcctgatttgcagaatcaattttttgttcatacttttgtataaattctagggtttaagtaggttttacgcctgaagaatgtacctatggatgcgccaacattcataggttttcttttttatcaggacttgatacggaagaaaagggttctcggttactttctcataggcatcgggctgttgggttcgtacttcattcgttatctgatatagagcgtattggtcgtaatatcccgttcgtacctgaaatcggccgcgtgctgcagcaccgcgagggcgtggtctatcccttcgctgatgcggagcttgcatcgctggaactcgatctggggcaggtcgtcgcgcagaatttccacgttgatgtcgtagcagcgttcgaacttggccatgacctcttcgaacgtcattcccgttatgcagaggatgccgtccgtccaaagcagtttgtcggcgttctcctgtgcgtgcagctgcaactttccgttttccagatggaccgtctggttcggctccatcgtgatccggtcgctgcggtccgtccggttgcagacctgaaccctgccgcggagcaggtcggcggtgaaaattccctcctcttcgttcgcctctacgttgaatttggtgcccagcaccctcacgtcgcaggcgaaggtctcgacgacgaacggatgctgcgggtcgctcttgacgtcgaacatcgcctcgcccgtgaccttcacccggcgctctgcgcgcgcaaagaccgccggatactccagcgtcgtgcccgaattgagccatacggtcgtgccgtcggtgagcgtcatgctgatgcgttccccgttgggcacgaacacgctcagcgaattgttggaagccttgcggtcgaacatcttcgtagctgcgaaataactcactccaagacataagcacaggactgccgcgatgcgcatgctccatgcgccgatactgcgcagcgtcgggagcggccggcgctggggtttccggcctgcggggcggtttacgcgggctgcattgagcatattgtccagcccgtcgaaatatttccggttggccggatcggcgtcgagccagtccaataccgtcttgatctcgtcttccgacgcttcgttctgcaaaaacttgtacagtaataaatcgtccatcttctcttcttctctctgttagtagtaataacaaacaaatgcaccgtgttagtagtgaaacggtgcatttatttgtttaataatttattttattaaatcaagttgctgacagccagcagtatgatcagcacgaaaatatagtccttgaattcttcccggagtattttcaaagcccgccgcatctcgaaattgacgtgcgtgaaggcgatgttcaactcctgagcaagctctttgtagcttttgttctcgtagcggctgccttcgaaaatgcgccgtgtaagttccggcatccggccgacggcgcggtcgagcatcgtctgcatctcctccacgaacagcgtgtcgggaacgcaggctgccaatgactgaatgtcggactggatcagccgctgctgggtcgaatgcagctttttctcgatctgcaggtgcagcaaccgggccttcaggtggttcaggcacttgtttttgacgatggtcagtacgtaagccggggcgttcacatcttccggcagccggtcccgctcctcccagaacgccatgaaactgtccgacaccagatcctccgcaattccccggtcgcgcacgtaacggtaggcgacctcggtaaaccggggattgtagtcggaatacaatctcccgaactccgcggaggtaatgcaggttttggtcggtttctggtgcatcgggggtaattaatatgccaaaattaagacttttagtattatttgcaaaatcaaaatcccccaaatcgaaatcgctctgcctcaaatcgttgttgcggggccgcgaaatctgtttttccggccggaaagatttttgtcccgccgcgcggaaatcgaaaaaaacggaccggaaagatagggcgtatcttttcccggtccggattataatataagttgtctgcggatgcgtcgcgatttgtcagacggttttacaaggcttcggcgaccacataggtgctgccgccgatgaagatcatgtcgtcggcgccggccagctccttggcgcgggcgactgcggcgggaacttcggcgacggtctcgccgtgcagtccgtagatcgcggctttggcggtaagctcggcggcagagaaggcccgttcggtcttcgcctgcgtgaagatatagtgggcgtcgtgcggcagcagggggaggatatgggcgaggtccttgtcgcggacgaagccgatcacgcagtagagttgtttgtggggcgtggctttgagctgccgggcgacgtaggcgatgccgtgggggttgtggccggtgtcgcagaccgtaagcggctgttcgcccaacttctgccagcggcccatgagcgaggtgttggccgccgtgtcgcgcgcaccttcgaggaaggcgcggcgggagatggtcagcggcgtctcttcgtgcaggaaatcgaccgttgcggctgccgtgaccatgttgcggcgctggtagttgccccccagatcgagatcgacctcgaagttgcggttgtcgcgggtgcggtgcatgcagaagtgctggcggtcgtttccgcaggggcagggctcgcacgagaactcctgctcggcgtagatgaccttcgacttgttggcggccgcggcctgctcaatgacgtcgttgtagcgggggtcgctctcgccgatgactaccggaatgctctttttgatgatgccggccttctcggcggcgattttcggcagcgtgtcgcccagcagcgccgtgtggtccagccccacgttggtgatgacgctcaccagcggcacgatgatgttcgtggcgtcgagacgtcctccgagtcccgtttcgatcacggccacctcgacgtcgctctgcgcgaagtagtcgaaagccagcgcggcggtcatctcgaagaacgacagctccagctcgaccatcttgccgtggtgcttgtccacgaagttcaccactttctgtttgggaatcatctctccgtccacccggatgcgttcgcggaaatcctgcaggtggggcgaggtgaaaagccccgtgcggtagcccgcttgctggagcaccgatgcgatgatatgcgacacggaacctttgccgttggttcccgccacgtggatcgtgaaaaagttacgctggggattgcctatgtggcggcagaacgcggtgatacgctccaatcccggcttgtaggccgtcgcgcctttggcttcgaagaccggcagcgacgagaagaggaattcgagggtctgggtgtaattcatatcgggtttcgggttttattttacgaggtaatttttccttttgacccggtaggcgatgtagtaaagcacgcagagcagcgtcaggtactcggaaatgcggcccagatagtcgccgtatcgggtgtagaaggtgagttcggagttgaggggcacggcggcggagatcacgccccgctttttccagccgagggtctccccgatgtcgccgcgggccgatatgaagcccgacatgcccgtattggccgaacgggcgatggcgcggcggtgctcgatggcccgcagccgcgatatggtgaacaggtgcttgtaacccggcgtgtcgccccaccagccgtcgttcgagatgatggccatgaactgcgctccccggcgcacgaagtcgccgtagaagtcgccgtaaagtccttcgtaacagatggccggacccatgcgcatgccggcgtgcgcgaaggccgtgccgtgctggcccatgccgatctgtcccacgacgccgcccaagtcgatgaccagaaactgcatgaggtcgaagatgaccgtcggggtgttttccacgccgatcaccagcttgcctttgtggtgcagctgcgtgcggcctgcggagtcgagtcccacggccgtgttgaagtcgtcgtagtagccgtcgccgtaagggttgcccacggccgtgcggggctgcagtcccgccgcataatagcggttggtgaaggcgccggtgacgagcagtgcctgcggatggctgctgcggagcgtgtcggccagctcctgccagaacggtcccggctcgttgtcgaaccgggtctcggagagtcccggttcccagtaatgtctcggcacggccgtttcggggagcaggatgaactgcgctccggcggggacttccgtcagcaggtcgacgatgttgcgctcctgccactccgcgcggccgttgaatttgtcgtaacagtccacgttgggctggacgacgctcacttcggccgtcccttcggcgggctgctgccagctccaccagatgcccagcgatacggcggccgggacgagcagcatgccggccgccgcggcccagcgggccgcattgcgccgtgcgcggatcgcctcgaagaagaggatattgcagagcagcacccacagcgaaccgccgaagacgcccgtatattcgtaccactgcacgagccatgcctcgtgcgagaatccgttgcccagaatcagccacggccacgaaaactcgccgaccgtgtaccagtattccgtggcgatccaccctgcgacgagcagcgtgtaggccaaggccttgggtccttttttcgaaactgtgtgaaacaacatgaaggcgatcatgttgaagaacgtcgaagccagcgtcgccgcaacgggacccacgggagtcgcgttccatatccaccacaccgtcgcgacgttccacagcgcgaaggtcagcgccgcccagccgaacatgcgccgccacgaacggcgcgaagcgtcgtacgacgagctgatccatagcagcggaacgagtgcgaacggcagcgtgagacccgttgcgccgagccatcccggagagagcagaatgaccgataggattgccgccgtcagtttacgaaacatggtgtgtgatttttacgtgggcaaaagtagtcaaatggccgcatatttcaaaatatttcatatttttgcatgaacatctaaaaactactgataaatgaagaaatttgcctttttgtcgtgggcggtcgtcgctgcgctcttttttacggcctgcgagtcttcgccgaagggttacagcgtcgtggacggcgtgattgttttcgatgccccggcccgtgtcgagggccagcattcggtgctgcggctgacgaccgatccgatacccgtcgtgcgggtcggattcatcgggctgggcatgcgcggtccgggcgccgtggagcgtttcacctacctcgacggcgtcgagatcaaggcgctctgcgacctctatcccgaccgggtcgagaagtcgcaggagatccttgccggccggaatctccccgcagccgcggcctacagcggtgaagagggctggaaagagctttgccggcgcgacgacatcgacctcgtctatatctgcaccccgtggcagctgcatgtgccgatggcggtttacgccatggagcacggcaagcatgtggccgtggaggttcccgccgccatgtcgctcgaagagtgctggcagctggtcgataccgccgaaaagacccagcgccactgcatgatgctcgaaaactgcgtttacgactttttcgagctgacgacgctcaacatggcccagcacgggctgttcggcgagatcatccacaccgaaggttcgtacatccacgacctcgatccgttctgggagcattatcagggcaactggcgtctcgacttcaaccagtcgcaccgcggcgacgtttacgccacgcacggactcggtccggcctgccagctgctggacatccaccgcggcgacaggatgacccgtctggtgtcgatggacaccgagtcgatcaacggactcaaaaccgccaaggagaagatgggcgccgaaaccttcgccaacggcgatcagacgctgacgctcatcaagaccgagaagggccgtacgatccttttggaacacaacgtctatacgccccgtccctacagccgcatgtatcagcttaccggcaccgaaggattcgccaacaaatatccggttcagggctatgcgttccgtcccgaacagcttgcgggcgagcttcccgaccacgagaacctgagcggacattcgttcattcccgccgaggcccggaagacgcttatggagcgttacaagcacccgatcgtccgcgacatcgaggacaaggcccgtcaggtgggcggccacggaggcatggacttcatcatggactaccggctggtttactgcctgcagcacggtcttccgctcgatcaggacgtttacgacgcggccgaatggtcctgcatcggcgcgctgacggcggcttcgctcgaacataacaacgcgcccgtcgccgttccggatttcacccgcggcgactgggccaaaatcgacggctaccgccacgccatggcgcagtaacggctggcggctgaaattgaagaagcggtccggattttttccgggccgctttttcggttgtggcaatacctttgcagcggatcgggaaactttaaaaacgatttgttatgaatgctgtaaaggaagctcccgattacctgcacgacgaacacctgtctcagggaaccaagacctatctgaacgtgttgaacggcggcggacccgccgtcgagtcgctgcccgtgcccgacgcgcgacgcgtgctggccgatctgcaggcggccgtgccggtcgatctgtcgggcgtcgaagagtccgagcggaccatcgagagcgaggggcgcaccctgcgcctgaatcttgtgcggccggagggaaccggccgggaacggctgcctgttttcgtcttcgtccacggcggcggctgggtgctgggcgattatccgacccaccgcaggctggtgcgcgatctggtcgcggagtcgggttgcgcggcggttttcgtcaactatacgccttcgcccgaagcgcggtttccgcaggccgtcgaggagatttacattgccgtgaaatgggtggccgaaaacggccgtgagataggggtggacggcagccggctggctctggccggcaacagcgtcggcggcaacatgtcgctggcggcggctcttctggccaaggatcacggcggaccgcagatccgcacgctggtgctgatgtggccggtgaccgacgccggatatgattgggattcctatgcggagtatgggcgtcagcggtttctgaccgcacctctgatgaagtggatgttcgaacagtatgtctcggacccggcgcagcgcggcagcgacctgatgtcgcccgtgcgggcttcggccgaacgtctgcggggactgccgcctacgctgatcgccgtcgccgagaatgatatcctgcgcgatgagggcgaggagatgggacgcctgctggacgcggcgggcgtcgaggttacgaccgtgcgcttcaacggcgtgatacacgattggggcatgcttaacggatttgccggactgcatcctacgcgtacgctggtgcggctggcaggagcggtgctccgcgattatctgagggaatagcggtccgccgggagtggaggagggaccggcggaaacggcctgaacggagaatcggcgggacggctggaaacggctggcgcggctggatcgaaggatcggctggagcggaatgccggcgggagaggcgctgccggcggaacggctgaggcggtggggcggaaacggcggacggttgtcagcgccggactcctccccgcgacaagacctcttcgaagtaggcgatcgtcttcagcagtccgtcgcgcagctggatcgtcggttcccagtcgccgagcatcttgtgggcgagggtgatgtcgggtttgcgctgctgcgggtcgtccgacggcaggggcatgcggatgattttcgatttggagccggtgagttcgaggacgatgtgcgccagctcggagatcgtgaattcgttcgggttgccgatattgaccggccccgtgaagtcgtcgggcgttgcggtcatcatgcgcagcattccctcgatcaggtcgtcgatatattggaaactgcgggtctgctcgccgttgccgtagatggtgatctgctcgccgcgcagcgcctgcacgatgaaattcgaaaccacgcggccgtcgttgatgtccattttcgggccgtaggtgttgaatatgcggacgattttcaccggaacgccgtgttcgcggtagtagctcatgaagagcgactcggcgcagcgtttgccttcgtcgtagcacgagcgcagtcccagcgggtttacgtgtccccagtaatcctccggctggggatggatcagcgggtcgccgtatacttcggaggtcgaagcctgcaggatttttgcgtggttgcggttggcgatggcgagcatgttcatggcgcctatgaccgaggtctgcgtcgtcttgatcgggtcgtgctggtagtagatcggcgatgccgggcaggcgaggttgtaaatctcctcgacttcggccatataggggtagacgatgtcgtggcggatgacttcgaagttggggtgtttcagcaaatggcggatgttgctcttgtgtcccgtgaagtagttgtcgatgcagatgacgtcgttgccctctttaagcaggcgttcacacaggtgggaaccgatgaatccggcaccaccggagatgagtattcgcttcattggcacgaaatagttttgattaaggcgtgtaaatgtacgatttttattttgaataagttatatttgcacgcacaaatcgttacaagataacacaaaatgggtcgaaaagccgtcttttgtctgctctattttctggctgtcgtctttaccggactgctgcttgccgctgctgtgctgagctggcgcgcgtcgttcgtttcgccggaacagggcgggttctgggctacgatcgccctgctgctgccggtcgtcctgctggccaatctggccgcattggtctggtggctgatccgccgcaggtgggtcgtcgcgctgatgccgctggcggctttgcttctgaatatgggctacgtctcgtccatgatccagctgcccgacttcaacgcgcccgccgggtcgcacgacatccgcatcgccacgcttaacgtcaacggattccgccaactgggccctaagtcgatcaccgcggccgccgtggccgagatgatgcgccacgagcaggtcgatgtgttatgtttgcaggagtttctcgacgacggcgagttcccggccgacagcatcggcgcactcttttcgcgccggatgccctatttcgtttccgagggcagcggagccgtcgccagccgctatccgatcctcgactgcaaatacgtccggtttcccgataccagcaacgactacctgcgcgccgacctgctcgtggagggagacacgctgcgcattttttcggtgcatctccagacttcgggcatcgcccagctgcgccgccgcttccagaaggactacaaccgggaagccccggtcgattcgatgctcggcgccgtggaccgcaacagccggattcgtgccgcgcaggtgcgtgaaatccgcgccgagacggatgcgtcgccctatccggtaattctggcgggcgacttcaacgatactccctcgtcgtatacctaccgcgagatgaagggtgctctgaccgacggtttccgccggtgcggaaacgggtacggcggcactttccgctatctgggcggattgctgcgtatcgactatgtcttctatgacgacaccttcgagtgcgttcgctattacatgccctccgaagtggtcagcgaccataaggtcgtgatcgcagaactccggttcaaatagatttcggctttcgcggctttccccgtctctgcatcggtctgtatcggcgcggagtggcgggcgtttgtgcagctggtcttattgctggcgatggccggggtggcggtacgtttgtgccgccgcttttcggccggggtgcaaaaaacagacgtggagcgcggttcgggccgggcttcgcgtctgctgttgcatatcggtttcgtgcgcggagtgcgcctcggcgcgttacggccgggcgatgccgccgctggtgtcctccacggtttcggatcggggctgctccttggcgatcgtgaaggtgaaggtcgaaccctctccctccgccgattcgatggtcagctcgccgccgttgcgccgcgtgaggtcctgcaccagttggagacccagacccgatccctcttcgttcttggtgccgtaggtcgtgtagtggatttcggggttgagcagcttggggatgtcctcctccctgatgcccgtgccgaagtcgcggacgctgatgcgtgcatgcgtcggcgtctcgcgcaccgagatgacgatgcgtccgccctcgttgctgtatttgatggcgttggacatcaggttgcgcatgatcgtcttgaccatgtccacgtcgcagttcaccgaaatcggaccgggaatgtcgtattcgacggagatgctcttgacctgcgccacgaggtccgacattttgctggcgaagaccaccacttcggagatgtccacctcctgaaagaccgaattcatgcgtcctgtctggctcttggtccatttcagcaggttgtccagcagcatgaaggtgctttcggtgatgttgttgcccatggtcaccatttcgaggttttcctcgccgatctgctccggagtgaggttcatcaggagcatgttgaagaccatcttgagcgtcccgatgggcgagcgcaggtcgtgggcgatgaccgaatacattttgtcgcgcgcatcgaccgtggcctgcagttcgtcgcgctgctgcatgatggtccgctgcgccgcggccagatagatatggtgggttacgcgggtgatcagctcttcgtggttgaacggcttggagacgtagtcgctggcgcccagcttgaagcctttgacgatgtcttcggggttgtggagcgccgtgaggaagatcaccggaatgtcctgcgtgacggggtcggccttgaggtgcttgatcacttcgtaaccgtccagatcgggcatcatgatgtcgagcaggatcaggtccggagtctctttcgacgctttctctatcgcttcgtaaccgcccgatgccgtgacgatcttgtacttggcgcggctcagcacggctttcagcagcatgatgttggtcgcgatgtcatcgacggcgaggatcgtgtaatcctccggttttatggcgatgtttttcatggggaacgactttttacaatgcaaatatagtattatttttcgctcgttatcaaaaacttcaggcccttttggctttttcccaagcgccccgtccccgatgggttgcgaggtaggtcgtgccgcggaacacgttgaggttcatgaagagaaagtagtaggggatgaacagcaggcggctgcggcgtccgctgcgttcgagcgcccggcccgcgagcgccgcgaggtagaaggcgcactgcaggcccagcgtcacagcgtaaagcgtcggatgccccgaccacagcagggcgacgttgagcggcagcagggcgaccagcaccacgggcgtcagcgtccagcgcagcacccggtgcgagacgtactggaaccagagcacgccgtagcggaacggattgagcagtttgcgcagccgccagaccgactgcaggccgccggccgcgatgcgtttcttgcgcttgccctcctcgcccatgtcggccgagggtgtctccagcgcgtacgcctccttgcagtaggcgattttgtaaccctgcgccgcgatcagcatcgagcagacgaaatcgtcgagcagcgtgtcttcgggcagtgtctgccacagtccgcgccgcacggcgaacagttcgcccgcggctccgaccgcagaatagagccggtagtccagctccttgagtttcgattcgtatttccagtagacgccttcggtggcggcggctcccgccccgcctgcgtcggccacgcgcttctcgcccgccacgcacccgacctgcgggtcctcgaaacagcggacgatctccgtcacggcttcgggattgagcatcgtgttggcgtcggtgaagaccacgagcggcgtgcggatgtgttccagcgcgcggttcagcgccgcggtcttgccgccgcgccgtgcgtcgtgcagaacggtcgcgtcggggtaggccgccagcagttcgaccgtccggtcggtcgagccgtcggtgatccacgttatacggagtttgccggcgggatactccagtgcgcggcagttggccatcttttcggccacgatctcctgttcattgtaggcggcgatcagcagcgtcacttcgggtgcctcgaccggaactttgtaccggcgcgcagggcgcagggcttcgcggattttcaccagcatccacagcaggatgccgtagccgaggtaggtgtagaagacgaggaaaacccccgcccagaagagtatggctatggtcgtcatgcttcgaaaagttcggttaatacctgtttcatctgtctgtcccacgagagggtgccttcgaccgacgcgcggatctgcgccggagtgaggttcacgccgtcgcagaagcggacgagggccgcgatgtcgagcggcgtatcgtcggccggggccttcatcacgtagggcatgccgtcgaagtcgctgtcgttctcggagtagacgaacgggatgccgcgtgcggcgtattcacggtttttgagggtcttgatgcgggtgatgccgttgcggtggcgtcccagactggctatgcccgcgtcgcaccactcgaattcggcgtcgagttccgcacccgaacggggtccgatcacttcggcgtattcgctcagcccgtactcctcgatcgtgcggcggtagccgtcgatgagcgactcgatgccgtcgcccgcgatgcgcaggcggacgatacattggcgggcttcggcgtagtaggctttcaggccctcgatcacgcggtccagaccgtgccagaagtgaatgttcgccacggccagcagcctgatttcgtgggggctgccgtgccgctgcgtcttgagcgggatgctccggaagtcgatgccgttggagatgcggattgtcggccggccgaagatttcggggtcgtcggagaaggtcacgatgcggtccacccagcaggccatccggcggcggaaggtgcggtcgatgcgcagtttcagcctgcgcacgaagggtgattgcgcgaattctgcgtcgtaggggtaggtcggtatttcgagcgcgatgcgcacgccgagttttttgactttgcgcagccaatggatcagcaccgggctggcgttgtggtcgtggcggatgtagaggaactccacgccctcgtcgcggatgtggcgcgtgatgtcgcccagcgacacccgtttggcgaccttggcccgcagtccctgcccgaacgtgcggatcgcacgcccgccgaccatacggcgctgcgtgccgtcggccgcgatttcgaggtggcacagctcgacgtcggcaccgttccggcgcagggcgtcgcattgggagaaaatctttttgctgatgccgctatgggccgagaagccgtggaaaacgacgaataatcctttcattgagttatcggtttttgcgggagaggagacggagggcggttcctttcaggtcgtattcgccgctgaactggatgtagagcagccacacgaccagcgccgcggcgcctttcgccgcaagcgacacgagcataggcatcggcggcagcagccattcgacggccgccagcggcaggcagacgagcgccgagagcagcaggggcgagaggaaactgcgccagaaggcgccccaccctgtgcgcagcgtcaggcagaacagcgcgtggtagcactggatgaagttgattgcgaacgagatgcagatgcaccacgccacggcttgggtcgtgccgaaggcgaagatgccggtgcagatggccgccgtgttgagcgccgccgagaagaggccgcagaagaagagcatccgcgtggcgttggccgcttggaaaatcgagcctgaggtggacatgacgatttggatgcccaccgagagtgccagaatccggaataccgggaccgaaggctgccattggtcgccgaagatgatgaggaccagctcctgcgccgtgaaccacagcaccaccgagaggggcaggccgatcagcgccagcaggcggacgactttgcggtacgagtcggccagtttgcgcaggtcgttctgcatctccgagaagatcgggtgcatgacgggcgatacgacgtaggcgatattttgcagcggcagcatcatcaggcggtacgatttgtcgtagtaccccagttgcgaaaggctcatgtaacggcccatcagcagcttgtcgaggttgcggctgaagtagttgagcagctggaacgaaaactggtaggccgagaacgagaacaccttgccgacggccgcctttccgggtttgaggtgcaccgaaagcggattctggcggtagtttatcacgaagagcatcaggctcgaaaagaccggattgatcgtcagcgcgtaaatccccgccccggcataggcggcggcgatggccgccgcgccgccgacgacctgcaccgagagcgaccgcacggcagcgaatctgaatcgcttctttttgagtatgagtccgttggggacgatgttcgccgcggcgaaaaagaggtttgcggagagtatgcgcaggatgttgcgcagttcggccgaatcgtcgtaaaacgaggcgatcagccccgatgcggcgaagaagagcagcgccatgacggctccggaccacaatgtgagcgagaagatgccgcccagatcgcgtttgtcgagattcttgtgctggatgaccgccgggccgatgcccagatcgctgaagatggcgaagaaggcgatgaccacggtggcgatgttcaccacgccgaactcttcgggggtgaacaggcgcgccagcacgcccgacaccacgagcgtcaccacgatgccggcgtatttcgcgatcgaggtgtagaagacgcccgaagccagctgacgccctaccgtatggggttgtttattgtcgttttccgtcataaagtcgttcgtaaagcccgccgtacattgcggcgatgcgtccgatgccgaagtgttcctgcgcataggcgcggttgcgggcgccttggtccgtcgccgagaggcgcgcggcccgttccagcgcgatatccaccgactgcgggtcggcgggatcgaatgccgggttgcccgtctcggcgagcaggccgccgatgttgccgctggcgggacccgtcaccacgcgtccgaagctcagcgccagcgggacgttgcccgaattgaggatgtccgtccgctggatgaaaaccacgtcggcggcggcgaggtagcagggcagctgttcgtcgggaatcagcggttcgggcgaggtgatgcggctgtcgaagaagccttcggcgctatgcgccgcggcgtaaagcaggcgtccggcgagccgtttcagccctttgaaccgcgatccgcgtcgggtgtagggccacaggcgcggcgcgagcaggaatttggccgggtagtgcagcctgcggaatgcgccccataccagcctgcgctcctccgcgtggcggaacgccccgaaggccagcaccaccagccggtcggccgggatgccgagcgcgcggcggcctgcgtcgcgcgtaatgtccatgtcgtacagcccttcgtagatgtggtgcgggatcacgacctgcagctgctccgaatccggatgcgccgccgtgaattcccggaggctgcagtcgcccagatgtacgatggcgtcggcatatctttccaccagtccgtaagcctcggccacgagcggattgccgtggtgcggcagggtgttgtgacgggtgtatatcagcggtattccgttgtttttcagcgtctggagttgctgttcgagggtatcgacgtcggccggagccggagccttccagcggaacagctcttcgggccattggaggtgtacgatgtcgtagtccgcggcgttgctgcggaactcttcgaccgagcacacgacctcgtatccgcaagcgcggatgccgtcggcgagcagccgcacgaaagggttgtccgaagtgccggaagccgtatagacgatcagaatcttcatgcgccggttagattttcacccatgtctgtttttcggggtcgtagcgtttgatgacgcgcgccgggttgcccacggcgacgctgtaggcgggaatgtccttcgtcacgacgctcccggcgccgatctggcagcgttcaccgatcgtgacccccgccacgaccaccgaattggctccgatgtgcgattcgcggccgatcaccacctccttgcgaacgagcttctgctcgttcgagtcgcgcgtgccgtcggcgtagccgtggttgaagcccgatatgaagacgtgctgtcccagtccggcgcggtcgcccatgcgcacggggccgatgaccaccgacccgatgccgatgcgggccgcgtcgccgatcaggacgtctccggcgccgttgttgacgaccgcataatcttcgatcagggcgtcgcgccccacttcgaaccgccgccacggaaaaacgtcgagccgcgcatgacggcggatcagcgcaccccggccctttttgtgaacaaaagggtttacgaaccagcgcacccaaagccgcggacgcgggtgtttgtgaggcgaaatcaacccgatgacgaactttttcagccggggattgtctttgattttgtcaatcataaccacaaagatagcaaacttctgcgatatacgtaactccgttgtgcgaaatccggtgtgttatggcgcagtttttggcatatttccataaaattccgggcttttttgtttgaaaatttggcggaattgaatatatacgctacttttgttccagcgacacttttatcggatgatccgactttttgaattatgaaaaaaattctccttttcgccgccgctgcactgagctttgcagggtgtgccgaagatgcgccgactcccggaccggcagacgatgccggaaaattcgcggagatgagcgtcccttcctcgttcggttggaaaacgacggcttcggtcgcctgtaatttcaccgctccgcaacccacccgcgtatatgtggctgccgagcagagggccgagcctttcgcttcgtttatggtcggcggcgacgccgatccggtgaagctcgacgtgccggccgcgacgcggacgctctatgtgagctgccggaccgaaagcggcgtttcgccgcaggtggccgttcccgtgacttccgacggcgctttctgctctctcgatccgaaagcggcgagcggcacccgcgccggaatcggtaatgacgacgaagccagcgtcgatgaggggctgatctacatccccgcccgcaggaacggatggggcacgctgatgttcgaggacctctggcccgcttacggcgacttcgatttcaacgatttcgtcgtcaactacaagatccagctctacatgcagaacaagaacaaggtcgatgcgatgctgatcggcgtccgtgtgaaggcggtcggcggttccattccctacgatttgtgtcttgcgatgaagggcgtcaagggcggcgagatcgaccagatcgaaccctacaacagcaaaaacgctcccgaagcggagttggtcgcgctcaactctccgaattacgtcaaggagccggcggtgctgaagttcctgaacatccgtgaaaacgccaaccgccctgcgggtgccgcctatgtaaatacggaggaaggctatgagatgcccgaagaccggcttgccgaggcttcgttcatggtctatttccgcaattcgatcgccatcgaggatgtggctttcgatacgttcgatttcttcctgacccgcgaccgggaatcggacggccgccgcatagagatccaccggggcggtttcgagcctacgcccgccgcgacggccgactacaatgcgctggccggacagagcgcctataccgacagagccggccgcttctactattcgaacgacgggctggtctgggcgatcaatattcccttcgacattcagcatgcctacgagaagaccgatttcctgaaggcttatccccaaatgctcgaatgggcgcagtcgggcggcgcggtggcgcaggagtggtatctgcacggcgtggagaagcacctcgtgaagagaaaataagaccgcgagtaccggaaacggaaaaggaagggcaacgcccttcctttttttatcggccgcttcggcctgttccgcccgccgctccgctgattcggggcggcgggcgggtttgcgctctatctgccgagcgattcgtaaagcgccagcagctgccgggccgtctgttcccaagagaagagtttgacccgttcgagtccgtaggcgacctgttcggcgcggaacgccggatcggtttcgaggcgcagcagggcgtcggcgatcgccgtcggcgaagtcggatcgacgagaatcgctcccggaccggccacttcggggatcgccgaggtgttcgacgtcaccacgggcgtgccgcaggccatcgcttcgagctgcggaattccgaaactctcgcgcagcgaggtgtagaggaatgccgatgcgccgttgtagacggccgggaggtcgccgttggggatataccccggcaggcggagcatcccgtgcagttcgggcgcgccgatctcgcgcagaatctcctccgcggcctgctccctcaggtcggcgaccagcagcggcaggggtttctccgagcggcgcacgtactcggcgtaggcgcgcagcgtgccggacgtgttcttcttgggatcggtgttgcccagaaagaagatgtagccgggatcggagaggtatttgccgacggtctgcgccacatcgtccagcggccggaaccgttcgttgtagccgttgtagatggccgtgatccgttcgggatcgagaccgagggccgtgcggatgcggtcgcattcgaattgcgagacggtgacgatcttccggcacttgggcaggatgcgcggcacgaccagccggcggtagatgcgtcccagcgactggtaggacgacttgttgcgcgaagcctgcttttcgaggaagatgatgtcgtgcagcgtcagcaccagcggagtgcggccccatatgggcgccgtgttgctcgtgcagtgcagcaggtcgggtttgacccgcgccacggcgcgcggcagcgcccactgctcccagagcggataggtcgggcagcggagcgtctcgatgtgcatgttgggcgtctcctccagacagcggtccccgccttcgcccgtgaagatgaagtattcgtttttcgtgtcgatcttctgcaggcagcggatggtttcgagcgccacgaagtccatgccgtgtttgttggggcggaagatgcgctgtgcctcgattgctattttcatggttcggtcggggtgttggcaccgggagcgttgccgccggccccggtgtgttcggtgtggatgaatttgtctttggtgccccgcaggcggaaaaggttggctgcggtcagcaggaacagtacgggcatgcggcgcagggcgcggcccagctgccggtcggtctgctcgtcggggagcgccagcgccagcgcgaagagcagcaggagcagtacgatccaccattttatcgagccgaggggatcgaatacggtcatcgcggccgtccaaagcggcaccagccccatcagcaggatgcgcggcggcaggcaccattgcaggagtttgtcgcagtagtcgaggttgcccgcggcgattgcgcccggcagctgccggacggccgaccccagcgcgtagaactgcgcggcgatccatctgcgccgctggttgtagtaggcgccttcgccctgcaccttctcgtccagcacgcgcaggccgtcgatgtagtcgatgtagatgccctgcctgagcagcagcgcttcgagttccttgtcttcgcccgacgtggtgcagcgggcgatgttgtcgcggaaccacttgtattcgaaggccatgcccgaaccgatgagcgccgaggagagtcccagcgccacgtgtccgcggcggaatatggcgttgttgatctcttcgctcgccgcatccagcacggcggtgtcggtgtcgcggttcttggccgtgcggtgggcctgtacggcttgcacgccgctgtcgaagacgtcgttgagccgggcgatgaaatcttcgccggccagattgtcggcgtcgaggatcgtgacggcttcggcggcttcgggccccagctcttcgaccgcgaaattcagcgccttggccttggagctgttttcgaaggagacctccagcacgcggatcggcagcgtgcgcagttcggcgagcgtttcgggtttcagccggtcggcgatgacgaccacctcgtgcagctgcgcgggatactcctgccgcagggccgcctgcgccgtgcggacgatcaccgcgtcgcttttgtaggcgggaatcagcgtcacgaacttccgccggcgtttggcctgcggatagtcgtccatgtttttgcgcgtcgagaagagcgcgaagacgaaaagatagagcaccggaagtcccagtacgaagatgaaaatccagtcggctatgttcagaagagtcgtcatgcctgcttgtttttctgggtgaagaagtcgcgtacgccccggcatacggctttcgcgagggcgccgcgccggtgcgcgagcgccgagacggcgtttttgggcgccgctatgcagagctggtaggcgaccgaaagcagccgcgcgccgcccctgaggttgcgccatgcgaagagcagccggttgcgggtcaggcagtagctccgcagggggctttgttggcccgtggtcgcgctctccttgtggaataccgtgcagcggggatcgtatgcgatgcgccagccctgttcgcggatgcgtaccgaccagtccagctcctcgtaatagaggaagtagacctccggcatcggtccggctttttcgagtgtttcgcgccggaccatcatcgccgcgccgtgcgcatagggcgtgtcgtgcggagtgtcgtattgcccgtcgtcaggttctccgaagccgatcagggcgttgcgcagcgtgatgcgcgtcaggggcgtgtagcccgcgaactgaatatgctgcggaggagcgaaaaaccggattttcggacagaccgcgccgatcgagcggtcgccgtcgagggtttcgcagaggtagtgcagggtgtcctcggtgacttcggtgtcgttgttcagcagcagcagataatcgcccgtcgccgccgcgaatccgaggttgttgccaccggcgaaccctaagttgcgttcgctgcgcagcaccttgacgtcggggtagcgttcccgcagcggggccgcctcgtcgcgcgctgagccgttgtccacgatcacgatctccagcggagtcgtgacatgccgccgcagcgagtcgatcatcgcgcaggtgaggctgtagccgttgtaattgaccgatatgaccgatatccgcctctccatcattcgtaatttacccgctgagggggccgttgtgccgcgatcgccttgtcgagaatctccttgcgcgatagctcgcggtcgaagcgcggcgcgaggaagatgaagcccatgctcatgtagaggatggcgcccgtgggtatctggcccagaatctcgttggcgtaggccatgacgacgatgccggagattccggccgtgagcgccgccgtgaatcccctgagctgcgtgttccgcagcttgaagaccaccagataggctccccgtgccagtatgtagagcaggatgccgatgtgcagcaggatgcccacgacacccgtttcgacccagatcatcacgaaccacgagtcggtcggaatctgcgacagcggcgcggtcggggcgaaagtcttggctttgccgccaccgtgccccaagcctgcgccgaagggtttgtccgccattatttcgcgcagtttggcctgattttcaagacggaccttgaacgacggatcttccgagttgaaggcgctgcgcgcacgccggaccaaggcgttgccctgcccgatcgaggtgaacttcaggaagacgaacgctgcgatgacgagcaggatgcccagcacgatgactttgatgttgcgcgacatcatgatgaaggccgtgtagccgacgaacggcacggccagcgcgctgcgcgtgcccgaaatcagcatgccgtagcaggccgcggcggcgaccagcagcaggtatatcttcatccacggattgcggtagtagagcgccgagatcgaaaaaacgaccatcgaaagtcccatcgagccgccgaagttggcggcgtcgctgaagaacgagaaataccggaccccgctgtggatgatgtgcgtcgagcgtccgccgagaacgaacagccagtagttttcggcggcgttgaagccgaagaacttctggatgcaggctttgcccacggcgatcagcgtcagggcggaccagatgacgagcatgtatttcaggtacttgtattcgttcatcgtgagctgggtgagcaccacgatgaagaagaaatagaacgccacggacctcacggacgagaaccatcccgaaaccgaaaccgattcggggttcaccacttcgagcacgcagtacgccacccagatcgccgcaacgacggtcagcccggagctggcgcgcttccattcgatgcggtgcatcatggcctgcaggcttattatcaggatgttgtagaatatcagcgcgtcgaggatcatgccgaacggcaggtcgtgggcgtaacgggtcagccccatgatgaagtaattgatcacgaacagtccgagcatcgccagcgccggattgcgcagcgtgacccacaggatgcagagtgcggcgggaatggcggcgacgacggttccggcgagcagtccgtagttcaggaaagccatggcgaccacggccacgccgccgacgagcatgcccccgacgatgaaccgggggatgctgacgggtgtggttatgctgccgtagcgttccattgcgggcttttttttgaagcggatggcgggttgcgtttatttgacggccgtgaatccgaactggctgatctggtagcccagtctgcgcatgcgggtgtagggtggcatcagccccgtgaaggactgcaccacgtcgcggcgcgcgcagttgagacagagggtcacgggcgtgcggcccgcgagtttctcggttttctcgaaaagcagctggtccgtatccttccacgtgcggttggccggggcgatgacgatgttcagcgcggcgttccgcagcagctccttgggtaccgacttgtcggagaagggcgggtattccaccagcacgacgtcggcttcgcagagcggaaggtcgcccggtctgtcctgcacgaaatcttcgagttttccggcgagcaggtaggatttctgctcgacgtcgaagtccttgttccacgagatcacgcggactttcatgtcggcttcgcgcagataggcggccacctgttccgaaatcgtgctcttgccgtcgccggcctcggtgctcagtatgttgagtatgttgggccgtcgcgacggctcgaagtagttgatcgccgcgttgccgatatagcgcgccgcgatttcgcggtactgcttggcgtagcgccgctgtccgaaacgcccctttccggggaaggctccgatgactctgcctccggtgatgcgctcggcgcggaccttgtcgcgcagcgtgcggtcgagcagctccagcaggatgaagaatcccagcacgaagaggaacgtggcgaggaacgccgcggccacgaccagtttgcgcttgttcggctcggcgttgatcgggagtaccggcggattgatgatcttgagcgtcgccgaggtcatctgcaggttcttctgccgcaggcgggccgtgttgagggccgtgaggatcgagaggtacgactgctccgagaagttgatctcgcggcctttgcgcttgagcgtcgaacccacgggcgagaagtgggtgtacttgtcgtcgagttcggtcttgcgcagcttcatgaccgccagctcggcccgcgatttctcggcgagcagtacggcggcgagccattccgctacgatcgagttggtcgaaagcccctctttggtgtactgctggctggcgatgttggtcgtaatctcctgcaggttgcgggtctcctcggccagtttcctgcgcaggtcgcccgtatcgctgcggctggccgctatgctcggacggtcggagagcgtctcgccgctctcggtgggcgtaggctggaaggcctcggccgccgaaaggcgcgagtagagactgccgatcgtatggagcttctcgatgaactgcgcgttgttgtggaaggtctgcaacccttcgagctgctcttcgatcgacttgcgcagtttctcggcgctctcgaagttgagcaggatctcctcgtaacgcagttcgtagtcgcgcgaaagggcggcgatatgcttggtctgctcgtcgtagttgatcaccttgtgctcgacgttgtagtcgcgcagcgaatcctccagctcgcgcaggttcttgcctacgcgggccagttcggactcgaagtaggcgatcacgttgttcgtctcgccgaagcgcaggtcgcggtactgcctgacgaattcgtcgttgaggatcaccagcgtgttgtagacgatgtacgggtcgtcgttctcgtagctgatttcgagcatgtcgctgctggtgatgcgcttgaccttgatctggctcagcgcctgatagctgtagtagggcgggttccagtggaacatgccgtatacgtggttgtcgtggtcggcctcttcgaatctgcgcaggttttcgagcgtcttctcctcggaggtgcggtccacgaggtccatgacctctttgggggtccggttcagcaggtaccgggaggtgcgggccgtcaggtactggttgtcgttgtccggatcgaggtgcgtgagtccctgcgcgtaaaggcgcatcgagacgttcttgagcgtggtctgcgacaggatgatgttgatcaggttgtccatcgcgttgttgatgatgttccagtcctgacgcgtgccttcggtggtggtgatgtcgtagcccgaaacgatgcccgtgtagacggtcgtcatggacttgtagttgcggggctgggcgcccattttgaagaagacggccagcgccacgattatcggagcgaggatcagccaccacttgatgcggtagagaaaccgggcggtataagcgatgtaattcatggactattcggttttaggggcttgggcgtcggttgcgggggccggttggctgatgatcggggtccgggtgagcacttcgagcgtcagcagggcgttgttcaggctccggcggacctcctcatactcgcggatggccacgttttcgatgtttttctggcggctcagcgtctgggcgtcgagtttgccgttgatgaagtcggcttcgctcaggcggtactgcgcctgcgccgtgaccatggcttcgacggcgctccgcaggaccgaaagctgctggacggccagcgtgtattgctggatgaccttgatgcgctgctcttcgagccagcgctccgtgtccagctcgacctgttcgatgcgccttttctgctgtttgatcttgttgcggcggttgaatatctcgtcgatcggcagcgagaacgacgccccgacgttccaccagctctgctcgcggcccgtggtggtcgtggtccagatctggttgctgttgtcctgatagttctggttgtagatgtccgacgaaccgtaattgtagttggcgttgagcttgaagtagtgctgccagttgcggcgcacgttcttcagttcgcgctcctgtatctcgacggctttgttgtaatactccacctgcggcgtgttgcgcgcgttttcgagcagctggtgcagcggcggcagctgcaggctgatgtagtcgtcgggcgaaagccgctgcaggtcgctgtatccgaattcgaagtcgggggagttgccttgtgccgtcgcggcgacggccgtcagcagcagccatagtgtgaagaccgctcttttcatagttgctgtttttatacgttttctttctgtatgaacgccgtgaatgtgcgcagaattatcttcaggtcgaaccacggcgacattttgcgggcgtactcgatgtcgagctgcttgcgctgttcgggcgagagtttgcccgcctgtccgcgtttctcgacctgccacaggcccgtgaggccagaggggcacatgaaacgttcgatatattcgtcgctcgtgaggcgttcggcttcgtagagcggcagcgggcggttgcccaccaccgacatgtcgccccgcaggatgttgaagagctgcggcagctcgtcgatgctgtatttgcgcaggaagcggcccagacgggtgatgcggggatcgttctcgatcttcacgaaggcgttttcctgttcggtctcgaccttgtggtggtgggtctcttcggcgatcacgaagtcgtccgcatacagcatcccgttttgggtgtcttccagcagtctgcgcatctcttcttcgccgaggaccattttccccgaatcggcttcctgcggctgggcggcgtactggttcagttcgcccagctctttgagccgccggtcggcgtcggtgcgcatcgagcggaatttcaggaagtcgaaaatccggtagttgctgccgacgcgcttcgatttgtagaccaccggtccggggctgtcgagtttgatggctgccgccacgacgatcagcagcggcgagagcaggaggatcgccgagagcgatgccgcgatgtcgaacgcccgtttccagagcggcatgcggaaaatctgcacttcggggctgttctgcgcgacgggcttgtgcgtgaaggcgtagtcgcccatgaattgcagcatgcgcaggaaatccttccgcggcatgtctcccgcaatggcgctgttcacccctgcgcgcaggtattcgcggcgttccctttcggtcagttcccgcgaggtgatgagcacgatgcccccgcccggccacgaattgaggagccggatatcggagaggtcggcggccgggtcgcgctgttcgtagaggatgaacgcatgatccgtcctgagcgacgtcagcgtgcgcatcgccgagccgatgtcccccacgacgtacatcctgccttcgaccatttccgagaagcgggccgtgtggctgcctttgcctttgatgtagatgacggggtatttcaatcgagaatctttttaatgcgtattttgagctcctgcgggttgaacggtttgacgatgtagtcctccgcgccctcttccagcaggcggatgcgttccgaggtgctgtcctcgctcgaaagcatcacgaccgggatctgcttgaacaattcgttgtgtttgaggtattccagaaattcgtcgccgcgcatttcgggcatgcggatgtccgagatgatcaggtccggcatgtggccggcgagcagccgtttgatggcgtgcagcggattctgcacgtaatggcagtcgtaatccgcttggaggtatgcgtaaagaattttggcgatctgctccttgtcgtctacgatcagtatttgtttcttgttcatgtcggttcgttcgttgccgtgggtgtgtcgcagctatgtctctccgcttccggtgcgtgccgcagggggcatgcgggccgcctgcggagggtctggcctgagtttcgacagtaaatgtagtaaatattcgctatgagtcacttttttcccgttgcaaatatcggaaaaatatttgtcattctaaacttttgaggtaatttataacgcaaaaacgcccggcttctcctgctccgggactgcgatgatattaattttttccggaaatactatggtgttaatcaaaaaaaatggtagttttgtgcaattgtccgggcttcccacggccggacggttttgttaaaccgatgaagcgatggagtgtaacgaatgcgtaaattccgacgacggccgtccccggttactcgttgccgaggataatccgagtaatttcaaactggtagaagtgctgctgcgtcgtgattacgaactggtgcatgcatgggacggccggcaggccgtcgatatgttcgccgaagtacaccccgatctggtattgatggatatcaacatgcccgtcatggacggttatgacgcgctgcggcttatccgcgagcgtgctcccgacattcccgttatcgcacttacggcctatgctttcgaaaccgatcgtcagcgtatgtttcaggccggattcaacgaatgcttggccaagccgctgcgtgcggacgagcttcgcagccgtatcgcttcgctgctttcgcggtaaaagaaaaaactatgaccggtaatcgagcgataaaacactggacgctgctgctcctgagttgctgcattctgctgccctcgctgcttcgggccgaggaggcccgcggacgggagagcattctgatcatttcgtcctacaatcccgacacgcgccgcatgtcgagtttcatcacggaattcgaacgtcaggtcgtggcgtcgggcgtgccgtgcgatatttacgtcgagacgctcgaatgcaagagcatcaacgacgcgcccctctggatttcgcagaccgacaacctgataacccgttacgaatccaaagggggcctgcgggccatcgtgctgctggggcaggaggcgtgggcgtcgttcgtctcgctgggacgcattcccaaggaggtgatgtgcttcagctgtttcgtcagttcgaacggcatcgtgctgccgccgccggccgacagcaccggcgtctggatgcccccgtcgatcaactatatgaatatggtggacagcctgcacaacgtgggcggcctgctcaacaaatacgacgtgcgccgcaacatcgagctgatccgtacgctctatcccgaagtcgagaacatcgcctttatttcggacaacacctacggcggcatctcgctgcaggcgctcgtgcgtgaggagatggagaattatcccgacctgaatctggtgctggtggacagccgtgacggcgacgaggcttcgcatgcggcctatgcgtcgcttccgccccggtcggccgtgatgctcggcacgtggcgcgtgggcagcgacggcgaatacctcatgcagcgttcgctcaacgatctggtgcagctcaacccccgtctcccggtcttctcgatcacccagacgggcatcggcgacgtggccgtgggcggtttcgtccccaactacgagaacggcgccaacgtcatcgcggcccagatcaaggagtattataagaccggcagcatggagggtgcgcatttccatctttcggacggcgggtacgtcttcgactcgcgcaagctcaaggagctgaagatcgccgagtacgctttgccgaaaggcagcgttatcgaggatacggtggctgccaaactctcgaaatattcgcactatatcgagctgctcgtggtcggaatcgtactgttggtgctgctgctgatcttcgtggccttcctgttcctgcgtacgcggcgtctgaagcgcacgctcgaagagcgcgaaggccagctggtgatcgcccgcgagaaagccgaggagtccgatatgctcaagtcggcctttctggccaacatgagtcacgagatacgtactccgctgaacgccatcgtcggcttctcgtcgctcatgcagggcgaggaactttcgcaggaggagcgcgccgaatactgcgccatcgtggtcaacaattccgaaatgctgctgacgctgctgaacgacattctcgacatttcgtcgctcgaatgcggcaagatcaggttcaactactctgcggaggagatcgtgcagatttgtcagcatatcctcatgaccacggcccatacccgtcagccgggggtcgaggggcgtctcgaatgcgccgtcgattcgtacatgctcaccaccgacgtccaccgcctgtctcagatactgatcaacctgctgaccaatgcggcgaagttcacctccgaaggcagcatcaccctcggcgtggagatatgccccgaacagaacgaggtgcttttctcggtgaccgacaccggccccggcattccgctcgacaagcaggaaatggtcttcaaccgtttcgagaaactcgacggcaacaagaagaagggtaccggactgggactggccatctgccgtcagatcgccatgatcttcggcggccgcatctgggtcgatccgacctatacgggcggcgcccgctttatcttcgcccatcccatcggactccggctcccagaggatcgggagcaccgtgagggggggggttgagccttcgggaggcgtcaaaaccctccgtgtagccgatgacggcagtctggttcgaacccgtcggtaagccgtcaaaagggccgcggcggcagtcgcttccgcccgaaatgtaatctgaaaggacccccggagggtcctttttctatggcagggtgtgcgtccggagttgcggtgcggccggaatgtgcccggcagggcttctgcgcagggtttttcgggccgttctccgggccgggcgttggggaattattccacagccgtgtggaataattctacacaattttgcatatctttgagccgcatttggacggtattttgctgctaataaatgttttaaacatacgggtgcatcttggcgcaaggattggacgtttgctctgtaccctcattttatatacactctatgaaatttgacaagttgaaacccgatttgcagaacctgaatctggccggcgtgaagaaggcagcttcgcgtgcggcccgtgtccgcgtgaagctgagccgcaggcagtggattgcgatagcctgcaccgcgatcgtcgcgggcctgctgctcgctctgctgctccggccgcggccggcgtcggtcacgcttccggtcgtggccgtggaacccgtcaccacagaggacgtcaatatttacggcgattacgtgggccgcatccgcgcccagcagttcgtcgaaatccgtgcccgtgtcgagggctacctcgaaaagatgcttttcgccgaaggcacctatatcaagaaagggcagacgcttttcgtgatcgacccgctcgtgtaccgggcgcgtgtcgataaggccaaggcgcagctcaacaaggcgcgcgcgcaggccctcaaggccaagcgcgacctcgaccgtatccgtccgctctaccagcagagcgcggccagccagctcgaactggacaacgccatcgcttcgtacgagagcgccgcggccgacgtggtggtgggcgaggccgacctcacgcaggccgaaatgacgctgggctataccaatgtcaagtcgcctatcgcggggtatatctccgagcgcaacgccgacatcggaacgctcgtggggccgaacggcaaatcgctgctggcgacggtggtgaagagcgatacggtgcgcgtcgatttcagcatgacggcgctggactacctgcgcagcaaagcccgcaacgtcaatctcggacaccgcgatacggcccgtaaatgggacccctatatcaccgtgacgctggccgacggctccgaatacccctaccggggactggtcgatttcgccgatccgcaggtcgatccccagacgggtaccttctccgtccgcgccgagatgtccaatcccgaccatattctgctgccgggccagttcaccaaggtgcggctgttgctcgacgtgcgtgaggacgccgtggtcgtgccgtcgaaggccgtggtgatcgagaagggcggggcctacatcttcgtggtgcgtcccgacagcatcgtcgagaagcgttttatcgaaacgggacccgaaatcggacagaacatcgtcgtcgagcgcggactggtgtcgggcgaagacatcgtcgtggagggataccacaagctccagcacggcatgaaagtcgaaccggtcgttacgcggcgcgaggaggagaccgaaaatcagcagtaacctatgaaagcggacttttttatcgaccggcccgtcttttcgacggtgctgtccatcatcatcgtgatcgtcggcggcatcggcctcgccctgctgcccgtcgatcagtaccctcagatcgtgccgcccgtggtccgcatctcggcctcctatccgggcgccgacgcgcagaccgtgacgcaggccgtggccacgcccatcgagcaggagctgaacggcacgcccggcatgatctacatggagtcgtcaagctccaattcgggcggtttttccgccacggtgaccttcgacatctcgaccgatcccgatctggcggccgtggacatccagaaccgtctgaagaaggccgaagcgcgtcttccggccgaggtggtgcagaacggcatctctgtcgagaagcaggcggccagcaagctgatgaccatcacgctgctgtcatccgaccccaagttcgacgagatctacctgagcaactacgccacgctcaacgtgctggacatgctgcgccgcgtgcccggcgtgggcagcgtctcgaacgtcggcagccgctattacgccatgcagatatgggtcatgcccgacaagctggccgacctcggcctgacggtcaaggatttgcagaacgcgctcaaggaccagaaccgcgaatcggcggccggtgtgctggggcaggctcccatgaacggcatcgacgtgacgattccgatcacggcgcagggccgtctgtcgtcggtcagcgaattcgaggatatcgtcgtgcgggccaatcccgacggttcgatcatccgtctgaaggacgtggcgcgcatttcgctcgaagcctcctcctacagcaccgagagcggtatcaacggcgggaacgccgccgtcttgaatatcaacatgcttcccggcgccaacgccatggaggtcgccgcttcggtcaagaaggtcatggaggagatccgtgcgaatttcccggagggaatcagctatgagattccgttcgacatgaccacctacatttccgagtcgatccaccacgtctaccggacgcttttcgaagcgctgctgctggtgattctggtggtcttcctttcgctccagagctggcgcgcgacgctcatcccgatcgtggcggtacccatttcgctgatcggcaccttcggcgtgatgctcgtcttcggcttctcgctcaacatgctgacgctgctaggactgattctcgccatcggcatcgtggtggacgacgccatcgtggtggtcgagaacgtggaccgcatcatgaacgaggagcgtctttcgccgtacgaggcgaccaaaaaggcgatgggcagcctgagcggcgccctgatcgccatgtcgctcgtgttgtgcgccgtgttcgtcccggtgagcttccttgcgggaatcacgggccagctctaccgccagttcaccattacgatcgccgtgtcggtgatcatttcgacggtcgtggcgctgacgctcagccccgtgatgtgttcgcttttcctcaaacccgaaagcggggaaaagaaaaaccggattttccgccgcatcaatctcggactggcgacgggcaacagattctacggccggatgattcggggggcgctgaagcactcgcggcgcatgctggccgccttcggcatcgtgctggtcggcatctggctgatgaaccgtctggtgccccagagcttcatgccgcaggaggatcagggctatttcaccgtggagctggagctgcccgaaggggcgactatcgagcgtacgcgcgaggtgaccgaccgggccgtcgagtttctgatgaacgatcccgacgtggagtacgtgctcaacgtgacgggttcgagtccccgcgtgggcaccaatcaggcgcgcagccagctgaccgtgatcctcaaaccgtggggcgaccgcgattcggacggcctgagcgaggtgatgcagcgcgtgcgcgccgagatgtcgcgctatcccgaaagccgggtctacctgtcgcgtccggccgtgattcccggtctgggcaattcgggcggtttcgagatggtgctcgaagcgcgcggcaatacgacctacgccgagctgcagcgcgccgtcgatacgctgatgtactatgccgcgcagcggcccgaactcacggggctttcgtcgtcgatgcagggcgatattccgcagctctatttcgacgtggaccgcgacaaggcgcagctgctgggcgtttcgatgtcggacattttctccacgatgaaggcctttacggggtcgatctacgtcaatgacttcaacatgttcaaccgcatctaccgcgtttacattcaggccgaggctccctaccgcgcccagcgcgacaacctgaacctcttcttcgtgcgcggggcgggcggggtgatgattcccatcacggcgctcggcacgacgcattatacgacgggtgcgggcaacatcaagcgcttcaacatgttcaactcggcgaccatttcgggcgaagcggcccacggctacagttcggggcaggcgatggacgtgctggagagcatcgtccgcaagcacctcccggcgtcggtcggcgtcgagtggagcggactctcctatcaggagaagcacgtgggcggacagaccgggctggtgctggcgctggccttcctcttcgtattcctgttcctcgccgcgcagtacgaaagctggtcggtgcccgtggcggtcatcctgtcgcttcccgtggccggcatcggcgcctatctgggcatctggatctgcgggctggagaacaacatctatttccagatcggactggtgatgctcgtggggctggtggccaagaacgccatcctgatcgtcgaattcgccaaggaggagatcgagaagggacgcgacgccgtctctgcggcccttaccgcggcgcatctgcgcttccgcccgatcgtgatgacctcgctggccttcatcctcggcctgctgccgctggtcttcgcttcgggaccgggttcggccagccgtcagggcatcggcacgggcgtcttcttcggcatgctggtcgccattaccgtcggcattgtcttcgtgcccttcttcttcgtgtggatttacaggatcaaagcaaaactgaaacgatgaaacgacttacgataatcattctgctggccgcagcggccggaatggtctcctgctcggccgtgcggcactgcaaggcgcccgacgtcgatctgccggagcgcatcgccggggaggattccgactccctgaccgttgccgacgtgcagtggtggcggttctacggcgattcgaccctctgccggatcatcgaacgcacgctggacaacaaccgggacatgctcgcggccgccgcgcgcgtggagcgcctgcgggagctgtaccgggtgagccgggccgaacgcctgccgtcggtcacgggaaccgcttacggcgactacgagaccaacgactacgccggtgaaaaatcgagccgagaccccgaattcggggccaaagtcacgctcagctgggagctggatttgtggggcaacctgcgctgggccaaacgcaaagggggcgccgaatacctcgcttcggtcgaggaccggcgggcgatgcgcatgacgctggtggcgtccgtcgccgcggcctacttcaacctcatcgcgctggataacgagctgtcgatcgtgcggcgtacactcattacgcgcagcgagggactctatcaggtgcagctgcggttcgagggcggtctcacctccgaaatggtctatcagcaggcgaaggtggagtacgcctcgacggccgcgctgattccggacctcgaacgcaaaatcaagatcatggagaacggcatcctgctgctcatgggtgaaaatcccgaccggcgggtggtgcgcggcaagatgaataccgatgccgaattcgctgacagcctgcccgtcggactgccctccgggctgttgcagcgccgtcccgacgtccgttcttccgagcagcggctccgttcggcgatggcttcggcgggcatggcctacgccgaccggtttccgcgcctgacgttcaatctgacgggcggtctcgaaaacgacgacctgagcggatttttccgttcgcctttctcgtatgtcgccgggacgctcgcttcgccgatcttcggtttcggccgcaagcaggcccgctaccgcgccgcgctggcggcttacgacgaagcgcgtctggcctacgagcagaaagtcctgacggtcttcaaggaggccgacgacgccgtggtcacctatcgcagcgcccgcaaaacggcggccttgaagctgaacctgcgcgatgcggcgagcaaatacgtcgaactggcgcacctgcaataccgtgccggaagcaccaattacatcgacgtgctggacgcccagcggcgctatttcgacgcccagatcggcctgagcaactccgtgcgcgacgagcatctggcgctggtgcagctctacaaggcgttgggcggcggctggaccgaatgacttggcgttacggatatggacgaggggcgtagtcatagacctgcgccccttcgtctgttttctgtcgtatcaccggtgttttccggtctgcagccggtcgtgtcccgcgatcggccatgtgctccatagccggtcatacgctccgcgattggccgtacgctccgggattcgccggccttgggcatcgaaaaagccgcaggaacctgtcgaaacagactcctgcggccggattgtggaattatattcccggcttaaaaccgtcttttgccgtaaccgtcgcggttgtagccaccgccgccgcggttgcctccgtaaccgccgccgttgccgtgttcggtcttggggcgggctacgtttacgatgatcgtcatgccctcgaaatcggtgccgttcagggcgtcgatggcgctctgaccttggccctcgtcgggcatctcgacaaagccgaaaccgcgcgaacgtccggtctcccggtctgtgatgatgttagccgaagatacctctccgtactgtgcgaaaagtgcctgcaaactctcgcctgtcgtgcggaagttcagttttgaaacgtaaatgttcatctgtcttttgattatgtgaaatgatgcttgtttattttgcgtatgctatgttgaccgcattgagtccccgctgaccgcgttccgtctcgaaggtcaccagcgcgccttcggcgatgtcggccggtgcgttgctgatgtggaagaaatatttctccgtactgtcgaggtccttgatgaaaccgtagcctttgtctgtgttgaaatgttccacgcgtccccgcagtgcgaccggctcctgctcctccttcttggggacggataccgcgatggtctccgcatcgaccttcggtttgctgctcatgtcgggcggcgtgtcggtaatcatgccgtttgcatcgacatacgcgatcatgtcgtcgagcgagctgccgcccctgttggctttgcgttcctctttgcgctgttgcttctctaacttcttgccttgttttttcttctctaattctcttttgctgaatgaaatcgccattaattatatgattaaaatgtgtttgttccaagctttcgccgccgttgccgcacgccgccggatatgctccgtgccgcgctgctgctggagagagtcggtattcgaacaaaaaaagtcggttttgaaggctgaatcagcgatggagaagacctgctaaagataagcgggacagtgcattgccaagaaagttacaatatgaactcgattgtccgggttgccaaagataggcattataatcggaatatctgcatttatttgcagatatttcgctgccggtgcatttcggcgctttgggcgggacttatccgataaaaaaaaagccaccgcgaaagcggtggcttgagccgaaaccgggacttgaacccgggacctcttcattacgagtgaaacgctctaccaactgagctatttcggcttgccgggaacattaagttccctttgggattgcaaatatctgaaaaatatttttttcaaacaacaatttttcaaaaattctcacatttcttactatattcgcgcaaaactaacccgataatgatcacttttctggtgtgccttgcgctgctggtggcggcgtattttacatacggacgttatctggagcgtctttgcggggccgatgcagggcgtcccgtgccttcggccgtgtcgttcgacggcgtggactatattccgatgccgatgtggaagactttcctcgtccaactgctcaatatcgccggtctggggccgattttcggcgccgtgctgggcgcggcctacggtcccgtggcgtttctctggatcacgttcggcgggattttcatgggcgccgcccatgactttatcgccggtatgatctccctgcgcagcaacggtgcgagccttccggagacggtcggcacctatctgggcaacggcgtcaaacagctgatgcgcgtcttttcggtcggactgatggtgctcgtgggcgcggtgttcctctcgcagcccgcttcgctgatcgccaaccgcatcgacgctccggcgctttcgggaatcgtcttcggcgatttctcgtggctgctgctgatcgttctgggcgtcattctcgtttattatatcgtggcgaccctgctgccggtcgataagattatcgggcgcatctatccggttttcggctgtgcgctgcttttcatggcgctgggaatccttgcggtactgcttttcagcgggaaatacacgattcccgaattcacctctttccggaaccagatcgccgatgcggcacggtttccgatcgtgccgatgctctttacgaccatcgcctgcggcgcgatttcgggatttcacgccacgcagtcgccgctgatggcccgctgtcttggctccgagcgtcaggcccggcccgtgttttacggcgccatgatctccgaaagcatcatcgccctgatctgggcggctgtcgccatggcgttctggaacggcgtcggagggctgaacgccgcgatcgccgaatacggcggacaggcggccgtgatggtcgacgcgatcgcccgcgacacgctgggcgaggtgctggccgggttcgtgattttcggagtcgtggcctgcgcgatcacttcgggcgacacggccttccgctcggcgcggctgatcgtcgccgactttatgggcgtcgagcagcggagcctgcgcaaacgcatctacatcagcgttccgctcttcgccgcaggtctcgtaatcatattctgtctgccttttcagacgatgtggagctatttcgcgtggatgaaccagacgctggcgatggtcacgctgtggatgattacggccttcctgaaccggcacggccgcaaccgctgggtagggcttattccggcgacggtcatgacctacgtatgctcgtcctatgtcttcgtctctccgctcatgtgcggcatgcgcgaccgtgcggcggcctacctgctgggcggggcggtgacactcgtattgttgataattctaatttttaaaatgcggcgcgatgcaaaatccctgccttaacccgactgccgaccagacctacgaggtgatcggcgagggaccctataattttgccaaagtactggcccgtacccgcgaaatggagcgtgccggaaatgtcgaggaagcctgcaacgagcggtttcaggcctttcagcgttttgccgagctggtgccggaggacgaagaggtgaatctcgaatggaaccaccgcaattcgcgcgcggccctcgaactgattcgggcgtcggccatcgaccattttctgatcaacgacttcgaaatgtcggcggcactgctcgaattgctgctcgaactggaccccgaagaccatctggaggggagtgaactgctggctttcgattatctggccatggacgagcaggagttgttcgacgaggtgatcaacgacgtgtcggacaagtatgccagccgcgaaatcctgctgctatggtcggcgttccgccgcggcgggaagctgcccgaaggggagttgcagcgcttcaaaacccgctttgcgccctatttcgccgaatttacggccgaggagcatcccgccgacgagacttacctgcgcgatatcgagagcgaacgcccctcgcttcgggcgcaggctcgcgaattgtggttgcagaccgaaaacctatggtgtctctggcccggattcatcggggcgctgcgcgcggcgcgctgacggacgtcaggagctgaggcgtcgcagggggtgacggcgggtgacggcattgcagggacggagacgtcgcaggccccgcccctccggccgcatgatctccggcgctatttcttgtggcgttccagatagatcgaatagagcctgaaatgctcttcgattgcgtttttgtaccctttcaggtcgcggttttcgatgtatttcagcaggtcgcggtgcgtcaccaacgcaccggcccgctccagctccttttcgatcggttccagaaagtcgcggtacttctccctgacgaaatccagcacgggatagatgatgttttgaaattcggtgatgatcttgtttcccgtgatttcatagagtttggtgtggaaacggtgttcgctgacgggagcgtatttgttgttgccgatgacctgactcatctcgacgatctccttcagctcggcgacgtcggcgtcggtgaggttgcggaagatgttgtcgctgatgccgatttcgagcgccacgcggaattcgaggatgtcgcagagcgtcgattcgttcatcagcagcggattgatgcaccgcttcatgccgccgagcagcgacggctcgcccagcaccatgcctttcttggtgcgcgagacgatcatgccggtcatcttgaagcggctcagcgcttcgcgcagcacggcccggccgacgcccagcgacgccgcgagttccatctcgttcggaatgctgcatccggggcgcagaccctgttccttgaagtaggagatcagactctcctcgacgctgtctacgagcgtggtgttgtggttggctaacttcagttcttccatgcgcgggtgtctctttgccggcggggcttgtgcggctattcggtctctttccggtttcggaccagctccttgaagcagtggcggcagatcgcctcgtaggagtcggtttcgcccagcatgaccagcttctcgtcttgcgtaaggcggtgcgaatggtgcgcgaggttgccgcagcggacgcagatggcgtggaccttggtgacgtattcggccgtggccatcagcgccggcatcgggccgaagggcttgccggtgtagtccatgtcgagtcccgcgacgatgacccgcacgccgctgtcggccagctcgcggcagacctcgatgatgctgtcgtcgaagaactgcgcctcgtcgatgcccacgatatcgacgtcggaggtcatcagcaggatgttccgggccgagtcgaccggcgtggagcggatggcgttggcgtcgtgcgagacgacctcctcttccgaatagcgcacgtcgatgcggggtttgaagatttcaaccttctggttggcgaatttggcgcgtttgagacggcgtatcagctcttcggtcttgcctgagaacatcgagccgcagattacttcgatccagcctttgcggctggcgttttccaagaacataaatcagagtatcgtttgtttcggtttgttattcgcactcgtcgaggcgggtgatgcgggcgccgagggcgttcaggcggccgtcgatgtcgcggtagccgcggtcgatctggtcgatgttctggatcgtcgagaccccctcggccgacatggcggcgatcagcagcgccacgcccgcgcggatgtcgggcgaagtcatgcgcgtagcgcgcaggcggatgcggtggttgtggccgatgaccgtggcgcggtgcgggtcgcagaggatgatctgcgcccccatgtcgatcagtttgtcgacgaagaacagacggctttcgaacattttctggtgaatcagcacggcacccttggcctgcgtcgccaccacgaggaagattgacagcaggtcgggcgtgagtcccggccacggggcgtcggcgatgttcatgatcgacccgtcgaggaaggtctcgatcgagtagtggtcctgccggggaatatggatgtcgtcgccctgctgttcgaagcggatgcccatgcgggcgaactgcgccgggatgatgccgaggttctcgaacgagacgttcttgacggtcagctccgactggttcatggcggccatgccgatgaaactgcccacctcgatcatgtcgggcagcagcgtgtgctccgtgcctccgagcgaatcgacgccctcgatggtcagcaggttcgacgcgatgcccgaaatgcgcgctcccatgcggttgagcatcttgcacaactgctgcaggtagggttcgcaggcggcgttgtagatcgtcgtcgagcctttggccaagactgcggccatgacgatgttggcggtacccgtcaccgaagcctcgtccagcagcatgtaggtgcccttcagctctttgccttcgaccatgaagaactcgtcggcgatgtcgaagttgaatttcgcgccgagcttctggaatccgatgaagtgggtgtcgagcctgcggcggccgatcttgtcgccgcccggcttggggatgtagcctacgccgaagcgggccagcatcgggccgatgagcatcaccgaaccccgcaggcgcgtgcagcgccggcggtagtcctccgtgcgcaggtattcgaagtcgatctccttggcgcagaagctgtaggtgtcttcggcgagctgttcgacctcgacgcccatgcggcgcagcagctcgatgagctgcatgacgtccagaatccgggggatattgtgcaccgtgacccgttcgggagtcagcagcgtggcgcagagtatctgcagcgcctcgtttttggcgccttggggcgtaatgctaccgtgaaggcggtggcctccttcgactttgaaaattgccatatgcgtgataattaactgcgggaccgtgttttccgccggattccgctcccggcggcgcagccgcaggatgtgccgtcggcgggctttcgtccctcctcttcttgacaaagttaaaaagatttcgtgctttttgcccggctttttgaattattttcgtgaaaaatttttgcggataacttttttgttgtacttttgcaatccgtaaaaatgtctgaaacaataaaaagtatatagctatggcaatgaagagaacttaccagccctcgcgccggaaaagaatcaacaagcacggtttccgcagccgtatggagacggctaacggccgtaaggtgctggctgcacgtcgcgcgaaaggtcgcaagaagctgaccgtatcggacgaatcgacgttcaagtacgcttagttccccgttaggaaagagtgaaagccgacgcaaagtcggctttttttgtttatctttaccgccggccgccggcctgatgccggaaactcgttgcggggtttctctgcgggaaaccgcgggcggcgcaaaccgtaaaaccgttgaagatgcttactatcagacgagcagtggagagcgactgcggactgatccgcagtctggccgacgaggtgtttccggcgacttaccgcgaaatcatcaccccgtcgcaaatggattacatgatgaagtggatgtatgcgcccgaagtcctgcggcgtgagatgcgcaccggggttgcgtggttcatcgcctcgtccgacggcgaaccgtgcgggtacctttcggtgcagcaggaggccgaggagctgttccatttgcagaaaatctacgtgctgccccgttttcaggggcttggcgccggggaattcctgttccgccacgccgtggaatatgtccgttcggtgcatcccgcgccctgcacgatggagctgaacgtaaaccgcagcaaccgtgcagtgcgtttttacgagaagatgggcatgcgcaagctccgcgaaggcgatttcccgatcggcgacggctactacatgaacgattacatcatggggttggagatcgaatagccgctccgtatgcgtcggagagggggccttttcgccggatgatataaaaggatgtctgaaaagacatccttttttaaggtcggtgccggtgcttgtttcccggtcgccgtgtgccgtactgtcgccgcgtgccgtactgccggcgggtcctgcactgccgccgcatggcgcaggtaattccgttgttatttcccttcggccgttttgaacagatcgacttcgccgcgttcgaccttgccgtgcatgtcggccagttcggcgatcaccggagagatgaattcgagcgtgtcggcgacggccgacttttcgccctcgcccttgatgcggtagagcatggcggcgtacaaggccctgaagcacaactccgtgtcgttcatgcccggattgcccagcacggcgcgcaggcgcggcagttcgggttcgagacgggcgtatgtcctgcggtagtgctcgccgacggggagcttcatcagctgcaggtgcaagtcgtgcaggtcgccgatcaggtggagcgtatgctccagatgccctttttcgtccttgccctcctgatgcagcaggttggcgatgtccatgtaccagagcaggaatacgtgcttctgctcgtcggcgatgtccttgcggggggctatgagcgtcgagaagatcgcttcggggctgaattgcagcgcccgcagcaggtcctccagctgccataggtagaggatgtattcggcgatgttttcccggcgtttggcttgtgctatgtccatgctgatccgcgcttatttggtcggtttgatccaccgttgcggcgcgcccgcacggtgcttgaggaagtactgctgcgatttcaggaggttgcgcgactgcaacaccatgttcttggtctcggtcaggatcgtcaggtagagcatcgacgccttggtgttggaccgggcttcgttgatgcgcccaagctccgatttgatggcctcggcgatcgactcgaacagctggtcgcgcagcgccagcaccatctcgatctccgtgaagtcgccgtcgcgcagcatctggttgatgtgacggtagatcgactccacgtcgtcgttgatcgacatcagatccttggcctgctccttcgacagtccttcgtggttgttgtcgatatgttcgaacgccgggcgcgtgatgtgcatcagcgccttggtcatttcgttgaggtaatccaccacctgcacgtagtagtgggccgtgttcacgtcgccgctctgcaacttcttgagcgtgggcagcagcgtgtatttgcgttcgcgcgactggtagaagaggtcgttcgactccttgaccatgtcgcgcagcaccttgcggttctccttgaagacggcgatcagcgtgcggtcgtaaatcttcgtggcgcactccatcgtgtggcagacctcttcgcgcaggttggcgatgatgtcctcgttggtgcgcgtgtcggcgttggccgccgtgggggaggcggatttgccttttttcaggaagttgctgtggatgagcatgtagccgcacaagagggtgacgatgacgaatgcgacggttccgccgtagatcagggccagccccacgacgaatgcgatcaggaatccgcccaacgccgtgatgaaccagccggcgacgacggtcatgacgcccgaaatgcggtatacggcgctttcgcggccccatgcgcggtcggcgagcgacgaacccatggccaccatgaagcagacgtaagtcgtcgagaggggcagtttgagcgacgtggcgatggcgatcagcatggccgaggtcgtgaggttcaccgtggcgcggatcatgtcgtacggcgcgccgctgtgttcgatgtcctcgtattcgaagcggcgcgaaatggcggcccgcacgcgcggcgggatgacccgttcgatgccggcgttgatgttgagcgccgcgcggacgatcgtgcgcgagaggaccgacgaaccgtactgctcggtgccttcgtcgccctgcgccgagagcgacagctctgtttcggtgacgtgcatggcctttttcgaggtccagagcgtgagtatcatgatggcgcccgcggccagcaggatcaggaagttggccggaacgttgtcgttcagcacgcccatcagcatttgggaatcgccgctgtgccgggcgatcgagtaggcgtcgaatccggcgacgggtacgccgatgaagttcaccaagtcgttgcccgcgaaggccagcgctaaggcgaaggtgcccgaaaggatcgtgatgcgcaggatgttgatcttgaaccgctgtataaagaagagcagcaacgagcagacgacccagcaaatcaggagcgacagcagcaggtgattgtccaccatcgtgacgaaatcgtgtcccgccagaatggatttaagccctttgaagacggcgaagtagacgatcgccgtcagcgaggcgccgcaccacatcgacccgaagcggcggaacggaagcgtgtagcggaacgagaagatcgtgcgcgagacgtacatgacgaaggttccgcaggtgaaggcgatgaccaccgacaggaggatcgccgagacgatgcccatggcgcgggaggtgttgatgaactgtcccagcgcgccgacgccgaggtcgggggtgttcgagattttgtagatcgacacggcgatggccgagccgagcaggcagaagatcagcgatacggtggtcgaggtaggcagtccccacgaattgtagaggtccagcaggatgatgttggcgaacatcacgcccagatagagcatcatcacttcgtggaaggtgaagagtccgggattgaacatgccgctgcgggcgacctccatcatgccgctcgacgttactacgccgatgatgatgccgatcgaggcgacgagcaggatggtgcgcatgggtgcggctttggagccgatggcggagttgaggaaattgactgcgtcgttggtgacgccgacaaaaagaccggatatggcgagaatgcccagaatgcctacaatgacagtgtagatttcactcatgttagggtttagtgcaaattgtgaacaaatttacgccatttttcccgatgaaacggttttgccgccgaatattaacattaatttaacatggagtttcgcggatgcggcggtagaattgacgctccaacgcagaaccggatgaatgagcgggcgccgtgctttccttatgccggatttttctgccgtgtttctgcgtcgcattcggataacagccggagaagatgccgccccggcgcgtcgttccatgaaaaaagggcaggacccctcggtcctgcccgctcttttcggccggaacgtttgtcctgcccgctctgttcgggcggtgccgtcggtcctgtcttttttcggccggaaccgtttgtcctgccctttctcttcggccggggcctactcctcgtcggtgtcggtgtaggccttcagcagcttgtcctgcacgtcggccggaacctgctcgtaggaggagaatttcatcgagtaggtcgccgatcccgatgtgagcgacgaaagggtcgtcgaataacggtacagctcggccagcggaaccgtggcgttcaggcggtcgaagcctttgtcggactccatgccggcgatcatcgcgcggcggttctgcagatccgacatcacggcgcccatgtagtcgctcggcacgaggacctcgacgttgtagatcggctccatgatcttgggtcccgcgttgcggaatgcctccttgaaggcgttgcgcgccgccagcttgaacgagatttcgttcgaatccaccgggtgcatcttgccgtcgtagatcactacgcggatgtcgcgggcgtaggaacccgtcagcgggccttcgtccatcttctccatgatgcccttgaggatggcgggcatgaagcgcgcgtcgatggcgccgcctacgatcgccgagtagaactgcagcttgccgccccacggcaggtcgtattcctccttggtcttggggttgacgaccatgtcgcccttgcccggaaccttgtagttcttgggttcgggcatgccctcgtagtaaggctcgatgatcatgtgcacttcgccgaactggcctgcgccgcccgactgcttcttgtggcggtagtcggcctgcgccaccttggtgatggtctcgcggtagggaatcttcggcgcgatatagtcgtactggagacggttctccttttcgatacgcgtgcggaggatattgagatgatgctcgccctgaccctgtatgatagtctgtttcagctccttggagtattcgaccagaatcgtcgggtcctcgaatttggcgtcgttgagcaccttgcccagcttctcctcgtcgccctgctccttggccttgacggcggcgcggtagcgcggttcggggaatacgatcggttcgacggtcaccggcgccgacggcgccgcgagcgtgtcgttggtgcgcgtgcccttgagtttgacggtgcagccgatgtcgcccgccatgagttcggtgactttgatgcggttcctgcccgctacggcgaagagctgcgacaccttctccttgttgcccgtgcgggtgttcaccagctcggtgccctcggcgatacggccgcggatcacgcggaaataggtgatctcgccgatatgctgttcgacctgactcttgaatacgaaagccacggcgggcgccgtctcgtcggccgcgatctcttcgccgtcggtcgagaggaagttcggggccttcagcgggccgggagcgacgttgatgatgaactccatcagacgcttggtgccgatgtcgcgcttgccgctggtgcagaagatcggcatcacctcgcgtttcgagaggccgattttcagacccgcgcggatgtcgtcctgcgtgagcgtgcccttgtcgaagtacagttccatgagggcttcgtcgtgttcggcggccatctcgaccagctccttgttcagctcctgagccttgtccagctcttcggcgggaatttccagttcctcgcggtggccgtcgttgtccttgaaacggtacatcttcatcagcagtacgtcgatgaaggcgttgaattcgggaccctgattgaccgggtactgcacgatgacgggcttcacgcgcgacgaggcgcggatcgactcgacggcggcctcgaaattggccttgtcggcgtcgagctggttcaccacgccgatcacgggtttctgcagcagacgggcgtagcgggcctgaatttcgctgccgacctcccagccgttctgggcgttgaacaggaatacgcccacgtcgcccaccttgaacgccgagaagagacttccgcagaagtcgtccgagccggggcagtcgatgatgttcaacttgcggtccatgaattcggtgaagaggatggtcgaatagatcgagcgcttgtattcatgctcgatatccgtgttgtccgagagcgtgttgttcgtctcgatactacccctgcggtcgatgaccttaccctcgaaggccatcgcttcggcaagggtagttttccccgtgccgggcgcgccgatgagtacgatgttcttgatctctttagctgaataatttttcatattcccgtgtggttttaaggttttcgggtggttcggggcgtcgccggaggtgttcccgcggggcgtattcccggttgcggaagccgccctttccgggattttccggttagccgactataaatatacaaaaaaaacgggataaccaaaccggggcatgaaaaaatcgccctcaggaggcgatttttcggtctaaaaaaggaatgtcgagccacgtgagctttttccacagccactcgacgggaccgtgcgaatggcggcgcagccatatccggcagaaggcgtactgtacgaggatgatgcccacgcccgcgagtgtgccgtagatcacgtccacgtggcggtaaagccccatgccccagttgtagaagagcgccgttccgagcagcgattgcagcaggtagttggtcaggctcatgcggccgaagaaggtcatgccgtgcagcgcccgccggaatcccggcagtccgtaccacagcaggaccaccgccgcgacgatggccgtcgctgtcatcaggttgcgcatcgcctcgaacggcacgagccatgtgccgagaatgccggcagccagcagcccgccccagatgcgccggttgcggccttcgtcgtagaagagccggtaacggcccgccagcatgcccagcacgaacatcagcagcgtctgcgtggcgcggccgtgttccaatccccatgcgaaagagctgatcggcccgtagacgaggctcgcgcgggcgctctgggcgaaggttcccgtggcgagggtcggatagagggtctccatgccttcgatgccgcgcagcgagagcgtatggccgctgaagtgctggtagagttcgagcggctggatgaagagcagcgccgctatgccccacgcccagcggttcgggagtttgccgatggggatcatcagcagcccgaaaacggcgtaataggtcagcacgtcgccgttgtagatcgcggcgttgaccagcccgattatgaacagcagcaccatgcgccatgcgaaccgcagcgagaagtcgttgccccgctgggcctgattgtcgctctggatgaagaaactcagtccgaacagcagtgcgaagatggcgtacatcttgcccgaaagcaggaatcccagcgcgccggccacggtttgctcccagtcgccgaatccggcgcggaggtaatccagcccgctccagtagaggttgaaatgctcgcgggcgtggaacaggatgatgcccgccacggcgatgccgcgcagggcgtccgccacttcgatgcgggtgttggggaggttggtcgtgcggtacattttcgtcggtcaggagttaaaagcgcaggcaatccccgtcagcgcttcgacggcccggcggccctcgtcgcccagcgagagcgaatagtcgttgacgaaaagtgcgatgtgcgcgtcgatcacggcgtcgtcgagttcctgcgcgtgttccttgatatatgcgcgcgacgcttcggggtgcgcgaaggcgtattcgatgctttggcggatgagggtctcgacctgccgccgcaccgcttcgggcaggctccgtttggccgcgatgccgcccagcggcaggggaagcgcggtggtccgctcccatagctgtccgaggtcggcgaccagttccaactgccgctgccggtagacgaaacgcccctcgtggatcagcaccccggcgtcgaagtcgccccgctccacggcggcggcgatctgcgagaagagcaggggcgtgcgctccgtaatccgggggaaaaggcgtatcatcagtgcgttggccgtggtgtggactcccggtacggccacgcggcggatcggcgaccggtcccccgcgcggcgcaccagcagcggtccgttgccgcgtccgagcgccgcgccgctgtccagcagcgcgtagcggtccgcaacggcgggcagcacggcgcagcttatcttgctcacgtcggcatccccggtctgcaccccgcggttgagcgcctcgatgtcgcggtattcgacgtcgaaatgcaatccgcccgtgtcgatgcgtccgttcaggagcgcgtcgaacatgaaggtgtcgttcgggcagggcgatatgcgcaggcggagcgtcaccgtttctgcgcttcggtgatgttgcgcgcgttctcctgatcgcggttgcggttgcgcctgccgccgtagcggcccagcagccagcccgccgcgaaggtcagcgcgaggacgatgatgtcgataaatacgttggccagccagcgctggatggcaggggcgaactgccagatcagaatgaagacgaccagtatcaggatcagtcccgcccaaagtgtccattttttattcatcgtttccgaatatttgggttaatgttgcggtaaggttttcgacggccagccctacggcccatcggtcgaagggttcgccgacataattcgacacggcgcgaatctggcagcaggcgacgcccagcgcttcgcacacggcgaaaaagggcgcgccctccatgttctcgatctcaggtagcgcgctttgcccgtccgtgccgtcgattccgggcagcgagccttgtccgtccgtgccgtccgtgtcgccgatcgcggactgcatgtccgagggctgttccgggctgtccgccctctctccggtaggtggcagcgtctgtccggccggggccgaaactgcgtcgccggacttcgtttccggctccggaatcccgtaccctgtttcccggaactcctgctcctgttcctgcttccgccccgtctcccgcaggccgtctcccgaacggtttaccgtaacgcccgccgcgaggggcagtcccagatcgggtcccgaagtttcgtattcgcgggcgtaacgtgccggaatcccggcgatccgctcggagaccacttcgaccacctcgccgcgctgcaggctccggtcgtacgcccccgcgatgcctgcgagcacgaccagctggggcttgcgggctttcacggcccggatcgtcgcggccgcgatctccgccgcgccgactccggccacgaagaccggatcgcggggctgggtgaggatgaacgccttggcctcctcgatggtggggaaaatgaaaatccgcttcacgttaccggcccactgcggcttcgagttcctcgaccgtgatcggaattttcctgtcacccagcatgcggctgccctcttcggtgaccagaatgtcgtcctcgatgcggatgccgccgaagtcgcggtacgcctccagcgcgtcgtaatcgacgatgcccttgtagagaccctctgcgcggcacttgtcgatcagcgccgggatgaagtagagtcccggttcgtcggtcatcaccgtccccggttcgatgcgccatgccgcgcggtagatgcaggttcccgacttggcggcgcggtcggcgatcgtcgagaagtcgaaactccgctcgcccatcgcctcgcagtcgtgtacgtccatgcccagcccgtgtcccagtccgtggggcataagcatcgtcatggcgcccgaagccacggcgtcggcggccgtgcccttgagcagtcccagcgccaccagcccttcggccagcgtcatgtaggcggcgttgtgtatctcggtgtacatcatatgcggcttgacgatgcgcgctacatggtcgtgcgccgccagtacgacgttgtaaatttccttctgcttctgcgtgaaccggccgctgacggggtaggtgcgcgtgtggtccgagcagtagccgtccacggtctcgcagcctgcgtcgcacaacagcagccgcccctgctccaatacgccgtcggcgttgaggttgtggagcgtctcgccgtgctgcgagacgatcgaggggaacgacaggcccgaaccgctggatttggcgatgccctcgatggcgcccgcgatctcgcgctcgatcacaccggggtggcacatatgcatcgccagcgtgtgcatctggtagcctatcaggaacgcgcgttccatcgcctcgacctcctcggcgctcttcttctcgcgcatttcggccacggcgaacatcagttcgaccgacttgtagtcgtgcagcagttcgggcttgatgccgagcagcgccgacagctggagcttcgtctcgccgcggtagggcggcaggtagtggatcttgcggcccagcgaaacggctttgcggagccgcttttcaagctcggccatggggaacgtcgccgtgacgccgacttcggcgcccagttcgcgcagtgtgggctgcggaccggtccagatgatgtcctcgaccgtgaaatcgtcgccgtacagcgcctcttcgcccgtgtcggcgtcgatcaggcccgccagcgacggggtgttcagcccgaagtagtagcggaacgacgaatcctgccggaaatagtaggcgttgttcggatagttgttgggcgaaagggagttgcccggcagcaggatgatccctgagccgatcttcgtacgcagcatgttgcggcgcgcagcgtaggtcttagctgaaaacatagtatggcgttttaatttgcattccgtttgcggcgcctgcggcccgtcggcgcagggcttgtgcggcggcacattctccacctcttacaaaaatagtaaaaatatgacaagcccgcgccctgcggcggctattttttgcggaaaggcttctgcggagggtgcggacgggggtaaatgtccggcggggcgggcctgcggtcagaattcgacgcttgcgcccgcatcgttgaccgtgacggcgacctcgcggcccatgtagagggcgacgttagggtcttcgtggcctgcggggatgccgaatacgaccggaatccccagcggacggacataggctgcgatgatgtcgcaggggtcccagatgccgaagtgcttctgtcccagcatgtccgtaaaatgccccacgagaacggccttgcatttggccagtattccgcttcgctccagctgctgcatcatgcggtcgagccggtacatctgttcgccgatctcctcgatgaacagcaccgtcggggtgtcgaagtcgggctgttcgggcgtcccgatcgccgagcagagcagcgagaggttgccgcccgcgagccgtccgcgggccgtgccggagacgttgagcgggtgtgcagcggtgtcgatgcgcgtccagcggccgaaaagcgcgctgcgcaacgattcgtccgagacgatcgcttcgggtttttcgtcggcgccgaaacggaacttgcccggcatcgtggcgtgaaggctttcgacgcccagccgccccagcgccatgtggagcatggtgacgtcgctgaatccgacgatccacttgggatgttcgcgcagtggcgtgaggtcgagcagcgggagcaggcgcaccgatccgtagccgccctgatagctgacgacggctttcacgccgggatcgtcgatcatggcctgcaggtctgcggcgcgccgggcgtcggtcccggcgaagtagggctgttcgcggtcggcgtagtgcgctccgaatttcactttcaggccccactcttcgaagcgttcccggactttggccgtgtcggccttctccttgagtttgcgcgccggggtgacgatgcctatggtatcgcccggccgcaggtagggcgggcggacgaaaggtgcgtcggatttctgggcggagagcgcgtcggattgccggagggagtcggggcgtcgcattccgaggctgtcagatccgtggacggtgtgcgcgtcggattgccgtagggaaagggtgtcgggctgtagaagggtgtgcgtatcggggtggcgggctgcgaggtttgcagagcagagcaggagggcggcgagcaggaacggatatttcatgtcggatctgtattcggggtgtagagggatgtttgtttcggttcttcggggtttcgggcggagatgcctccggctattttctgcgctgggtcagcccttcgggcagcggcagccggatgcgggtgatgctgaccacggcgcccgtcagggcgaaccctcccgcgagcaggagcgccgtatgggtgctgttttcggggacgatgtggaacaggagggccatcagcgccgcgcccgtggtctggcccaccagacgcgccgtggcgagcatgccgctggcgcttccgctgcgctggggcggggccgaggcgatcaggatgctgttgttgggcgactggaacagtccgaatcccgcgccgcagagcaccagccgccatgcgatgtcgaaaggcgccgggtcgtcgggcaggaaggccagcaggaacagtcccgcggccatggccgtaagtcctgtgccgcccagaaatccggcgtggacacgttcgacgaggatgccggcgatcggggccacgaccatgatcacggcgggccatgcggtcatcagcagtcccgtggcgacttcgtcgtagccgaattcgtgctgcaggtagaagggcagggccaccatggcgagcatctgtcccagaaacgagcagatcgacgttaagaccgagaccgagaagatcgggatgcgcagcaggtcgaacggcagcagcggatagggttcgcgcagctggctgcggatgaagaagaagccgacgacgagcagtgcggcgatgccggccgagaggatgcgcggatcgagtccgtgcgagaatccctcgaccgaagccatcagcagcccgaacgtgagtgcgttcatcaccgcgtcgcgccagtcgaagcggtgggtgccgacccgcacggggttgtcgggcaggaagcggcggctcagcgacagggcgacaagcccgacgggaatgttcacggcgaagagccacggccagtgggcgatcgaaaggatgcctgcggcgatggtcgggcctgcgaccgacgacacggcgacgaccgtggcgttgagacccagcccgcggcccagctgcgccttggggtagatgatacggatgagcgtggtgttgaccgacgtgacggccgcggcgccaaagccctgcatgacgcgcgccagcaccagcgtggcgagcgacgaggagagtgcgcagcccaccgaagccaccgtgaagagcatcagcccgccgatgtagaccttgcggtagccgaccagctcgcccagcgccgagaacgacagcagcgagaccatgatggccagctggtaggcgttgacgatccagatcgagtcggcggacgaaatccccagctcctgcccgatggtcggcagggcgacgttggcgatggcgctgtcaagcaccgacagtccgacgccgaacgccacggccagaatggcccacaagcggcggggcatcggcaatccgtccgcaggcggcgctatgtagggaatggtgctcacggagtgcaaaggtaatacatgccgtccgcaaatcaaaacgggtgccgggcttgcatgaaaacggagacccggaaatttccgggcctccctctcacaactatgaatttgaactttttactttaaaaaacggtatggtagtatgcttgtggctggttgtgattccggtttatctgcggtcgctctccggcacgatcccgccctgcggttcgacgcccttgaggtatttggcgaggaacttctccatcgcgcggtagaagtcgaaacggttctcctcgttgtggaagccgtggccttcgttgtccttgaccatgtagtccacatgcacgccgcggctgcgcagcgcttcgaccatctggttgctctcgttgatgttcacgcggggatcgttggcgccctgcaccaccagcagcggggtctcgatgcgctcggcgttgagggccggcgaattctcgcgcagcatctcggcgtccttttcggggttgccgaccatctcgtacatcatgtcgagcatcggtttccagtagggcggaatggtttcgaggaacgagaagaggttcgacacacccacgtagtcgatggcgcaggcgtagaggtcgggatccttcacgatgccctgcagcgtggcgtagccgccgtaactgccgccgtagatggcgatcttcgcgggatcggcgatgcctttgccgatcagccagttcacgccgtccgtgatgtcgtcctgcatggtctggccccacttgccgtaggcgatttcggtgaacttgcgtccgaagcccgtcgaaccgcggaagttcatctgcagcacggcatagccgcggttggcgaggaactgcgcttcggggttgaagccccagtagtcgcgggcccaaggtccgccgtggggattcacgaccacgggcaggttcttggcgttgtgcacggtcttgcccacgggcagcgtcaggtagccctcgatctccagaccgtcgcgcgaagtgtagttgatagggatcatctcggccatctgctcctcttcgatccacggcgcgaggtcggccagcttggtcatcgtgtcggcctcgacgtcgtagaggtaataggtgcccatcgtgcggtcgccgcctgcatagacgatgtatttgtcctcggccttgttcgagccggcgatgccgatggcatagccgcgcaggtgcttctccatgcggccgaacatctcgcccgtcgccttgtcgaagaagtggcgcgcggtgcctttgtggccggtgtaggagacgccgagcagtttcttctgcgcgtcgctgtaccagatgttgtccaagtcgtatttgtcgtttacgtagagctgttcgatctcctcgcacgtcgcgggatccatcagcacgagggcgaccttgtcgcgtccgaggttggtgacggcgtagacctgcttgttgtcgggggtgaaggcggcgaacgagacgctctccttgaagttggtcgtcagcacggggcgaaaaggctcggcttcggtttcgcggtagcggatctgcgaattgacgccgtccacgatggcgtaagccacgcgcaggcggccgtcgtggtcggtctgccagccctgaatgtcgccgggattctcgcacagcatcgtcatctcgcccgtgttgaggttcagccggtaggggtcgaagatcatcggattgcgctggttggtaccgatgattatcagcgagtcgatctcttccagcgggtcgatgatctgcgtgcggacgcccggaatggcggtgtaggccttcgggtcgctgccgtcgatgttcacgccgtaaagctggtagttctcgtcgccgcccgtgtctttcaggtagaggatgcggttgtcgccggcccagaagtatccggctagatcgcgctcggtctccgaggtgatgcgcaccgcctgcttgccgtccacgggctgtacgaagatgttgcggcggctttcgtaaggcgccatgtaggagaaatagcggccgtcgggcgatatctggtaaccggtcttctccgaattgcggaagaaggtttccatcggcagctcaggggccgtcttgggtgcgcaggaggcgagagcggccgccgctgcggcgaacagaaggagttttttcatgggattattcgtttgtgttttcgttttgcttttcggagcgcagggcgtcgcgccagatggcgcagaccgagaggatcagcagtaccagcagcggcgtgtcggacaggtgcgaagcttcggggaacagaagccgggcggctaccgagagcgcgaaggcggccacgacgatgaatacggccagcatgcggatgattttttcgatctccataggatgtttttttaatttcgacattgcaaacttacgaaagaatttttgaaaaacaactgaaatttattgtttttcgataaaaattttatgataagcgggtctgagtgctttcgctggctgaaaatcgtaacgaaaaaaacgcccgaaggcgtttccttgatatatatgtcgtccggcatacgtgctgtccggccggcgcgggctattgcgcatcgacgaatttatagagctggtcgccgcggcgtatcgtcccttgggtgcgtaccgcgcacaaggttccctgagcgacggacgggacgggctttccgtcggtgtcgtgcagttcggcgagcgtctgttcggcgacgcccgtcgtggcgcccatgaagaatatctcttctcccacggccagcggagccgcttcgaccagcacttcggccaccgatatccttttgtagaagttggtcaccttgcctacatagaccttgcgccgcgtggcggccgatccgtaatgttcgctgtgttcggcgacgggccgtcctgcgtagtagccttcccagaatccgcggttgaaaaccgtagcgagccgctctttcagtccggcggccagttcgggcgtgtatgtcccggcttcgatggcgcgcagcgcctcgtcgtaacactccaccacgcgcttgacgtactccgcgccccgcgcccggccctcgatcttcagcacccggacgcccgcgccgatgaacttgtcaagaaaatcgaccgtgcagaggtccttgggcgagagtacgtagcggccgtccacgtccagcgccgcgccggtctccttgtcagtgacggtgtatttgcggcggcacagctggcggcatgcgccgcggttggccgagcagttggtctcgtagagcgaaagatagcatttgcccgaaaccgacatgcagagcgcgccgtgggcgaacatttcgagcagaaccagttcgccgcgcggtccccggatgtcgttctcggcgatttcgcggtgaatccgcgccacctgttcgagcgtcagttcgcgggccagcaccaccgtgtcggcccactgcgaaaagaatttcacggcttcggagttcgagatgttgctctgggtcgagatgtggacctcgacgccgatgcgccgtgcgtagagaatcgccgcgaagtcggaggcgatgacggcgtcgatgccctcggccttggcgcggtcgatcacctcgtgaacggtccgcagctcgtcttcatagacgatggtattgaccgtcagataggtcttcacgcctgcggcgcgtgccgtggcgacgatcttcgccagatcgtcgagcgtgaagttggcggccgacgccgagcgcatgttgagcttgccgacgccgaagtaaaccgaattggctccggcctgaatggccgccgccagcgattcgtacgaccccacgggggccatgatctctatatcggaacgtcgcatgtcagtttttgcgtcctatcaggctttcggcgtattcgcggatgcgctgcgtgcgggccttgtccgccgacagcgtatcgaggatcgagagcgcccgttcgaaccgcagcgaaatctgctgttcggtcagacgcggcacgtcgagccggtcgtagatggattttaccgcggcgatcttttcggcgtcggacagccgcgcatcgagacgggtcgtgcgcagcgcttcgcgcgtcgcttcgtcggcgcggctcatggccgtaatcatcaggtaggtctgcttgccttcgaggatgtcgccgccgatggctttgcccagccggtcgtcgccgtagctgtccagcaggtcgtcctgaagctggaaagccagccccagctcgatggcgaaacggcgcagtttgcggcagtcctcctccgaggcgccgcccagcatggcgccgatggtgaccgagccggccagcagcaccgaggtcttgagttcgatcatgtgcatgtattccacgaccgagaccttgcgtttgctctcgaagtccatgtcgtactgctgtccttcgcagacttcgagcgccatggtgttgaacgtgcccagtatccggggcagtagctccgcgggcacttcgctcagcaggcggtaggcgcagatcatcatggcgtcgcccgaaaggatcgccacgcttggcccccacttggcatagaccgaaggtttgccgcggcgcacggcggcgttgtccatgatgtcgtcgtgcagcagcgtgaagttgtggaacacctcgacggcggccgcagccggcagagcggcctgaaaccggtcggtgaaaatgccgtgtgcgagcatcagcagcatcgggcgcaggcgtttgccgccgcccgccagcgaatagccgatcggtgcgtagagacgttcgggttcggccgggaactcggtctgggccagataattttcgattgctaagagcagttgctcgttcgtttgcatcattgtagtactacattttggagcggaatctgtcccaaaagtaggaaaaaagtttggagtagccgaattttggattaactttgacctgataattgctaacttttttaaaccggacatattatgaaaaaactcgcgatcggcgtggatatcggcggcatcaacaccgccttcggccttgtcgatgagaacggcgacctctatgccgaatcggtcatttcgaccaagaaatatcctcatgtagacgattatccggcttacgtcgaagatttgtgtcaggcgatgcacgcgctggcggacagtctttcgttcgaatacgagctgacgggcatcggcatcggcgcccccaacgccaatttccacaagggtacggttgagaatcccgccaacctctggaaattccgcgagggcgaccccaatcccgacgagagccgccgtctctttccgctggccgacgatatcggcagatgtttcggcggcgtgaaggtgctggtgaccaacgacgccaatgctgcgacgatcggcgagatgatttacggcaacgccaaaggtatgcgcgatttcgtgatgatcacgctcggcacgggactcggttcgggcttcgtctccaacggcgagatgatctacggacacgacggttttgccggcgagtttggtcatatcatcgtcgagcgcaacggccgcgaatgcggctgcggccgcaaggggtgtctggagacctatgtttcggcgacgggcatcaagcgcacggctttcgagctgatggcgacgatgacggcgcccagcaaactgcgcgacatcgccttcgcggacttcgatgcgtcgatgatttcggccgcggcggagcagggcgacccggtggcgctggaggctttccgctatacgggcgagatgctgggccgcgcattggccgacgtggtgacggtcacctctcccgaagcgattttcctcttcggaggtctgtcgaaggcgggcaagctgattttcgaacccacgcagtggtacatggaagagaacatgctcttcgtattcaagaacaaggtgaaactgcttccgagcggtattcagggcaagaacgccgccattctcggcgcttcggccctgatctggcagcaggagaacaaataagccgtattcgccgggccggtctgtttcgctccgattcgggccgccggtttacggggtatgagggagaagtccgcggacttctcccttttatttatttcgtttcggcgctgttttccgctgtcctccgctctgtctgcatgctgccgcaactccggcttgtggttgtcccggttttgccgctgtttccggcttgtggcagttccggtttgccgttgtcctgagttttgccgctgttcgggctttgttcctcccgcgttttgccgttctcacggtttgccgttgtttgtggctgtcccgcgttccgctgctgtcctccgcctctgttgcgttcctgtccgtttcgttgggcgtgctctttcctttccggcaggccgtgcgtgctgccgaaaacagaattcccggtcttcgctacgaagaccgggaattcatatgttcgtgcgggttgcagccggggcggattgccggagaccggtgccgcggttagcgcatggcgatctgcgaggtgccgatcaggcggccttcgcagaagagttgcacggtgtaggtgcctgcggcgaatccggtgctgttgtagaagatgcccacgtcgaggtcctgattctggtagtccacttcgcgcatggccgaatagctcaggcgttcgccctcgaagtcgaaggtcggcatggcttcagtggtcagcacgtagccgtcgggcgaggtgatgcgcacgtagatcgtcttttcgcccggcgtcgccagttcgttggccgtcagcacgaagtccacgcgcaggcgggcggcgttcttgacgcgcgataccggtttgctgttggcgttgagcgccgccagcgtgatgtcgcgggcgcggatcacggcgccgacacggaccttgttgtccagttcggcggccttctcctcggccatttcggcgcgcagtttggccgacgagatctccttgcggtagccgacgttttcgctgatgagtctcttgttgagcgtattcagcgagtcgatctgacggatgtagcccttcatgatcgtacgcagcgtacctacctctttctcgtactgcttgattttggcgaggttccacgaacgctccttcttgaggcgcgtcatcagcgagtcggcgcggtcgcgttcgatggtcaggcccgccgagatgctgtcgttggtgacctgcaggttgtcgaagtcggtcatcagccgtcccagatcgttctggatcgagtcgcggtcgctctgcagcagccggttgtcgatcatctgctggcggtggatgctgaaatagagcgccgaaagggccaccagaatcactgacaggatgatgatgacgatgcggtagccgcggatggatttgcccgcgtcgggctggggagtcatgtagtcgtcgtcctcgaattccgaggggtcgtatccttgcttattttcttccataaaagctggtttttcggaaataggattaatttgatgttcgccggggtaactttcgtttctgcaaagatataaaatttttattttatcaggctcgtcatcgggtatttaagccctttgtagcccgaaatataggcgttgatgctgcccacgcgcacgggcgattcgatgtaaagcgggattttgttctcgtcgtccgagatccagagcgtgaagaccgtgccgtcggtaaacgagaatccttcggtggtgcccagctggcattcgaacttcagggttttgaatttgcccatgttgcggattttcttcgtctcgcggttgatgaagcggtagctcaggtgccggatcgtgtcctgaagcaccatctggagcgttgccggctcgccgggcttgaagctgtcggcgtcggatccgcgcatggtgaagaagagcgcgatggcgtccatgctttcgggcgtcagcggcatggttttctcctgatagggcttctggcggcggcgccagcgggtgaagacctgattgttctcccagtcgtagttgtagtagctctggaacgtatagtcgccttcgtgcaggtcgctttcgaaacgtacggggcgcttcgtctccgggtcgatccataccgtgtagatgtcttcgaggttgaagaaccagcggtaggtgggcagcgtgcggccgatgccctcgaccttgtagtatttgcggccggcgatttcgctgtcgctggtcttgacctccacggcgccgacctcggtgttggggaacatcttggccttgtagctcacgcggtagaagagctgctcgcccggatggtagagctgggccgggaggggcaggacggccgagaggaatagtatcgtgataagcaatcgtttcatggacagggtttttaaggataaacgttcggtggttttgaaatattacgaaatcatggaaaaatcaatctcttcttgtcccgaatacttccgcctcagctcccgcagtccgcggtgttccgggagcgagagatcgcggtcggcggtcagaatggccgccgccgcttcgcgcgagacggtgagtatctgcacgtcgagcgtgggattggcgattttcagatcaaatgccatgccgctctggagcgtgccgttgatgtctccggcgccccgcagcttgaggtcgagttccgccagccggaagccgtcgttggtctcgcacatggcctgcaggcgcgcccgcgactccttcgagagcttttcgcccgacatgaggatgcagtaggactgttcgccgccgcggcccacgcgcccgcgcagctggtgcagctgcgagagtccgaaccgctcggccgactcgatgaccatcaccgtggcgttgggcacgtccacgccgacctcgatgaccgacgtggcgaccatgatgtcggcttcgcccgacttgaactggcgcatcgactcctccttgtcggcgggcttcatcttgccgtggcagatcgtcgtgacgtaatcgggcagcggaaaatcgcgcgagatggcttcgtaaccgtccgtgaggtctttgtagtccatcgcctcggactccttgatgagcggatagaccacgtacacctgccgtcctttggcgatctcctgtttcatgaatccgaacaggcgcaggcgcgccgcgtcggtgtaatgcacggtcttgatcggccggcgtccggggggcagctcgttgatcaccgagacgtccagatcgccgtacagggtcatggccagcgtgcggggaatcggtgtggcggtcatcacgaggatatggggcggctgttcgttcttggtccagagccgggcgcgctgctccacgccgaagcggtgctgttcgtcgatcaccacgaatccgaggttggcgaactgcacccggtcttcgatcagggcgtgcgtgccgatgaggatgtccacctcgcccgacgcgatcccttcgagcgccagccggcgctccttggccttcgacgatccggtcaggaccgccgtcttcacgtccatgccttcgagcatgcgcgtgatcgtcgcgaagtgctggcgggcgagaatttcggtcggggccatcatgcaggcctgaaagccgttgtccacggccagcagcatcgacatcagcgccacgagggtcttgccgctgcccacgtcgccctgcagcagccggttcatctggaatcccgtcacggtgtcctgacggatctccttgacgacgcgcttctgcgcgccggtgagcgggaaggggagcttttcgttgtagaaggtgttgaagaccccgccgactttcatgaacagaaagccgttgttcttcgacagacgttccgtgcggcgcgactggacgttgagctggatgcccagcagttcgtcgaacttgagccggtactgcgcctgcctgagcagttcggccgactgcgggaagtggatgttgtagtaggcgtcgcgcagcgggatcagtccgtagcgggcgcgcaccgcttcgggcatgcagtccgtgatgtggtccttgaccagcgcccatgtgttgcagatgatctggtacatgcctttggcgccgagcacgttcgagagtttctcggtcgaggggtagatgccctgcatgccgctttcggccttgcgcgagagggcctgctccatggtctccagttcgggatgcgccatcgacagaaggccgcggtagaacgacggacgtccgaagatgaggtactcgcgtccgacttcgacgcgtttttcgatccatttgatgccctgaaaccacaccagttcggccgatcccgtcgggtcctgcacgtaggccgtgaagcgttttttacgccccgtaccggcataggccacccccgttatgcgggcgcggaactgcaggagcgtgggcgcgccctcggtgatttcggcgatgcggtagactttcgtgcggtcgatgtagcggaacggataatggctcagcatgtcgcccagcgtgcggatgcccagctccttgtccagaagccgggcgcgggcttcgccgacgccgcctacgtattttatatcgttgtccagatactccacacgacaaatataatgaaagtcgggcgacaaaacgaaaatttattttcggacaagtccgaaacgcatccgatattccgaaaatatgcgaaaaaacggataatccccgcaggttttccgttattccttccgccgattgtctgttgaagctgcttcggagagcagcgcttgggtgtggcggatcagttccggtccgccgggggtgccgtgccccggcacgacgatccgcgcgtcgggaaaccgcacgagcaggctgtccagcgtcgcgggccacgctgccggaacggcgtccgagaggttgcctgcgttctgcgccgccatctccttgaccatgcagcccgcgaaaagcagttttgccgacggaatccagacggcgatgttgtcttcgctgtgtccgccgccgaaataatagcaccgaatctccgtgccgtgcaggtcgagccgcagcgagtcgctgaaaccgatgtcgggaacgggcttgccctccctttgcgcgatgctgcgggtgaggcggtgggcataggacttcacgcccagcgttttgagatagcccagcccgcccatgcagtcgctgtgccagtggttgggcacgaacgtcgtgacgcgggcgcggagcgtttcggccgcccagtcggtcagcgtcttggtctgcgaatcgccgacgggggtgtcgagcaggacggcttcgccctcgcgcacgatcagaacgccgttcgacggcacgggaccgtagccctcgatctcatcgacggccgtgtagaggtagatgccttcggcaaggcgttggacggttatgtcgtttccgatgtcgatgcgtcggggcgtgcaggccgctgccgtcgccgcgagcagagtcagtagaaaaaagattcttgacatagattttgtatgaaaattcgaggaaacaaaggtaatatttccctcttgcttctagtcaataatggcggaaataatattaacgccattgatctcttatggaatccgtttcagaatctcttttatgacgtccggatgaaactcccggtagacggagttcgagcggacattgttttttccgtacggcttgggaattacgaacgtactcttgtccagccaatctacctgttttcccctatttatgggatacttgctgccgatattgaaagtcccgacggatgcattgtcggtgacgatgcctataccttttacacaaatatcgttgccgaaattgcaggacttgatgtaaattatgtcgcccttttcgatgctgtcaatgtagttgtgcaaatcgggagcatccgcctgatcccagccgacacctgcaactcccgaatgcaggaaatttttgcttacgtcgattcctccgaagttggctccaatgccataaatagcaacttttctcatgatttctttgattgattagtgggtaataatccgactttctgatatcgccttttgagggctgttccttgaatatggtaatttaacagagaatttgagcctattttttctcttccagcgtgacgtctacgccggtgcgggcgaaaccgccctcgtaccagccgtcgccctttgccgtgcggtcggcttcggtgaatgtcacctcgacgctcttttcggcgaactggccgccgttttccggaccgtccgtgtccgtaaaggtgagccatgccgttctggatgccgattagtccgctatgtcgtaactgccgtcggccatagtgcgcaccgccttgcttggggcgccgttgcttcggacctgaattccggggatcggattgccgcttttgtcggttaccctgccttgggtgcgggtgtcggcgcgcggtaccccgtacatctccaccggctccctgtcgcaggcggatgcgaagcccagcaatgacagcaggaggtaggaaagacgtttccggagggtggttttcatgatgcgcaggattggggattcttcgaaatatagcgaattattcgcagttcgcaaaattgtgtgttatctttgtggacgatattttcgcacggacaggccgtgtcccggcggtattcggagcaatccggcgctgcgacgggacggtgcggtccgctgcgttgcaagcgtgaacgattatgaatctttcggaatacagccgccgtccgagcggcgaagtgcgcatcgggcgggtcgtgatcggcggcgggcatcctgtcgccgtacagtcgatgaccaataccgacaccaacgataccgaagcctgcgcggcccagatcgagcggatcgaccgtgccggaggcgggatcgtgcgtctcacggcgcagggccgccgcgagggcgagaacctcgcaaacattgtacggagagtgcgtgaggacggtttcgacacggcgattgtcgccgacatccacttcgtgccggaggtcgccgccatcgccgcgaaatatgtcgacaaggtgcgcatcaaccccggcaattaccgtatggatcacggcgagttggaggcgctggtcgcccaatgccgcgagcggggcgtcgcactgcgcatcggcgtcaatcacgggtcgctctcgaagcgcgtcttcgaccgctggggtgatacgccgcagggtatggtcgtctcggcgatggagtttctgcgggtctgcaaggcgcaggggttcgatcaggtcgtcgtgtcgatgaagtcgagcaacacgcgggtcatggtcgctgcctaccgtctcttggtcgaagcgatggacgccgaagatatgcactatccgattcatctgggcgttaccgaggccggaaacggcatcgaggggcgcatcaagagcgccgtgggcatcggggcgctgatggccgacggcatcggcgatacgatccgcgtttcgctgaccgaagcgcccgaaaacgaaatccccgtcgccgaactgctggtgaagcattttgcccggcggccgggcaaattccccgtactacatcccgaacgctattcgccgaccgaataccgccgccgtacgaacgtcgcggtgcctgtcgtccacaccgagccgctggagggtttttgcgtgatcgaagccgtgtcggagaatcccacggccgaactgcgggccgcgatcctgaacctcgacacgctccggcccgtcgtggtcaaacgccgttacggggagacttcgccggagacgctggctgtcaaggccgccgccgatctgggcgtgctgtttctcgacgggctggccgacggcatctggatcgacgcgccgggcttcgcggaggaggagatccgcaatatcgagctgatgatcctgcaggcggcgcgcgtgcgcttctcgcacaccgaatatatcgcctgtccgagctgcggccgcacgctttacgacattgagaagaccctcgccgccgtcaagtcgcgcacgtcgcatctgaaaaacctcaagatcggcgtcatgggctgtatcgtgaacggtcccggcgagatggccgatgccgattatggctacgtgggcgccgctccggggcgcatcacgctctacaagggtcgcacggtcgttgagcgcaacataccgcaggaggaggcgctcgaccggctcgtcgaactgatccgggacaacggcgactgggtggagccatgaccgttctgcccttggcatatcttccctcggccgagtacttcgcgcacctgctgcgtggagggtgcgtcgtcgatctgggcgaacacttcgtgaagcgttcggagcgcaaccgcgcccgcatcctcgccaccgacggcgtgatggagctgacggtgcatgtgcgcaatgccaaccggccccgccagccggtgcgtgacgtgcggatcgactattcgaaacgctggcagcatcagcattggggcgcgctggtcgcttcgtacaagggatcgccctatttcgatttctacgccgaatatttcgagcctttctaccgccgggagtacggatttctggccgattacaaccgcggattgctcgaactgctctgttcgctgacgcatgtcccgatgccggacttttccgagagctatgtcgatgccgccgccggggacctcgacctgcgtcccaagcgcaaaaaagagggtccggcgtttatcgccgaaccctatgtgcaggtcttttccgaccgcatgcctttccagcctaatttgtctgttgcggacctgctgttcgccgaggggccggctgccgcttcggttttagcacgttgccgactctgagcgttacgctgtcgcactgctccccggccactgctttcaccttcacgataccctgtatttccaccgagtcggagcggtactggcaggcggcgtattgggtcatcgccacggtgtccgcgcccacgaacagcgtaggcgctccgaccgacgaatagacgctgaacgcctgccggttgcggtcgcgcaggctgcgccgcttgtcgacgatgtgcagcgtcggcttccgttcgttccacaaagccctgtataagtagtatgcgtccttgcgctcgcggcggtcgatcgtcaccagtccctcgccgttgatgccgtagggacggcgcgccgaaccgtaatcgaacatgttgttgatccacgtgccccagaagagcgaatcgttctgcaggttcttcacgtattcctcgtggaagcgcgtctggcgctcttcgggcatccagttcgagcgaggtgcggcctgcgccgtgtagctcttgtggccgatgaagccgctgcctccgtaacatacgcccgaacggaggttggaccagttcttctgcagctggttgcgccatacggccacgtcgtcggtcgagcctttgcgccagccgacgtcctgccgccagacgatcaggtcggtgatgaagttgatgccgccgttctggtcgctgcacgccaccgtcggacgcgaacggtccatttcgtgggccgtgtcgttgagccggcgcaggtagggcgtcacgtcgtcgccgcgcatccagagccgtgagaagataccccacatcaccaccgaagggtggttgtagttctgggcgatgatctcctgcagctgctgtatgccgttctgctcgaactgcggcgtggcgtaataggccacgtctcccagaaacgaggagcggtgcagcggagagtcgatccagaccagcaggccctgctcgtcgcagcggtcgtagagatactgcgcgtggggcatgacggctgaacgcagggcgttggctcccaaatcgcggatctgctgcaggtcggcgtcgtaatcctgcgccagaaccgcgccgcccgaaatggcgttgtcgtggtagagcgtcacgccgtgaaccggaatgcgctcgccgttgatcgtaaggccgcccgccgtggttacctgaatgtttcggaatcccgtgcgtaccgtcacgctgtccgttacggtctcttcgccgatgctggccgttacccggtagagcgccggtgaggaggggctccacaactgcggattggcgatcgagaagggtatgacgacgggtctgccgtcgagacgggttttctgccgtttggtgaagaccttccggccgttgggggccgtgatgtcgagcgtcagcatgcaggtgctttcgcccgccgaggtgaggtatatttccgcctcgccttcgaccagcgcgctggtgaccgaattctggcgcacgagtacgccctccgaaccgaggtggagcggtgaaacggccgtctttccggtcaggatcagctccgcttcgcggtagatgccgccgtaaagattcatgtcggtcgaagcgggaagcacgtcgtcgcggctgttgttgctcaccacgaccagcagcgcattgtcctcgccgaagcgtatcttgtcggtgatttcgaaggtgaaggccgtggacccgccgcggtgtgcgccgacatgatagccgttcacgaagaggtcggcgacgttctgcacgccgtagaacttcacgaacaaccgtttcgatgcccattcggcgggtatatacatgtcgttctgatagttggcggtcgtttcgaggaaatggccgccggctcccgtgtcggtgttccatgtgtggggcagggttacgtgccgggcgttgtcgctgctgttctccgacttgaagaagaaacgccatccttcgttgagcggaaatacctcgcgggcctgcaccgaagcgcaggcggcaaggagcaagagtgttgctatgtatcttttcatggttcccgaatttattatgcgtccgcatgcaaagataatacaacatcggttcaaaatcaaatttttgagaggtgcgctctccggcggcgccggacgcgaagctgttgtcggacgggtgccggtaaacgaataatcgtcgtctgcgcatcgcccagccgtatcgtggggcggatttcgaaacggcgattggccggacagacggcccggccggcggcggagtccgtgccggcggccgcagtgtgccggagagacggaagaatattgcggagattccggataaaaaaagcggcagaccgcgcctcttcggtctgccgcaagcaggaatgttacttgaaatgggagttgttgttaaccaaaaaactttgggatgtgccgttcctgctttaggaatttgatttcccgcgttcccggcaccgccccgaaggacggcgccggatttcgcggaaaagggggattactatttgttgttgatttcgacagttaccgtcttcgtaaacttcacgggagcgaattcgctgtcaagcgcatacttgtaggtgaaggttacctctacggtggcggttaccatgccggccagcggtgcgttgttggccgagtaggtgagaacgccggtcgcgttgttgaagctgaagttctcgaacgtcgttgcaccgttcgcgcctttgtacttcggattagcgaattcgactgccagaccgtaataggtgtcgtcagctacatttgctgcaagaccggtatccgtcagcaggttgttgccgaagatgtcgagggcgacattcttgttgctaaccttggtgttcataaccttgtggaggttgatcgtggcttccttgttcgtctcgactgcgagggtgccctttgcaaatgcaacccacttggcgaagtcgatcggtttcacaagttctacattgaaggtcttggtgtcgatcgtcagaccgtctacaaccatcactgcctcgacttcaaccgcatcgagctggcagccgttccagtcgagaacgccggtcgtgccgctggttccgccgtcgatcgtcggcagcgtgccggtgtaaccgtccggagtcgtcgtcttcagcgtgtaggtaaccacggcgttggcggtcgagccgtcgggcattaccttgccgtaaccgctggtgagctgaacggattcggtcttgaatgcgtttccttcgatcttgccgttagctttcatgtaataaggagtcttgtccgtgtagaggtttgcaccgatacccagatagtagccgttctccttgttgatcgttacgctgccgctcaggttgatcttgaaaatcggcgaagcttcgcttactacatagtacgactcttcgggtaccgtataggtgtatgcgttggcggcattgaagtctacggtgttcatcttgaagaatgcacggagaatcgttccgttctggcgcagacctgcctgtgcgatcttcttcgcggaatcggccttctgatcctcggctacgagcttcgatttgcccatgaactccttgaactcggcaaggtccttgaagtaagcctgctctgccggcagtttcgcgaacatggttgcatagaaatctttctcgacgcttacccagatgttgttctgaccaccgttgatgtccatttcgccgttggcgacattgacctcgtagttcatgtcgggcaggccgttgaacgtgatggcgcccttcagggtaacctcctcgttgtcgttcacgagtaccttcgtcgaaacatagaccgtaccgttgccgttgccatagttcttgatcgtgtactggagcaccttcgagtcggttccgacgtacggatcgctgatagcctcagccgttacagccagattgtcattggcggcaaggaattcggcatcgctggcctcctcatcaatcacccatgttgccccggcaaggctggccttgataccttcatactgctctttggacagcaccttgttttctccgtcgacaaaaatgggctgcgacaggtagttctggaacgcgtagcctactttcgtgccgttgatatcaccgtagtagaaccagttgatcgcggcgtcgatattgtcgatcgtgccgagcgacttgcgggtgatgttcagaacggcttcgtaagtgccgttttcaactgtttcggtctcgacctttccgtcggtctccacctcgacagcgacgaacagcttgccttggtccgttaccttcttgtcgatgttggcgacattggctttcttgagaccgatcgtaaccagttcggcgacagcctcttctgccatcgggtcttcgggcgcgatcgccagatcctcttcgacagcgtcggtggtgaagccggtgcgttcgataacgggcttagcggccggaacaacatcccagctgtatttcttggctgcatcggccagcgtaatcagctcgtcgtcgcttactttgtagacgaagctgtagtcgcccagcagcgtagcctgtgtcgtgatgtcgttgtaaacgaggttgtactctgccttggcagcatactccacgaactcgccttcaacttctttggccagaacgatcttgtcgagaatgtcggtagcttcgggatcggcgatggtcggaacatagtccgaagtgtactcgatgccggtttcgatcttctcgccctcttcaccctcggtttcgccgggcatggtggcgttcgacttgctgataacctgcagggctaccgagtaagtttcgttctcgttcagcttgtcgtaaggatagttggtatttacaatcatcgaaatcttgccgttttcagcaatgacctcgccttcgatcacgaagtagatctcttcggctgcacgcgtcaaaatctcgactttttcgggcagaaaagccagttcgacgctcttcttctccgcattgtagccttcggcgatcttctgggcgaggctggcgggcgatacgcggaaagtcatcgtggctttcttgccttcggtcagcgcgtagtcgccgatggcggcgccgcggaagaatgcgtatccgagtgcgttttccggaacgtataccagcgactggatacggcctgcgatgtcaccgatcgcactccaaagaacggcgatagccgcatcgtatttctgctgaacggcagcaagatcgctcttctgcaggaacgggttctcttcgtcgccgctcagtgccgcgccgatcatgtcattgattttcttctgcagttcggagtttgccgtattcagctgctccaatacggaagcgttggcggccgcacctgctgccgctttgaactcgtcggtcgtgatgtaggtcgagaggtattcggccatctcagggccgagccatgttttgaaggcttggcaggtcgcggaagtctcgtccgacattgctgtagcaagagccgtcatgatctggtttacctgcgaagtagacagcgcgctgtcgccggtcatgtaacctgcggcatccagtgcgtccgagatcatctcctgaacatcggtctgaatcttgcccatgatggcctcaccggtcagcatgttgttgaagatgccctttacgtcgtcttcgtccagaaccgagttgccgatcagcgtctcgatttccgtcttggtcatataacctttgtccttcagcagctgcagtacctcctcgctggtcagccatgccttcaggtcgcttttcttggcatagtctttcagcacgtcgtcgagcttcgtctgcagggccgtgttggtcacgaacgaagtaaagtcgattttgttaaacgcgtcttgagtcgctttaagcgacgtgacgtcggttttcaacgtcacaacgtctgtctccagaccgtcaacgcggttgttgagcttgtcgatgtcgtcgtcgtagtctttacaaccgacaccggctaacattgttccggttaagaacaatatatatatcaagttatatattgatatttatgatgttacaacctcgcatgacgactcggtttacatggaggtttacaagccggcgccggttttcgggtctttgcgggctggatcgggaatttgccagacccgtttgttggcgctgatgattctgtccgtatcgaactccttgaggtaagtttcgatttccgccgggttgcgccccatgttctgggcgatcaggggcagcggcacgtcggcgtgataaaggcgtgacgcataggtgtgacgggccgaatagaaggtgattttccgcgacaggccgatgcgcttcgccgcacgctgcaacccttggtttatcacgttgttggcataggttatgcgttcgaaccggcgttgggggtcgtcgtcgaagtagatcggaaaaacgaagtcgtctccggcgccgcccttcgccgtgcgggcgaacggcttcatatagggccacgccacccgctgttcgaccagaatgcggatcggatgcagggttttggcgcgaacgaaattgatttcataaaaagcgaccgtctccttatgcgcttcggcataccgggggccgtaggccgcacaatcccggtcgtacttctccctatccggaatctccacgcatacgaggtccttccacttcaggcgggccagatcgaccagcgccagcccctgaaaaatataggagcagatgaacatcgaaagcgcgaactgctcggcgtcgtacgacgcctgccgctcctcgccccggcatccgcagctcggcgcgcgccagcagcgtcttttcatcgtccggggatcgggcctcttccgggtcttataataatatgtatcgaggtagtaacggatcaggctgtcgagttcgtcggtcgcgagtgcccgtttggcggtccgcacgtcgagcctgcggctcagacggaagcggtcgaacggattggcgtccagcagtccgttctggcaggcgtagttcatcagcgctttcagggcgctgaaaaaccgtttgatgctcgtatcggcataacgcgcatggaggtactcctcgaactcgccgagccatgcgccgtctacgtcgaacagctcgacggtccggtgctgcgagaaccgttcgacgatatggagcagcgtctggtagccggcggccgtgttgtgtttctggagggtgtccctgaaataagcgatacgctcttcgaaaaggtcgtacagggtttttcgggacggaggtttccgcaccgaagcctcgaatatgcgctgcacggagtagggcaccccctgccgctcgaaatccagcactttgtttttcagcgccgtcagttcggaaccgatgatggcgttcatgttcggggccagcggatgccgttcgcgcacctcctgcttcgcggcgttccaccatttcgccggacaggagagtcccgtgcttttgtatcggcgtttgctgttgtagcagacccttatcatgacggggtgttcgccgctggcgagggtcttcgatttgtaaaggaccgccgtgacggtcgccttggggattttcatgtttttccggtttacgctatggtttacataatgagcgtcgaacagcaggaaaaaacggccgttctgaatttatatggtattgacaaacaacgagtgattgtcggatctttcggagaaagacaacaaaaaaccctctccgggagagggtttcgtgccgtatctgcggctcagcctttgcgtttgtagcgcgaggggctggtgccggtgtgctgtttgaagtatttgccgaagaacgactgggtcgagaaattgaggtggtaggcgatctcctgaatactcatgccggagtatttgagcagcgccttggcttccagaatcaccgattcgtcgatccagcgcgcggcggttttgccgctcacctccttgaccacggacgagagatatttcggcgtgatattgagctgcttggcgtagaagctgacgttgcgttcgcgtttgttgtactgttgcagcagcgacatgaattcgtcgaagagcacttcgcagcgaccctgcttgatctcgccgggctgctcgcgctggttgatctccgtgatgatgtagaacgccgtggtgaaaagcgtgcggatgatttcgtggcggtaacgctccttgtcgctgcgcagcatggttttgatgagctggaagagctggcgtatctggtccacgtcctgcggcgtgacctccagcacgggggccttgccgaagcgcatgtagaccggcagcgacgtcgagaggtcgatctggatctcattgacgaacgatttggagaacgccagaaaataagccgcggcgttcgacgaacatttcaccgtgcggatgatgctgtctggattgaaaaagacgatggtgttgggcttgacgttgtaattctgcatgtcgatcgacacggtggcttcgcccgtcatcatgatgatggccgagaaaccgtcgatcgaagccgggtagtcggacgtcgtgttgttctgcgcgtcgagtgtggtgataaccagatcgtccgacaggtagaagacgtcgctcatctcctttttgatgcgtgagatcgaaactttccgcaaattctcacgtcctccttcccgcgtcgcgcgtgtcgttttgatgctatccgccatatcgtcgtggtttttcggacaaatgtaacaattttcgtccgaaattgcaataggccggacgaaaaataacggagccggaccggcgtcggcgtcggaaacgaccgtcttgaaacgcctttcaaacgcctgaaacggcgctattccccacgggggcacatgatgcggagacctccggcgatgcactcgatatgcagcgggaattcggcccctttctgaccgtcgacgtccgtcggttcgttgaccgtcgatacgatgtcgagcgaacgcacccgcaggtggcggacgatcttcggattgcctcgcagcagatagcgtcccatggccagcgtcgagcggaggaagttcttcttttcgagcatgatgcagtcgaacagaccgtccttgaccgacgaacggcgcgcgaggcggaagccgccggccgtctcgccgttgaagacgagcaccatcagcgagttgaagtcgaaagcctgtccgtcggccaccactttgagcggcacggcgtgcattgcgcgcagctccttgacgccctcaatcagataggccagcttgccgatcttgtgcttgcgctggtcgggcgtgcgctgcgaggtggtcgtgaagatgccgaagctgaagatattgacgaagtagagtccgttgacgcatccgcagtccacgcggtccaccgcgccggaggcgatctgccgcgccgcttcgagcggatggcgcgacatgcccagcgcacccgcgaagtcgttggccgtaccggcgggaatcactccgagcgggatgtccagccccttgtttttcatggcgttgaccacgtagttgaccgtgccgtcgccgccggccacgaccatcaggtcgatctgctcgttgccttcgaacggattggcgccgaagtcgatcagctgcggtttgatatcgtagccgtaagccctgaataccgtgcagacggcttcggtgcagcgttcgattttgcatttcccggattgggtgttgtagagaaaaacagcgcttttcatagggatcgttattgcatgatcatcgcctccatggcgggtgaaatatactcttcgtagccgtcggccccgtcggcgaggatgaaatagaccttcacgtccggcatcgtcctgacggcctccagcgcatcgtcggcccccatggccagaaacatggtccccagcgcgtcggcttcggcgcaggtcggcgcggcgacggtcacggagagcagacgcgacacggcgctgcgccccgtgcgcgggtcgatggtgtgggccaccttgttgccgtcggcatcgaggtagaagcggcggtagttgcccgaagtggccagaccgccgtcggtcaggcggatgcgtttctgcacgtattcgccgtcggacatgttgccgtcgaacggggtttcgatgccgatgcgccacggcccgccctgccggttgacccctttgcagcggacttcgccgccgatgtcgacgatataattgcgggcgccgaacgattcgaccagccgggcgagcaggtcgaccgtgtagcctttggcgatcgaattgaagtcgagctgtacgcgggggtcggccttcaccagccggccctcctcgacacggaccttttcgcggccgacgaatgcgaggatcgaatcgacgtcgggatgccgttcggcctgtctgccggcaaacccccacgcttcgaccagcggtttgaccgtcacgtcatagcggccgccgctcagggcgccgatgctgtcggccagatgcagattgaaggcgatatggcggtctatgctgtccgtctcgttgcggttgagccggctcagcagcgagcccggatcgaagatcgacatcgacgccttggcttcgcggtcgagttccatcgccgcggcgtagagttcctgcgcggagacgccctgcacgtcggccgtgatatgcagcgtagtgccgagcatcacgccgtccacggcggtataggaggaggcatccccgcatccccagaggatggccgcggacaccgcaatccagactttccgaatcagcttttctgtcataacgtgctcttgtcagccgcaaaaatagcattttccgggagattcgggaaatttccgccgaaaagattgctccgcggcgtgcggcgcaggcggaacggctgttgcggccgatgcgtttgccgcaccggtttgagcgccggacgaatgtttccgggatcgaatccggctttgtaaacggctggaaaacagcgacgccacggccccgtgcgagcctctcccggcacccgaagaatagcatctacgaacgattttttacgtttttcggtccgaaggcaataattttttgatttttaatacttaatttccaattaattcgtaactttgccggacgctctggcgttattcacggtaaggggaatgcgtcgtagagtggaactgaataaatttcaaaaaaatggcttatttaacagctgagaaaaagcaagagcttttcggccagtacggcaagtctaacaccgacacgggttctcctgagagccagatcgcactgttttcgtaccgtatcagccaccttacagaacatctcaaaagcaacaagcacgacttcggcacgcagcgttcgctgctgcgtctggtcggcaagcgccgcgcgttgctggagtacctgaaggaggtcgacatcgagcgctaccgcgccatcgtcaagacgctcaacctccgcaagtaatccgcgaggaagaaatgagggcaattcccggaaggggttgccttcattttcgtaaagacaacgattcgaaaaacactataggttaaatttttttatggaagacaaaaagctgtacaatgcagtccgcaagatcattacgctggccgacggacgccagatcgagatcgaaacgggcaaactggccaagcaggccgacggctcggtggtggtcaagcagggcgatacgatgctcttggccacggtagtagccgccaaggacgcaaaacccgacaccgatttcatgccgctccaagtggagtacaaagagaagtacgcttcgtgcggacgctatcccggcggcttcatgaagcgcgaaggccgcgccaacgacagtgagattctcgtcgcccgtctgatcgaccgcgccctgcgtcccctgttccccgcggattaccacgccgaagtttacgtgacggtgaacctcatttcggccgacaaggatattcagcccgacgcgctggccggtctggccgcttcggccgcactggccgtttcggacattccgttcggaggccccatctcggaggtccgcgtcgcacgtctcgacggagagtacgtcatcaaccccaaattctcggagatggaccgcgtggacctcgacattatggtcggcggtacgatcgacaacatcctgatggtcgaaggcgagatgaaggaggtttcggaagaggtgatgctcggagccatcaaattcgcacacgaggagatcaagaggcactgcgccgtacagatcgagctttcgaaagagctgggcaaggacgtgaaacgcacctactgccacgaggagaacgacgaggagctgcgccagctcatcgtcaaggagctttacgacaaggcctacgccatcgccaccagcggtacgatgaagcacgagcgcgaggatatgttcaatgccctcgaagccgaattcgccgcgcgctattcggaggaggagctggccgagaaagccatgctgatccacaaatacttccacgacgacgtgcagaagaaggccatgcgcaacatgatcctcgacgagggcctgcgtctcgacggccgcaagaccgacgagatccgtccgatctggtgcgaggtggactacctgcccgccgcccacggttcggcgatcttcacccgcggcgaaacgcagtcgctgaccagcgttacgctcggcacgaaactcgacgaaaagcagaaggacgaagtgctggtgcagggcaccgagcagttcgtgctccactataacttcccgcccttctcgacaggcgaggccaaggccgcacgcggcctgagccgccgcgagatcggccacggccatctggcatggcgcgccctgaagccgatggttccgctgggcgaggagaacccctatgccgtgcgcgtcgtttcggacatcctcgaatcgaacggttcgtcgtcgatggctaccgtttgcgccggtacgctggccctgatggacgccggcgtgaagctcaaaaaacccgtgtcgggtatcgccatgggtctgatttccgactcccagagcggcaaatgggccgtactgtcggacattctgggcgatgaggaccacctcggagacatggacttcaaggtgacgggcaccaaggacggcatcaccgccacccagatggacatcaaggtggacggcctttcgtacgaagtgctggccgccgcgctggagcaggcccgcaagggacgcctgcacatcctcggcaaactcaccgagtgcatcgccgagccgcgcgccgactacaagcctttcgtgccgcgcatcgttcagatcaccattccgcaggacatgatcggcgccgtgatcggccccggcggcaaggtgattcaggacatccagaagaccacgggcacgaccatcaccatcacggaggtggacaacaagggtatcgtggacatcttcggacaggataaggccgcgctcgacggcgcgctgaaccgcatcaaggccatcgttgcgattccggaggtcggcgagacctaccacggcaagatccgttcgatcgtcaccttcggcgcattcgtcgagatcatgcccggcaaggacgccctgctccatatttcggagatcgactacaagcgtttcgaaaccatggaggagaccggcctgaaagagggcgacgagatcgacgtgaaactgatcggcatcgaccccaagaccaacaagctcaaattgtcgcgcaaggtgctgctgcccaagcccgaaggctatgtggagcgcgagcgtcgtccccgcgaagaccgtcccgaccgcggcgaacgccgcgagcgccgcgaccgtcccggacgcaaagaggagtaaacggactgttaatgtgcctatttcggacgaaaaagtatcgaaattacgtccgaaatattgcacaattaccaagagtttcctatatttgcgttgttcagcgggttaaattccgaaacccggacgtacgaacggcgtcttgcgaatcggaacttccgcgaaagaaacaggaaaaaggcaaacatttaaataaacacattaattttacgattatgaaaaatctaatgaaattgagcgttgtactcgttgctgccgcactggcattctcgagttgtaattgcttcaagaagatggctaagaaccgggacgacatcaacctgaccgtcactcccgaaattctgacgctgaacaacggtatcgtagccgcggacatcaacgttacgttcccggtcaaatacttcaatgcgaaagccgttatcaaggtaactcccgtgatcgtattcgagggcggcgaggttgcaggcgcagccaaatacctccaaggttcgaaagtggacgagaactacaccgtagtagacaagaagaacggcggcagctatacgcagcacgtagagttcccgtacgatccccgcatggacaagtgcgctctgcagctccgcgccgagatcaagtgtccgggcggcaagtgcaaggagttcacgctcgtgaacctgaacaccggcgccatcccgaccaaggaacaggctgccgtgctggccggcaacgacgaggctgccaaggccgctctggccaaggaattcggcctgaccgtcgcttacggtctgaacaccctgcagaaggacctcaaatattcggacctgatggctccgatggccaacaactacaagaaggtgcacaccgtagttgacaagaccgatctgctctatgcgatcaactcttcggtcgtaaccaagaagaacgagaagaaagccaatctcgacgccttcaaggccgacgtagacgccaaactgcagaacgaccgcgcaacgcagaacatcgccgtgaagggctatgcttcgcccgacggtcccgtgaagttcaacgacaagctgtcgaaagcccgcagcgaatcgggtaagaaggtcgttgccaaactgctgaaggattcgggtctggatgtcgacgccgcagcttacggcgaggactgggacggcttcaaggagctggtcgagaagtcggacatcaaggacaagaacctcattctgcaggtgctgagcctctacaactcgtccgcagagcgtgagagcgagatcaagaacatgtcgtcggtattcaacgaactgaaagaggagattcttcccgaactgcgccgttcgcagatcgtcaacagcactgacattcagggtaagaccgacgccgagatcatggctgccttcaagaacggtcaggacctgaccgtcgaggagtacctctacgctgccgagtcgctggccaacggcgccgaggagcaggttgccatcctgaccgtcgcttcgaagaagttcaacgacgcccgcgtatacaacaacctcggtatcgctcaggccaaggccggtgacaaagccgctgcgctgaagtcgttcgagaaggccgccaagaccgactcgtcgagcgagatcaacaagaacctcatcctcgctaatctggctaacggcaacaccgccgaggccaagaagtacgcgcaggctgccgacgctcaggccaaggccgctatcgcagctgccgagggtgattacaagagtgccgccaagaacctcgacggttacaacgaggctgtcgctcaggttatgaacaacgacctgtcggctgccaagaaggctatcgccaaggacaactcggctgacgccgactacctgcgcgcagtgatcgccgctaaagagggcgacctgaagaccgctgaggctcagctgaagagcgccgtttcgaagaacccgaaactggctcagaaggctgccaacgacatcaacctgaaggcgctgaacaaataatcgccgtcagaataagagaaaagggtctgggccatcggttcaggccctttttttgcaggataccgggaaaatatttgtagaccgaagatagcgggtgtgaattatttttcctaattttgtaaaaaacagggatacattatggagtacgccaatcatctgaatgaatacgctccggcatggagcgaagcgcaggtggccgaagaggtcgcccgcatccgcgaagccgcgaagcgcaatcataatgcggaagtatataaaatgtgttactcggccatcgacatcacgaccctgtcgtgcaacgactcggtgacctcggtaaccgagttcgcccgcaagacggccgaattctaccagaaatttccgcatattcccaacgtggcttcgatctgcatctatccggcattcgtcgagaccgtcgggttggccgtggacggtaccccgatgaagatcacgagcgtcggcggcggatttcccgcggcgcagaccttcctcgaagtaaaggcgctcgaagtggcgatggccatcgagaacggcgccgacgaggtggatatcgtactcaacgtgggccgcatgcttacgggagaatacgacgaggcggcaaatgaggtcgaggtgatccgctcggagatggacgccgacgtcgtgctgaaggtcatcatcgaatcgggggcgctcaaaacacccgatctgatccgcaaggcatcgctgctttcgatgttcgcaggagccgatttcgtaaagacctcgaccggaaagatcgacgtggccgcaacgcccgaagcggccgtggtcatgtgtcaggcgatccgcgactactaccagaagacgggccgcaaggtgggattcaaggccgcaggaggcgtccgcacggccgaggacgccgccctttactatacgatcgtcgaggagattctcggcccggaatggctcaatacggatatgttccgcatcggcgcctcttctgccgcgaacaacctcctttcggctatcgaaggcagggagatcaagtattactgatcgcccgcaagggctatcgaggtatgcagcagtccggattcggactgctgcttttcgttgggtcgccggccggccgagaatccggttgtccggaacactctgccggaaaaccaaacggtttgccgggcaacttgttttgccgggcaaccggattgccggaaaaaggccgcggccttacaatatccgcgtccctgaatcgtcggcataagttaagaaaggctgcaacgggacggcggcgggaaggcgaccagaaggtggcggaatgacaaccggaaagcggcggggaagcaaccggaagacgacggaaaggcaaccggaagtcacaggaaaagcaagcggggcggcggtggaaaggcaatgggaaagcaaccagaaggtgtcggaatgacaaccggaaagcggcgggaaaacacccggaaggcgacggaaaaacgaccggaaagcggcaggaaggagcggcggctcttcggaaatgaaaaatcccggctgcagtcgcagccggaacttctaatgcaaacggaggatagtacggaggctgcgtacaaaccgggattgtctgattctgtatattaaacgcagaaaagcttcgaatactgcacgataaagagaaagattcgtgcgaacggcggcatatgcatgcaaacggacggcggcccgaaagagccgccgtccgtttttcgatctgccggacatccgtttccgggccgctgtccgacaaagtttccggcttaccgaagcgaatcgatcacttcgacggatacggaatccgtcgtctccgtttcgccgggggcaagcgccgcaggctgttgtgacgcgaccggttccggataagtctggtcctcgatttcgtcgcgcagtaccatcgactggaaattgtcgcgccggatagccgcaatgacgatgatgacgatcacggcagttgccacaataataccgataagctttttaatcattttctcgtgtctcgtttaatatcccgaccgcgcgtactatcacgttgtccacgggatagatgttggcgtaaaatccgttgtcctccagtgccgtattgcggccgatgtaggccctgagctgggcttcgatcagtttgcgcgaacgggcgatgtcgcggtaattcggagctacgccctgacgcgccgcatagcggatgaagtcctcgaccagaccccggtcgccgtcgagcagggcctgcagttcgggaatcgtcttcacggcgttgagcgcctcgcggtgacggtcggcgtactcgatcgtgtagcggtagaggatgttgcgccccgccacctcgacgaagtatttcgtcacgtcggtcgtgtcggccggcacgaagacgtcgggcatgatgccgccgccgccgtaaaccaccttgccgccgggcgtcgtccgtttgagcgagtcggcgaagtggatgctgtcggccgagaaaaactcgttgttccggtagcggttccaaatgtcctcctcgtagctttcgtcgtcgccgattgtatagggcttctggatcgagcggcccgtgggcgtgtaataacgtgccgtcgtaagccgcagggccgatccgtcgctgtaaggtatctgacgctgtacgagtccctttccgaacgaacgacgtccaacaatcgtaccacggtcgttgtcctgcaaggctcccgcgaggatttcgctcgaagaggcgctcccctcgtcgatcagtaccacgacgtccatgtcctgcgccgaaccggtgccgtcggcatattcgcgctgttgctggtgatggcggtcctcggtatagacgatcagctgctccttgtgcaggaattcgttggcgaccagaatcgcctgatcgagatagccgcccgaattgcccctgaggtcgaagatcagtttggtgacgccttccgcccgcagcgaagccagcgcctgctccatctccgcggaggtggtgcgggcgaactgccccagtttgatgtaaccgatgccgtcggcgatgcggaatgccgattcgatgctcttgatcggaatcttgtcgcgtacgacatcgacgccgaccagctcgccgattccctgccgtccgagtccgaggtgcactgtcgtgccgcgcggaccgcgcagtttcttcaccacgtcgcgctgcggaatcttctgtcccgccacgagcgagtcgttgatctcgatgatgcggtcgccggccttgattccggccttgtcgctcggtccctgcgggatgacgttcagcacgatcaccgtgtcggtggccatgttgaagaccacgccgatgccgtcgaactcgccctccagcggttcgttcagctgctgcatctcggcagccggaatgtagaccgaatgcggatccagctccttgaccagcagcggtatgacatgttcggccagcgaatccatcgccaccgaatcgacatactggttctcgatcagcgagagcgtgtaagtcagtttgttggtcggcagggccatctgccggagcatgcctttgatctgcgaagtggtgctgttgcggcccatgtactgtcccagcaacaggcccaatacgacgcccgctgccagcagcagcgggaagaggatggtgtatttcgaatttttgtacattgtcggtcacccgacgcacggcacgccgccgtcgggctgtaaattatttgttcttaaaggtataggtcagtccgacgctcagcaacgtacgggtctgcacatcgacgttctgcgcccggttgtaatagagctggaaacttaacgtcgtggagaggtattttgttgccttgatgtcgagcgtattttcccagcgtgcgatcggatggatcggcagccggggcttgtccttgatgtctttattggctgtcttgtcccattcttcgtaggcatggcggaacttcgtgtagtcgctgatcttgttcttctggccgatatcggtgatccagccgtagaaggagtagagcgtcgtgcggtagcgcaggaatcccgttttgccgaacgtgcggtcgaagtcgatctggatcgaggagccgccttcgtatttcgacgtcttgtcgggatcttcgataccgtagttgtatgccggctttatctcagtctctgtctttttgccttcgctgtctactctttcttccacctgccgtctgcggatccagtcgttttcggcaaaggtggcgttcagggcgatcggcgagaggttgatcacgatcgggaatttgggtttggggcttttgtaggtgataccgagcgagatgtcgaggtaacccggagtcatgaacttgctcttgaggtgctcctttttctgctccgtgcgcgatttatagccgttgacgaactggctgcggaagttcaggatcgaaccgtaggaccagttttcggacatcttgaacgacggggcgaccgagaccacgaattcgtcctgattcttgaaccagacgccctcgctgtccataatcttgttgccgctgtcgtcgaccatcggattgccgtcggcatcgagacgctgcgtctccaccttcatccggttatagcccagcttggcactgaacttggtttcgatggtgaaaagattcttggtgaaaacatggcgcaggccgatcaccgccgtaagcgcgatggagttgtcaccgcccgacaccgagatccaagggtcgttgtacgaggtaagcgcgccctgcaccccgctgttgaattcgaggtagttgcgctccttgcggatcgcggcgcgctcggccttgtaacgggcgcggctgaaataatcgacatctacgggtatggatttcagtttgtcctgaaaagtcacgctctcctccccggcatcgacttcgtcgacggaaatctgggcagagacggtgcggccgatcagaagagccggaataagcgtcaatatgagataaaaaggtttcatagtgaagtatttatatctggaaaattacactgcaaatttatgaaattatttacaaaaaccttaactttgtcttaagttaatataaagatactcacatgaaatatatcggagcacacgtaagcgcttcgggaggtgtggagaacgcccccgccaatgcgcacaagataggggctacggccttcgcgcttttcaccaaaaaccagcggcagtggggcgccgcgccgctgacggcggcgcagatcgactctttccgcaaagtctgcgacttgtacggctacctcccggcccagatcctgccacacgattcgtacctgatcaacctcggacatcctgagcgcgacgggctggaaaagtcgcgcgcggcgtttctcgacgagatgcagcgctgcgagcagctgggactggaccgtctgaacttccaccccggaagccacctgcagaagattgcgcccgaagagtcgctcgaccggatcgccgagtcgatcaacatcgcgctggacaagacgcacggtgtgacggccgtaatcgaaaatacggcgggacagggttccaatctgggcttcgccttcgaacagctggcctacctgatcgaccgcgtggaggacaagtcgcgcgtgggcgtctgcatcgacacctgccacgctttcgccgcaggttacgacctgcgtacggccgaggcgtgcgagaggacgttcgcggagctggacagcatcgtggggttcgaatacctgaaaggcatgcacctgaacgacgccatgaagatattgggcagccgtgtggaccgtcatacgccgctgggcgaaggcatgatcggcatggagtgtttccgctacatcatgcaggacgcgcgtttcgacggcattccgctgatcctcgaaacgcccgacgaagagcgctggccggaggagatcgccatgctcaaggcgttcgccgaagaaaaataacgcccggcggagcgggtatcgcgccggaaacagctttgcacccgaaaatgaaaaagagggccttccggccctctttcttattgtgttttccggcgcaatcatgtcccgccggatgtcttggcagcctgttccggctaccgcagctggtcgagacactcccggataagcgcggcgctttcgcgcacctcctcttcggagatcgtcagcggaggcgagatgcggaacgccgtgtcgcagaacaggaaccagtcgctcaggattccggcatccttgaacagttccatcgtgcgatacagtttcgccgactcccccaactcgacggccatcagcaggccgctgcggcggatttcgcgcacggcgggatgactccccagcagcgtttcgtacagcgcgcccttggcttcggcctgctccacgaccttgttgtccagcaggtaattcaacgccgccagccccgccgcacaacagaccgggtgtccgccgaaggtggtgatatgtcccagaaccggatcggtttgcagcgtatccatgatttcgcgccgcgccacgaacgcccccagcggcatgccgccgccgaacgccttggccaagcatacgatatcgggcgtaacgccgtatttgagcatggcgaacagttcgcccgtgcggcccatgccggtctgtatctcgtcgaagaccagcagggcgcccacctcgtcgcaccgccgccgcagggcttccagatagcccggtgcgggcgtccggacgcccgcttcgccctgcacgggttcggccagcacgcaggccgtgcgccgcgtgatgcggttcagcgcgtcgaaatcgttgaattcgatcgcctgcacgtcgggcagcaggggccggaaagcccctttccactcctcgccttcgggcgcccccatcatgctcatcgaaccgtgggtcgaaccgtggtaggcgcggcacatggagatcagctccgtgcggcccgtgaaacgcttggccagcttcaaagcgccctcgaccgcttcggcccccgaattgacgaaatagacgctttcgagttctccgggcagcagcgacgcgagcttcgaggcatattccacctgcggcgtctcgaccagctcgccgtagaccatcacgtgcatatagcgcgccgtctgctcctgcacggcccgcaccacggcgggattgcagtgaccgacgttgctcaccgagacgcccgccaccaagtcgtagtaacgcttgccttcgggcgtgtagaaaaacgtcccttcggcgcgttcgacttcgacgagcatcggcgacggcgaagtctggcccacgtgagccagaaattgtttgcgtaaaatggtattcattgtcaatctttgaatttccgctgcaatatcgcgtccgcatccttcacgctgcggcgcatccagccgaagagggtctcggcttgctgcgcgtcggtcatgcgccactccccgaccgtgagccgcatccgctcggagagcatgtagatcaggatcgcggccgacgccgaaacattcaggctctcgaccatgccgcacatcgggatgcgcaggaattcgtcggctccggcgatcacctcgtccgagattccggcgtgttcggtgccgaaaaccagtgcgaaaggccctgcggcgacgtcgaacgtttcgggcgtcacgtcttcgcggtggggcgtcgtcgcaacgatgcggtatcccgcactgcgcagtgcggcgagggcttctcccgtcgagggatgacgccggacatcgacccattggtcggtgccgcgcacgatgtcgggattgggttcgaagcggcacagcgtctcgacggtgtgcatctcctgcacgccgaacgcctcgcagtggcggatcagggcggcggcgttctgcccgtgatacatattctcggccagcacggtcatgtagcgcgtacgcatggcgaccgtgcggcggagtacttcataacgctcggaggtcgtgaactccgcaaggcaggcgatacgttcggcataccattcagcacccttatttgcggtatttttcatcttcgtcgagtattttgaggtaactttcgtagcggggataggcgatttgcccccgttcgacggcttcgaccaccgcacatcccggttcgtgggtgtgggtacagttgtaaaaccggcagtcgggggccgtgcgcatcatttcggggaagtaatgccacaattcggcatcgtcgatgtcgatcagcccgaagcccttgatgcccggtgtgtcgatcaccgcaccgccttcggccagcggatacatcgtcgaaaaggtcgtcgtgtgccgtcccttgtggtggctttcggagatttcgcccgtacggatgtccagcgaggggtcgatggcgcggatgagcgtcgattttccgacgcccgaattgcccgaaacgagggtcgtacgccctttgagcagctcgtgtaccgcaccgacaccttcgcccgtggcggaggaaacctccatgacgcggtagccggcgctttcgtacacggcatgaaagtctgcgacggcctgcgggtcctgcaggtcgattttcgaaagcaggatcgtgacgggcaccttataggcttcgcaggttaccagaaaccggtccacgaactccgtggcggtttcaggagaacgcagcgtcgccatcagcagagcctgatcgacgttggccgcgatgatatgcgactccttcgagagattcgacgcccggcggatgacgtagttgcggcggggcgaaatgtcgcagatgacgtaatcgccccctgcgtcggcctcgcaggtcacttcgtcgcccaccacgaccggattggtcgaacgtacgccccgcagccgcagccggccccggatacggcagcggacgaccgcgccgtcgtgcaggacgtcgtaccagcttccggtggcgcgcaccactgttccggtaaatcggttttccatcggctaatcctcgttttgttcctgcggcacctgttcgccgacccattccaagaagggaaaaacggcttcggacaggcgcatgacgggcttgtaactcttcgatttctcgatcgtctgcgggccgacgagcgtataatcctcgttgagcgaatcgaacgccgagaacaatacgctcagcaccagcatgtatttcagcaccgacaccgcgatgcccagcacgatgtcgggaatcccgaatcccgcgaagtgaaacaacttgcgtaccagccgtccggcaacggccaccagaagaatcacggccagcaggaccacgacgaatccgccggctgcggataccgtctcgtccagcttcagccactccccgacataaacgccgtaacgtgaagcaagccagatgcctgcgacgattccggccagcgaacatatctgcatgacaaagccttggcgccagccgttccatacggccagtgccagaataaggcagacgatcaaatcgattgtattcacaaacagcgggttcttatttcatttggttggtaaatatacgacaatttacctaaatagcctaaaaaaagaactcttcctacaacggtgcagaaatatataatataggtatatccctgttaccgaataacatccctcaagctcacattcaacgcgttacatataatacacatcgttttgaccgtaaggttcgtgcgtcccgcttcgatacggctcaaattggatctttccatgtcgcaacggtatgcgagttcctgtaccgtcagacgtctctccctcctcaactctctgatcctggaggagatataggatacctcctcctcataaacaactcccatttcaaaaatttggataaaaattttgttgtgcaaatttttatatatatatttgcaccatgcgtatcatatatgataccatgatttatccgatattactgaaaactaatgcgtcacacatataataaagaatgcgtcactttattgataattaacgtgcaacacggtctgcagagtctgcgtcactctgcaaaaaatgtgcccgtaaccgaaagagaatagatacgtcactctattgataactaatgcgtcaacacaaaaaacaattccatttcaattcttcattactatgaaaaaaaacttattcagaaaatttcttgcactgttcttaaccggaacaatgttagccggtgtcggttgtaaagactacgacgacgacatcgacgacctgaagggtcagatcaacgacttgaagggtcaagtcgagttgaaggccgacgcttcagccctcaaagctgttaccgacaaattaaacgggatagatttctcgtctttcgttaccaacagcggtctccagacagagcttgacaaaaggctggcagactatgccaagaagtcggatctgaaagattggctgactagcgatgaggtgttgaaacttattaaggctcagggatatcagaccaaggctgacgttcagaaactgatcgaagaggctaccaagaatcagctgactgccgacgatgtcaagaagattttcgagacgatgatcgcttcggacgagaccatgggtaaactgcaggccgaaatgcagaagatcatccagcaggctctggtcgacggcaagtacgttaccgagcagcagatgaaggatttcgtcgagggtaaaggttacatcaccggtgccgatcagctgtcggcgactcagatcaaccagatccttaccgctgtcgccaattccgtatcttcggagacggctacggtcaccgatgccatcaagaaggtcctcggcgacaacttcgcttcgtacatggctgagtacatgaatgacgagacggtcaaagccgaaatgggcaagaccatcaccgatacgatcctcaaggagctgaccgatgccaacgtaactctgaaagaggctatcgaggcgatgatcgaggagggtgtaaacagcaagctgttcaaccccgacggcagcgcaatctacctgaaagaagccgatctgaaggatcgtttcgacaattacgacacgcagctccgcaatctctggagcgctatcgcagacctcgccggccgcatccagtcgctggtttacgttccgacttcgctcgaagaggtatcgaacaatgtcatttccatcaagggacttccctatatcgcgatggttgacggtgaaggtgaggactacaagttctatctgggcagcgacgaaggcggcaacgaggccgcgatcgaagctactttcatggtttcgcctgcggctctggcagtcaagatgaccaaggagaacgtatcgttcgtaacggaggagatcaagacgcgcagcgctgcgtcgttcgaggttgtagacgtgatcgatcaggacgtcgtgaccggtaagtttaccgttgtcgccaagactcagtacgagtacggaaacggcaaaacgctggccattgcgctgaatgtgaaactcgcaggcaccggtgtcgccggagctacgcccgaagatgccatttcgggcgaggatttgggcagcgatttcaccagtgcctttatcggtacgcagtataatgcaggcggcgcgatcaacaccgatctggttgccggccgtatgaaagaggacggaaacctcgaactggtagttgacaacgatacccagttcccggaattcgagggcgacggcggtctgaagtataacgacgaggaaaccgtcgttgagttcttccatgatgtgaagatttactacatgaaagacggcaaaccgcaggagcttgccgcaatctggggcgaggatgttcccgttctcaagaccgttgttcctgaagacgacgccgtagcgacggttgatcccgaaactaacaaggacagctatacgcttacggcaaccacggcggcgatcaaaaagggcaagggtgttccggctctgatcgacgacgtgattacctcggaaccgttctcgttcgacctcgtatcgggcgaatacacctgccgcgtggttaagaacgccaaatcgcagttcaccatcatcaaggacaacaccgacgtcatcgtttccgagccgcagacggtaacgtggaactatgcaacggttagtgccggcgacgattacgaggctgtggattacctgctgaatcccgatcccacgaagcctcagatcggccacgtgatttacaacgcactgaaggctggatccttcgaggatatccagatcttcgacggcgagaccgaaatgaccgacgaactgccgttcgatgtcgctgacattatccttactagctctcctgctgacgatcgtgcagagcagcatctggaacttgtcgtagccggcaacagtgcaatgacgagcggttcttacacggtcaaagcacgttacaactatgagaacaccgatattacgattactctgcccgtcgttatcgagggtatgcctgagatcacgatggctccggagaccgtaacggtggattacttggcgggaacgagcgaatacacggtgatcgagacgtatgccgagaaactctggaataaggattgggctccgaagtacttcgccgacaagcagacgttcgtagatgcgatctatgccgctaccttcgaggctactgccgatgaagcggaagatggaaccgaactcgtgcaggcgaccgacgatgcaaagaacatcgctatcaagctcggcaccggagcaaaggagaagagctacgaactcacggctaaacttactgccgactggggtctcgatgtaacggttgccgttacggttaatttcgaaggctttgcaggcgagctggtacagggcgacaactatgcgaatccggtgcgtctgaacgcaaaacttacgacgacggcttatgtgcccgatggacttaacctcgacaacacttgggttgcacccaaagattccaagggcaatgaaatcggaaaggttgtcttctcggtagacgccaaagagtacaaaggcgcttcggtagacgccgacgccaagaccctgacgtggggtactgagtacaagggcctgaacatggcgctcagcgtaaaactgatgctcgattcttatgttcttgacgagcaggagcttaatgtcgagattcccgacccgatcaaggataagacgatcagcctgcgtaagaatgccgttactacgatctccgcgagcgctgacgatgcttccctgactgtgggcgatctcctccagctggcgaatatcaacggcaacaacgtgttcgaggctgcggctgccgatgagaatacggttctcggagtcgttgtcaagtacgaggtgatgaatccggaggttctcgttgaccgaattgatactggggccgatttcgcaaccaccggtacgattacggtcaagggtaatgccgacagcgaattcgtaggcgagaagacggtcaaggtgaaagttaccgtatcctatgattacggcacggcacgcgttcacaatcttgatatcaaggttaagcagaaagccaactaaaaagaatcccccttttccgcgaaatccggcgccgtccttcgggacggtgccgggagcgcgggaaatcaaatccctaaagcaggaacggcacatcccaaagttttttggttaacaactcccacttttaagtaacattcctgcttgcggcagaccgaagaggcgcggtctgccgctttttttatcgttccggccgttgctgcaatccgtcggaccggatgcgataagctgttgccggatcgggtgcctttgtcccgacttatatgaaaaatcagccgcagtattgactgcggctgatttgatttgagtctattttccggcatttcccggcatttcccggcctccttctccggcattccggtatttccggtatttcccggaggttcttcccttgttccccggtatttttctgcgtgttcccggtggtttccggtatttcccggcgtatctccggcattttcctgcgtgtttccggcgttccccgttgctcctctcctgccgttccgtccggcggcgcagatgccatgcgggcttatgggcgtgtttgcggggctgtctggctgcgtttcatgcgtcagccttccgcgtccctcatcgtaaccccggagggcgtgaaagacccctgaatccgtttttctgcaatacggacagcgccgcgtcgtcggtgctgatttcgggcgggatttcgcgggcgtttcgtgcgcgggcgtattagacgccgcgccccgacaaagcctgtccggcgcttcctcccccccccgtgttgcggcggtttcagccttattttgccttggcggctttggcggccaccgcctgatccagctcgatgatgaagtccgaaaggacgttcatgtagttgatgaaggcgtcgtatgccgagtcgtacgggttgaagtaggagtgtacgtcgccgtccgagagccatttggtcgccatgtagtagaagtggtccgaggtctgcatgaaactccatacatagtcgaaatcggggcttttcagggcggcgaccttctctttctgggcgtagagtttcgagaaagcctcgttctgcaactcgttgccgagccacgccgtcacgtcacgctcctcgtcggcccacgacattacgtgcggacagtggagtacggacaccggctggtacttcttggcggcctcgcttacggtggcgaactccatgtcgttcttcttggcgaggatcgctttggggagcgcccgcatgaattcgaagattcccgtatccgcagtctgatgctccccgaacgtctcgtagtccatgaagaggttgatgacctcgcccggcgtttcgtccgaagagagccatttgacgtatttgtccgccgtcagcggccattcgtcccagctgcgattcgagaaacggaacgcaatgtcgtccgagagcttgtagttgcgcagcagcaggcgcagtttctgattgatggcgttggcatagacgtagttaggcgatttccagcccagcacgtgcttggcgccttcggccagcatcgtgcggaagcccatgtcggcgaccatggcgccgatctcgtcggagtagatcagctcggtgttgcggaaggcggtgggcttcacgccgaattccttcttgatcatcgccgtatggagcttcacctgttcggtgaaatcctctttcgacgccagcgatgccagcgaatgggagtaggtttcggccagaaattcgacgcatcccgtggcggccagctccttgaacgagtcgagcacctcaggcgcgaaggcgcggaactgctcgacggcgatgcccgtgatcgagaacgaacagcggaatttacccttgttctccttgatcaacttcagcagcagggcgttcatgggcaggtaacactgccgggcgactttctgcatgatcgagcggttcaggaggtcgtctaggtagttgtggtccttgcccatgttgaagaagcggtacttcttcagtcgccaaggctggtgtacctgaaaatataagcagacggttttcatagggtatctgtatttttattgttttttgttctcttcaatgaccgcttcgtatacggctttgatcttcgccgcggcgtcgttccacttgaggttggtgacctcttcgagtcctttcgacgcgaacatgcccgacagggccgggtattggatgaggccgtagatggcgtcggccagcgcgtccacgtcccagtaatcgaccttcacggcgaagtcgagcacttcggccacgccgctctgtttggagatgatcaccggcacgttcgagcgcatcgcttcgaggggcgagatgccgaaaggttccgagaccgacggcatgacgtatacgtccgacagctggaacatcttgtgtacgtcctcgccgcgcaggaaccccgtgaagtggaagcggtcggcgatgcccagccgcgccacgcggcggatgacgtggttcatcatgtcgcccgaaccggccatcacgaagcgtacgtcgggtacgcgcttgagcactttggcggccgcctcgacgaagtagtcgggacctttctggtaggtgatgcgtccgaggaaggtgacgatcttgtccttcacgccgcgttcgggcattttgcaggggccgccggcgaagcgcacggcgttgtgcaccgtcacgaccttttcggccggaacgccgtagcggttgatgacgatgttgcgggtaaggttcgaaacggcgatcacgcggtccgcggcgtgcatgcccgcacgctcgatggcgtagacctgcgtattgacgttctcgccgctgcggtcgtattccgtggcgtgcatgtgcacgacgagcggcttgcccgacacgcgcttggcggcgatgccggcgtagtaggtgagccagtcgtgggcgtggatcacgtcgaactgcccttcgaggtccttggcgacctgcgcggccaccacggcgtaacgggccacctcctccatgaggttggcgccgtactttcctgaaaaggtgtaacgctgtttccatgcgtcggtcgtggaccagacctgctgacccgattttacatagcgttcgtggtagacctcgtactcttcgggggaaatgtagggcaccatgttcgagtcgatgtggatgaacgacattttttcgagaatgtcgtcggctccgctcccggtcgaaccatagagagcctccacgtcgctggcgttcattacgtgcgtgaaacgctgatcttcatcgccgtaagcgtggggaaccacgaacgtgacgtctacgtcgttgcgcgccagaccgcgcgtcatgccgtagcacgccgttccaagaccgcccgcgatgtggggcgggaactcccaaccgaacattaaaactctcatatcttaattcttttcattttgttgcctttatttctttgcggcttttcctgccgctgctttcggcgccgcctttttcgccgcggccttgggggccttcgccgcggccggacttttggcggcggcctttaccgtcttcccggcgcttttcgccgcgggcttcgtcttcgccggctttttctctttcggaccgttcgttctgccgcctttcttcgcggctttgggcgcttgggaatcccctttgctccgctcgcggatcatgcggtggatgtccagtgcggctccgacgctccacgcctgcgaaatggctccgcgcgaagcgtagggcgggtcggcgtcgtacagctcgcagatcgagccgatgccgtaacgctggatgtcctcgtcgaagttttccagcgcctcctcggcctgcggcaggaatgcgtcgccgtcgatgtcgaagcaggccttgatgtagaagggcagcagccacggccataccgagccgtttttggcggcgaagtcgcgttcggcgggcatgccctcctgcgaacccctgtaaagcgggttttggggtgacagcgtccgcagtcccttcggggtgagcaggtgctggcgcaccgtgcggatcacctccagctgcatcgtctcgtcgagcatcttgtaattcagtccgcaggcgacgatcatgttggggcgcgtcgatttgtcgggaccgctgccgtccacgaagtcggccagatagccttccggcaggcggaacagttcgatgaacgactcctgcgtgcgtgccggaagcggggtccactccttgacgaaggccttgtccgtcttgtctccgtatttgccggccagttcgagcgcatagcatacggcgttgtaccacaaggcgttcacttcgacctgatagccgttgcgcggggtcacggggcgtccgtcgatcgtcgaattcatccacgtcaggggcacctcttccgatgaagcccatatcagcccgttgtcgtgcagcgccacgcggccgccgattccctgccggtagctctccagtatgtctttcatggccgggccgtagctcgcccatatctccttggcccccacctcgcgttcgagctgctggagggtccagaaaaaccagaggggagcgtccgccgcgacttcggccgaggcgctgccggtgaacatgccgtcgcgcatctcccgcaccagcgtatccagcgcgtcgatgcagtcctccttgtgtccctgttcgagcgtgatgcccggcagcgagatgaaggtctggcggcccgaaaccccgtgccacggatatcccgacaccacttcggtccggtcgcccggacggcggatcaggaactgccgcgccgagtgttcgaggcagctgatgaagtcgatcttatgcgtacgccgcgcgatggatgcggcgaaaacctcttcgatggtcttggtcgagcccatttcgtcgagcgacgccgagaagatgatgctctcgcccttcttgagctccgcttcgaaatagcccgtcgtgagcaggtcttcgtacccttcgtatccgcgggccagctcctgctggtattcgaatccgtaataccagtcgggcgcgggcacgaactccgtgccgggtttgctcgtctggagatagagccacgggaacgagttgtagagacgacacttcacgccgttcacggcggggtaggagtgtccgtcggcctccatgttggcgtgcgtcagcgcatgcttgtcgcggaaggcgaggaacggcctcagccgcagccgggtctcggagtgggcgtccacgagcgtgtagcggatcatcagctgcgtccgcttgtggatccagagcatctcctttttgagtattacgccgcccacgcggtaggtgatcgtcggcgtcggcgtatactcgaaatcggtgatatacttgtgcccgcgcggctcgtatacccccttgaaacggtgcagcgccagattgaacgtctggtcgtgctgcaccacggtctcgtcgagcgacgagagcaggacgtaggtccggccgctgtcatcgatgggagccaccatcagtccgtgatagcggcgggtgttgcagcagacgatcgtcgtactcatgtagccgccgatacggtccgtcgagagcatttcgcgctggagggagtactccagattgcccaattcgcttttgtcgaaagtaagtgctgacatatctttcttaaaaatgcagttcgtcctataaagatattaaaattttcagataaataatacccgataacagtaaattaataccttttttaacattattcacgccaaatttgctaagcccactttaccaatgcaaaatccatgcggtgcggcaggtggggattgtagggatagagacgcagcgccacgtcgaacgtgccggcctcgccgggaacgtaatccagcgcataggtcacgcggctgccgtcggttttggtgtgtttcagcccgatggtgcgggttacgttcaccttgccgccgccgacgatctgctgggcgatgaccatctcgacgccgatatcctcaggccggaggttggcgatgtccaccgtcacttcgaagtggtacttctcgccgacgaagatcgcctcgtcgtcgatcctcacgcgctggacgtcgatcacgcggaccttgtcccatgcggccgaaaccttgcgcttccacgccgcgatctcgcgggccagcttgtagccgccttcgacgatttcgcgcttgcgggccgcgagcttgttgtagaaccgctcctcgtaatcccccagcatgcggttggtcgtgaagttcgacgcgatgtcggcgacgcactttttgaccgaatccacccactggtgaggaatgccgtcgctgccgcggtcgtagtatttcggcacgatctgctcttcgatggtgttgtaaatcatctcggcgtcgagttcgtcctgatagccctgatcggcgaacgtgcgttccatgggcagcatccatcccgcgccctccttgtagccttcgacccaccatccgtcgagtaccgagaactggagcacgccgttcatgacgcacttctcgcccgacgtacccgacgcttcgagcggacgggtcggggtgttgagccacacgtccacgccctgcaccatgcggcgggccagctccatgtcgtaattctgcaggaagaggatcttgcccacgaactgcggcatggcggccacctcgacgatgcgtttgatgaggtcctgacccggcttgtcgttggggtgcgccttgcccgcgaagatgaactgcacgggacgctccttgttgttgacgatcgccgacagccggtcgaggttggtgaacagcaggtaggcgcgcttgtaggtggcgaagcggcgggcgaaaccgatggtcagcacgtcgggcttgatgccctcgatgatctgaatcatctggcgcggcgagtcgagacgcacctgattggggtcgctgtagcggcggcggatatgctttacgagcttgttcttgagatacatgcgctcgttccacagctcctcgtcgggaatctggtggaccttctgccatgccgggatgtcgtaggtatgcccctcgaatccgtcggcgaaatagcgggcgtacaggcggcgcatgctggtcgcgatccacgtcgggaagtgcacgccgttggtgacgtacccgatatgaagctcgtttttgaagtagcccggccacatgctgcccagaatatccttcgacacctcgccgtggagccacgacacgccgttcacctcctgcgagaggttgcaggccagcaccgacatcgagaacttctcgttggggtcgttggggttggtcttgccgaggttgatatactgttcccacgtgattcccagcacgtcgggatagtgcgacatgtactggcggatcatcgattcggggaatgcgtcgtggcctgcgggaaccggcgtatgggtcgtgaagagcgacgacgagcggatcacctccagcgcctccgagaaggagagcttcttgtgggtcaccagatcgcggatgcgctcgatgccgatgaatgcggcgtgtccctcgttgcagtggaatacgtcgtgtttgatgcccagcttgcgcagcgcgcggataccgccgatgccgagcaggatctcctgcttgagccggttctcccagtcgccgccgtagaggtggtgcgtaatctgccggtcctcttcgaggttggcctcgaagtccgcgtcgagcaggtagaggtccgtgcgtcccacctgacatttccagacgcgcgcccagagcgtacgtccggggaaggcgatggtgaccgtcatccagttgccggcttcgtcgcgcacgggcgagatcggcagcttgtagaagttctgcgcttcgtaggtcgcctcctgcgcgccctgcgacgagagccgctgcgtgaagtagccgtaacggtacagcaggcccacggccgccatcggaacgttcttgtccgacgcctccttgaggtagtcgccggccagaatgcccagaccgccggagtaaatcttgagcgacgaatgcaggccgtactccatcgagaagtaggagatcgaggtcgccttcggatcgggtttctcgttcatgtagtcgcggaactgcgcatatacggcgtcgagctggctgaggaaattcgtatcctgttcaagctccttcatgcgctccacgctcattttgtcgaggaatgcgatcggattgcgttcgcactcggcccacaacgcatggtcgatgctttcgaacaggtcgcgcgtgccgggattccagcaccaccagaggttgcgcgacagctcttcgagggcgtgcagccgtttgggcagggtcttgtccaccatcatgcggttccagttgggcttctcggcgaaaagctgctggcgcacgaagttgatctgctcgttgcggtttccgccctcgtccagcacggcgcggttggtgcggatgaccgaactttcgacagcctcggagtaagcctgctcgtaggcggcgaagaggtgttcccaaagcgccgtttcggagatttcgtaggccgacacgcgcatctcgttcacgtgcttgtcgtccagcaggctgaagtgcagcagcgactcggcgatcttctcttcgacctcctgatcgttgtagtcgtcgcgcagaacgatctccacgcccgcatgctcgcgctgtttggccgcccagagaccgaatccggccagcgtcgtggtgatcgtcggcacggagaaggccaccgattcgagcggcgtgtatccccacggttcgtagtaggaggggaatacggtcatgtccatgccgaccagcagttcgtagtaatccttgccgaagatgccgtcggccttgttgaggtaggtcggaacgaagatcaccttcaccttcgaatcgggcgtggtcagaatgctgccgttgagggcgttaacgatcgggtcgctgctctggtattcgaggtagtgggtcgtgtatttgtactgcccgccgtcgatgggtttcgacgggtcggccagatgcgcctgcaggtccgcgcgcggaccgcggttggcggcgggcacggtgatgtaggccagcacctgacgtttgagccggggcgatgcggccagtttcttgagcgattcgatgaatacgtcgatgcccttgttgcggaattcgtagcgtccgctggtgccgatgatcagcggctcctcggcgaacttttcgcccagacacgcttcggccaccgagatcatcgttttgcgggcttcggcgcgcttcgcgtcgtactcctcgccggtccagacgaagtcgttttcgaagccgttgggcgtgatgcagtcaggctcgcggcccagcaggaatttgcactcgttggccgtgatgtcgctgaccgtgacgaatgcgtcgtggtaggcagcggcggccttctcgatcgagtgtttggccacgacgttgaactggcgtgccagctcgtcggcgttgaacttggtcaggtcggtgtagagcggcaggtggttgcctgcgatgcagcggcccatgaccgtggcgtgcgtggtgaagagcgtcgccacataaggtgcgtggcggcgcaggtagagaccgcccgccgcggtcatccattcgtggaaatgggcggcgatcttgtcggtcgcggtgcagaagttctcgacataggaggcgatcaccgcgcctgcggcgtagccgaagagcacgggctcgatgtagtcccactgacccgaaatcgaatcgacgtggtaggcctcccagagtttcttgagtatttcgtccttgcggggaatcagcgaggtgaagtccaccagtatcgccgtcggttcgcccttgattttccagtgtcccacgcggatgcggatgccttcggcgtaaagcccctgacgccatgtcttcagcaggttgggatcctcctcgaattcggggtttacgccttcgtgctgcaggtcgggtccgatgaggatatagcgctcgttgaatttccggatggccgtttgcgctttggtcgagactaccgtatggatgccgccgattttgttgcagacctcccaacttacctcgaacaggtaatcgggggttagttttgcattgctcatatttgtgatgcttgtttgtaatttacttgtcgaatcggttgaaaaccggtgcaaaggtaatacttatatttatattaacaatctcgaaagggtaattagtaaaaaaatttaagaataacttaacatttcagtttcacttggttgcgcgcgtcgttatgtttcgaaaagggcctcgatcacggcgtccgagatcagaaaccgctccgggggaaccgccagccgtccgcctgcgtcgcggagcgcgccgctttgcagatagggggccgcctcttcgcgcatccgctccagccgtttcgtgccgaaacgggccgcgacctcccgcgtgtcgattccttcggcggttcggagcgccgtcatgacgtactcgttgaaacggtccctgttcgtgaggagttcgcgttccgccggatcgcccgcgatgtaccgctccaccgaacctacgttccagtgccgctcctcgccgtcgaacgagtgcgccgccggaccgatgccgaggtacttcgcgccgtgccagtacgccgcgttgtggcgggcgcggaagcccggaagggcgaaattcgagacttcgtagtgttcgaatcccgcttcggtcagcgtgtggtggaccgtgaggaactccgtttcgctgacctgctcgtccacggcccggaattcgccccgtgcggcgcgccgtccgaaagccgtatcgggttcgacggtcaaatggtatgccgaaatatgctgtacgccgagcgaaagggccgcatcgagcgagcggcgcagcgtatcgccgccgaaacccggcacgccgaagatcagatcgacggtgaggttgccgaatccggcgcgctgcgcagcgcggaccgcttcggccgcctgcgcggccgtgtggcggcggttcatcagtttcagacagtcgtcgtcgaacgactgtacgccgatcgaaaggcggtcgatgcccgcttcgagcagcccgtcgaggtactcggccgtcaggtcgtcgggattggcttcgagcgtcgtctcttcggcgccggagcagtcgaagagtcgtgcggcgtggtccagcagtcccctgatcgcttcgggcgtgcagagcgacggcgttccgccgccgaaatagcgggtcgtcaccgtttcgccgcccggatagccgcgccgttcgtccagttcgcggtgcatggccgccagcaggtcgtccatgcgccgcaggtcggcgcttttgtaaaagtcgcagtaggcgcagacgcgcttgcagaagggtatgtggaaatagagtccggccatggttaccaaagttaagaaaaaaacggaaacggcggcacattattttccgatttttccgaaacaggccggaagccggtgtgctgtgcgtttttctcggcggctgccggaaggacccggcgccgctgcaaaatcgcggcagcatgtttgcgatatctccgctgtcctgagctgcgcgcggcttcggaaggaggagatacgaagttataaatgaatcatatacgggcgtcggaaaaaataatgttctttttttgtgtttttcactgttaattttttcacaagtgtaaaagtttttctacctttgtgcggttaaagtccgcacgcgcggatttcgacggttaggttaaatcttggatttgatgttttattaaaaataacgattgctatgaacaaaatggatttgaaaaagtacgggatcacgggtgtgaccgagatcgtgtacaatccgtcgtacgacgaactcttccgcgaggagaccaagaagggcctccgcggcttcgaaaagggtcaggagaccgaaatgggcgccgtgaacgtgatgaccggcgtttacaccggccgttcgcccaaagacaagttcttcgtaatggacgagaccacgaaagatacgatctggtggacttccgacgagtataagaacgacaacaagcccgtgaccaaggcggcttggaaagagctgaagaagatcgcttcgcaggagctgtcgggcaagaagctctacgtcgtcgacactttctgcggcgccaacgagaactcgcgtctgaagatccgcttcatcatggaggtggcttggcaggcgcacttcgttaagaacatgttcatccgtccgaccgacgccgaactggagaattacggcgagcccgatttcgtcgtgctcaacgcatcgaaggccaaggtcaagaactacaagaaactcggtctgaactcggagacggccgtcgtcttcaacctcaccgagaagatgcaggtcatcatcaacacgtggtacggcggcgagatgaagaagggcatgttctcctacatgaactacctgcttccgctcaagggcatggcttcgatgcactgctcggccaacaccaacgccaaaggcgagacggctatcttcttcggtctgtcgggaacgggcaagaccacgctttcgaccgacccgaagcgcgagctgatcggcgacgacgagcacggctgggacgacgacggcgtattcaacttcgagggcggctgctacgccaaggttatcaacctctcgcaggagaacgagcctgacatctggaacgccatccgccgcaacgcgctgctggagaacgtgacggtagacaagaagggcaagatcgacttctccgacaagtcggttacggagaatacccgcgtatcgtacccgatcttccacatcgaaaatatcgtgaagcccgtatcgaaggctccggccgccaagaaggtgatcttcctctcggccgacgcattcggcgtgctgcccccggtttcgatcctgaacgccgagcagaccaagtactacttcctctccggcttcaccgccaagctggcaggtaccgagcgcggcatcaccgagccgactccgaccttctcggcctgcttcggcgcagcgttcctttcgctgcaccccaccaagtacggtgaggagctggtgaagaagatgcagaagtcgggcgccaaggcttacctcgtgaacacgggttggaacggcaccggcaaacgtatctcgatcaaggatacgcgcggcatcatcgacgccatcctcgacggttcgatcgacaaggccgagaccaagacgctgcccatcttcgacttcaagatcccgacggctctgcccggcgtggatcccaagatcctcgatccgcgcgacacctacaagaacgccaaggattgggacgtgaaggctgaggacctcgcaaaccgcttcgtgaagaacttcgtgaagttcacgggcaacgaggaaggcaagaagctcgtagctgccggcccgaaggttaagtaatttccgatgactgcggcgcaggccgcgcatcgtcagaacgcggaagcggggtattttcaccccgcttccgttttttttgcgcatgtagtgcgccgtccggatcatgccgtgcggcggaacggacagagtcggcaaaaccggcagccccgcagattccgcagcccctccccgcagaatccgtggaacttgcggagtctgtggaattagcggaagaacgggcagaacccgcggagtcgggtgtttcgaaaccggcgtttgctttcggagtgtagccgtgttttgccggcccgtaacctgtccggacacatccggcaagacgaagaggctgtctaacaattctaacttaggcagcctcttttttatgtttgcaaataatataaccatcagccgt

SEQ ID NO: 12037 - DNA, 70479 bp, Unknown
  gut microbiota DNA sequence
caccccaattccccgttcctcggtccgctcccgccgtccacccttacacggcccgcccctcacggcccagccaccctcacacggccctgcccctgcataaaaacgccccgccccggcaccacgtttcctttttttcgttatatttgcaatcaaggcgttatggtgacgccttatcccacttaaatttttaataccatgaaaaaatccttactctacgcaacgctcctctgcgcaggattctatgcggcatcctgttccgacaacgagggggggggaaagagcctgaccccgcacccgaatattttcgggtagccttcgacggccccgcactggcggccgaactcaacaccgacttcacggcattctgccgaaagtacgccgaatacgtctccgatcccgccgcaaacgccttctccgcgcatccgtcgtccgccgctccgagcatgaacatgccccagcagccctccgtcttctacttgggcagctacctcaaaaccccgaccgacagcatcctgctcaccctctgcgtcgaaaaggacgattacgacaacgtgaaaacgatcacggccgcacccgaagatccggccaaatccctcgacgtgtggcaatactgcctgacctccgccgaagcgctccgtctgggcacgttcctcggcaccaaatacaaaagcccctcttcgtcgggcgtattccagaccatcgacgacaccctgaaccacatcgcccagcacggcaccgccgaaacgctcgcctgcacgatcttcggcgtcgttccgcaggccgcatacgccgtcttccaactcgacaacgggaccttctccgcccggctcatgaacagctaccttaagctggactatcccgcaatgcgccgctggctcggcggcgaccacgccgccttcgctgcggagtactacgttctgggcaacaagatcaacgccttcggcgacctctacgtctacttctactatgccaaggacgccgccggcaacaccttcaccgtcgacgtacacgccgacaagaacggcgagaaaatctccgaaatcgacgtctacgtcagcgccgaccgcaacgacgccgacaagcagctggccatctggaaggaatacgcccgcgactacgcggacaaaggtctgggggccttcaaagaggcctatacgaccgattcgtggggcgaccggaaagagacgttcgccgatcttgccgcagcggtcgcccatgtcgaatccaacggccggccgggtcccttcgacggcggcatcatcgtcgttttcgaagccgacggcgtcgccacgaatctggtgatgaaccagcagtacatctacctgctgatcaaggacccgaactacaacgtcgaataacctcacacacagccgcaaacccctccggcagaccgtccccggccctccggagcgaaattaaccggccgaatgtcaaaaaaagaggcgcttccttgcggaggtgccttttttttcttacatttgcacccgctgaaaagcgtaaattaatttaattccaacaattatgaacaattacgaaaccgttttcattgtcacgccggttctgtccgatgctcaggttcaggaggttgctgacaaattccaaggtgtcatcaccgagaacggcggtcagattgtgaacaaggagtcgtggggccttcgcaagctcgcctatcctattcagaagaagaccaccggtttttacttcttggtagagttcacgggcgaaggctcgctcatcggtacgctcgaaacgcagtaccgccgcgacgagcgcatcatccgtttcttaacattcaagcaggacaaattcgccgtcgagtattcggagaagcgtcgtgcaaaactttctaacaaatcggaggagtaaaccatggcacaggagaacaaagcacagtctgaaatccgttacctcaacccggtgtcggtagacgtcaagaaaaagaaatactgccgcttcaagaaactcggcatcagatacgtggactacaaggacggagagttcctgaagaagttcctcaacgagcagggcaagatccttccccgccgcctgacgggtacttcgcagaagttccagaagaaggtcgcacaggccgtgaagcgtgcgcgtcacctcgccattctgcccttcgtaaccgattgcatgaaataattaaaggaggaagagacaatggaagttattctgatcaaagatatggaaaatctgggttacgccaacgacatcgtgaacgtaaaacccggttacgcgaacaactacctgatccctcagggttacgccaaggccgccactgcatccgccaagaaggttctcgccgagaatctccgccagcgcgctcacaaggacgccaagatcctcgccgacgctcaggcgctcgccgagaccatcgccaacctgccgctgtcgctggccgtgaaggccgaggagggcaaactcttcggtacggttaccgccgccgatctggccgaggcgcttgccgccaagggcatcgagctagaccgcaaggtgatcgtcgttgacgccatcaagaccgtcggcgaatacgaggctgtcgccaaactccacaaggaggtcaaggcagtcatcaaattctcggttaccgccgccgaataatccggggacggaagacctgccaccgggtgcggcgacaatcccggcaacggggtccgagtccggcaagacaagtaaaaaggagagcttcaggctctcctttttcattttgcgttttccctttcaccatccggcacgcaagggaaacgcgcccgaaatccgcccgacctgcggaacggattagaaccggtaacccagcgtcagggcataagtcgtattgtggctggaaccgaattttatcaaccgtgtcagtccatactgcacctctggaccgatgacaaaatgtccgacgatgaaatccgcaccaagaccgcatcccgcatccaagcgacggacattgtcctctacaccgtcaggcagagacgaatgaagcagacaggcgacataaggtcctccgtgcagtgccagccgcgagcgttgcgcaaggcggaacgagacaaccgcctccacgggaagatcgacataagagagccgtgtggccttgtcccaatcgtaattgaagacattgttagaagtcgtggcgcctttcatagagaagaagagaccggagcgaagtccccaacgctccgagaaaagatactcgacaccggctccggcacgaatacctattttcaggtgctggtcgccgaaagaggatgccgttgcaccgatgcgaaggtcgacccgaaattgcgcagaagcgctaaagacagccaaaagcaggattgccgaaataaggatttttttcataactgcgggttttgtgtttgaaaatgttatttttgcattgcaaaataaaatcataaacccctttcgggcaatactgattaatcagtaatggaaacactgcaacgcgaatacgaagagctgctggatgcccagcggttcgatcccggcgaattggattactcggtgctggatcaccacatctcccggttgacgctgttgtcgcaggtttcaaacagcggtattacagtcttcgacatgtatacccgccgccacgtcttcgcatcgtataacttctcggaattgttccaatacgacatggcagccatcgccgcagacgattcagcctatttcgccagtcgtatccaccccgacgaccatagggaactgcaccgcaacggcatcgcctgcctgcgctatctaatggaacacaaagaaatggctcccgacgtcaaactaatcaacgaataccgggtaaacatagacagtcattacgtgcgggtgatcgagcagtttcaagtgctggagttcgatcgttcgggaaatatctggctttcgctgagcatactggacatatcgcccaatcaaggaacagaggatggggtgcgcagccagttgttcaactaccgaacgggcgaggtctgtccgttcccggctgccgaagagccgtctctatccgaccgtgagcgggaaatattgcgtctgatcagccggggaagactatccaaagagattgccgaccaactgtccatcagcgtacacacggttaacacacaccgacagcgtattcttgaaaagctgaatgcggacaattcgatagaagcagtccgttatgcctcggtccggggattgctcggctgatatcggtaatcggagccgtcgccacattaaagtgccccgatccagtatgcaggcccgtcaataaatatcggtggcatcggcacgacgggagtcgcacacgtcgctgacgaaggtccgcagcacctcaggattctcgatgacgggaggatcgaaccgatccgatttcatataccggatcagcgagcggcgcatctggcgggcgacgatcctcctgtcgagatcggtcgtcaggtcgcacgacgccagcacgagcctgccatcgcccacacgcccctcatagatcatggccaaccgccgattattggtaaaattgtcaatgaccttcacgacgggcgcaccgccgtgcagcgaatccaccaccatcgtgcgggaatctacgcacaactcccaccactgccagtcgccgtgtccatcgttgggaaaatcggccagcgccgggtgttccgcatcgcataacagccccatcgttccggcctgttcggggaaatggacgggactccagaacacggggaggaatttcccctgcaggccgttcgtataccgccaatccagcaacagcaacaccttgccccccttttccagttcggccattgccgtattcagatcgtccgtaatgcggacatccccgctccggtcctcgtccgcctgcggataaacccagacgctccaactattccgataggacgtgccttcgaccccgaccgtcagcgtcagcttccgggccttttcgataccggcaagttcgacggctatccgtcccagaccgcggttgtacccctgcgcgatatcggcaccgatggtccccgaagcaaaggtcccgtcttccgaatcgcccaactcccatgtcaatgcggcattttcgagcgcctcagccgaatagttgctgatatcgacctctgccgtaaacagctccccggccgcatatgccgccttggcatagcgcacgagcggcaccaccggagcgcaaaattcgcggaactgccgggccgaaacaacgcccttgctctcccagaacgcatcgagaaggcccaccagcgccgtaccctgccccggaaaatcatgcaggtcgagcagctggtagccgctgatccccggcgttttcagggcacgttcgatctcctccttataaagtatggccgcgagttttcccgacgcccatgtatacttctctgcgtcggacaacaagcccttgcgtttcaggtcttcgcgcaccgcctcgaaattgaggggtctgagcactccggtgtatttctctatttcggcaagattcggataaaccgaatactgcccgatctcatgggtaatcaaaggcgcgccgatcccctccaacgccgattgataatcccggtcgaactgcggaggctgctgttcgaaaacgccttgcccgcggacccagccatgcccggtccactgcgtgacaaagaaatcgtcgccgtccatcggcgcgaccccgtatccgggttcaaacgtaaacgaggtcgaggtgtaaagacggcgattgtccgcggccttcaggcgtttcatcaaactgttgacgatctgcatgtcgccctgcagttcattgcccatgctcatcatgcaaaatgacggatgactgccgtacgcccgcaggatacggtcggcttcggcttcgagatagtctaccgcagcacggtcggcgcccacgttcagcgcccacagcggcagctcgacctgaagataaagcccctcagcgtccgccacctcgaaagcggcttcgggaggacaccacgaatgaaaccgcaggtggttaagcccccactccttggccgtgcgaatgaccttccgccatccttccctatcaaggggaggggtgcccgtcagcggaaaaatacagcattcgagcgttccgcgcaggaagagcggcgaaccgttcacgaacatgcggtcgccccggctctccatcttgcgcattccgaaatccgcggctgccgcatgttcgcccgcgccggacgccagacgggcttcgatacgatacaccgccggagaaaattcgctccacaagcggacatcatcgcccatcggacagtcgatttcgattctgttgagtccgggatcgagggttatctcccgtttcaaggcggcgacggcattgcgtccgctcctgtccacggcccgaatccgcacctcggccccctcttcgtaagcttcggcgtatatctcaaggctcaccgtcgccttccgggcgtccacatcgggatataccgcaagatgacggatatgattcaccggcatgaaatcgatcgacagatctccgagcatcccgttccagatcgtctgcgtatcgttcgtataggcatgggccagctcgcggacactgacgtcgaactgccggcggttgtcgacccgaaccgtcagtctatgggtcgcccccggcgtgaggaaggacgtcaggtcgtaacggtgcgccgcgaccagcgaattgccgacgatcggctcgaccttccggccgtcgacccaaacgtcgctcttccagagcacccgctccagattcagcacggcccgctttccggcagccgacgcgggaatctcgatttcgcgcgtataatacgcggcccccagatagctgtaattgcgcgtcagacgcagcatctgcggctgcgtcatttcgggacgcagcgcattgggggttcccagacgagccatatcggtggtgccgggaagcgtaacgggcgtttcgaatccggtattgttccagccggacgaatccccccggtcgagggagtcgagcgcaacccgccactctcccgccagcgaaagcttatgaacatcgcccgcacacccgcagagcaacagcaacaaggtcggaatacaccacaacttgacagacataggttcagcaattaagtatgagttcggatttccgccgccgggaaatcccgatcggttatcggtacaaaagtaagatcggcgggaacgatataaaatacagatttcaggaaaaaagatagaatatattacgaaaaacatccatctccccggcaaagccctccacctcctccgcgcaaggccgtgacagcgcccactcagtgcagtcccgaaaaacggggctgcacccgtcaggcttcggacagacggaatcggcacatcaacactcccgacagtccggccgtcctctaatgcggcgcggccgtcggcggatctacatgccgcggcggcaccgagtaggagcggagcaccagccccaccccgacgaagatcaccaaggcgaaaatcaccgtgtcggcgtgcagtttgtcaagccccatacccaccgaaatggcgatcgccagtacgggctgcaaataggtgtatatgctcgacaccgtcgcgggcacgctcttcagcgcatagttgagcatcaggttgggcagataggtcggcaccgtcagcacgaacagcgtcgggaaaagcgcatgcttcgcaatggcggcgtaatccgtatgaacgatctctttcaggccgaacggcagggcggcgaccgccgccacgcagtaaagccacctcagcacggtcgtaatccggtatttggcgatcagccgcttgaaccacaccatgtagagcgacgtaacgcaggcgcagagcagaatcatcacgttgccccagaggtgcgaatgctggtgcgacgacgacgcgcccgccagcaccacggccacggctcccgccatgccgagcaccagccccgcgatcttcaatttcgtgaaacggtccatccccagcagcaccgaaagcagcagcaccagcagcggcacgatggtatcgatgatcgaaccgtcgatgggcgaagtcatcgaaaggccgtacatgatgaacaccttgcgcaggacgccgatcagcagcgcggcgccgatcagcttccgcacgtcggccttctcgaccttttcggccttctgccacaacagcggcaccagcgagaagagcgccgtcgcgatcagcgacccggagaccatcgccatcggatggacgtaacgcggcagcacgatgttgtaaaaagggtagtccatggcccatacgatattgcaaatcagcagggcgatgtggggcttgaatctgttcatcctttcggggtttatcccgcccaaaaacaaaaacagtgcccgtcctccgcccccgtctcctttcgcggcatgccgcccgccgcacacccgaaaggccgtccgtcgcccgccgcgccctgctcgccccaccctgcgaagtgcggcgccggaggcggctggcacggaagttgttttttttaaagaccgattttgctgcagccgcagcccccttgcacgttaaaaactttaaaacgaaacgttatgaacaccaagagaaacaaaaacaccgattcgccccacttccgcgaattcttcctcgaccagatcaaagacgtctactgggccgagaaacacctttcgtccggactcaaaaagatgaaaaaagccgccaccagcccgaagctggccgccgctttcgagaaacacatcgaagagaccgcaggccagatcgaacggctgaagcgggttttcgaactgctgggcaaaaccccgcaggccaagaagtgcgaagccatggaaggacttgtctccgaggccgaaagcatgatcgaggacacccggaaagactcctatacgcgggatgcgggccttattctggccgcccagaaagccgaacattacgagatcgcctcgtacggcacgctgaaagtcttcgccgagatgatgggcgagaccgaaatcgcccgcgaactgggcatgatcctcaaagaggaggtctccaccgactcgctgctctcgtgtctggccgaagaggatgtgaacgaaatggccgtggccgaataatgcccgccctcagggccggaaaggccggacctccggcccgactataacgattttcccctgccgcacatcgttgcggcaggggaaaatcgcttccgggcctttcccggtcgctgcgtcgggccgtcaccatcgctgcgaagggacttcgaacgtggccggagacgcgccgtcgatcttttcgccccggtaatagacgctccatgcatcctttccataccctttgccgatattttcgaacgacgaagccgatgcgccgccgactttgcggccctgaaaaaacaccgtccatgcatcctttccgtatcccccgccgagactgacgaacgaaccggccgcagccccttccacctcgcgctcccggtaatagaccgtccagctgtctttggaatagccgccgcccagcgtccgggtcatcttcgcattcgcacgctgccgctccccgtacagataggtattccaattatccctgccgcgtccctttcccagactctcgaacgacgaagccgaagcgccctttacctcttcaccgcagtaaaacaccttccagttgtccttgccgtagccgtcccccagatcgacgaacgacgaagccgaagccccctcgaccttcagcccccggtaataaaccgtccagctgtccttggaatacccttcgggccttctgtcccgccccggatgcacgccgccgtgccgggcagcgctcacctgagcgaaacacgcatccccgcccgacagaagcgcgaaggcggacagcaaaaccactatcatttttttcataatacagtcgtcagttagtttttactattcaaaccccaaatatacccgcttattgcgccgcgcccaagaaatccgccgaaaaattcacccgccgccaccgattcgcagccatcgagagactttcgaccgacgagagatgtccgaacgacaagagatgtccgaacgacaagagacttccgaacgaccggaaaccgtcttctcacaaccgcccccgacaaaaaaagtccgcaggctcgcacctgcggactttcgcctatatcggacggaacgcaaccgtcccgccctctcttccgggaattactcctcggtctcttccttggcagcggctttcttggcgttcttcgcctcggcagcctccatggcgctcttcagagcggccagacctgcgatatcgcccagcgtcgtcttctcgaccgaagcgttgatcttcttcacggtcgatttcgtcgcatcggcagcggcacgcttctcagccttctcggctgcaacctcggcgcgcttggcctcctcgtacgtacgaagatgcgaaagggtgatacgcttggtagccttcgagaactcgatcaccttgaagtcgagcttgtcgccggccttcggcgtggtgccgtcctccttggtgagctgacgtgcggggcagaagccctcgatgttctcgcccagagcgaccactgcgcccttgtcggtcatctcggtaatcgtaccctcgtgaatgctgtccaccgagaactggttttcgaactcgttccacgggttctcctccagctgcttgtggcccagcgacagacgacggttctccttgtcgatctccagcaccacgacctcgatatccgcgcctaccgacgtgaattcgccggggtgcttcaccttcttggtccagctcaggtccgaaatgtggatcaggccgtcgataccctcctcgatctctacgaagataccgaagttggtgaagttgcgaaccttggccgtgcacttcgtgcccacgggatatttggtttcgatattctcccacggatcgggcgtgagctgcttgatgccgagcgacatcttgcgctcctcacggtcgagcgtcaggataacggcctcgacctcgtcgccgaccttcatgaactcctgcgccgaacgcaggtgctggctccacgacatctccgacacgtggatcagaccctccacaccgggagcgatctccacgaacgcgccgtaatcggccatcacgaccacgcggcccttgaccttgtcgccgaccttgaggttctggtcgagcgcctcccacggatgagccgtaagctgcttcagacccagtgcgatacgcttcttggcatcgtcgaagtcgaggatcacgacctgaatcttctggtcgagcgccacgatctcttcgggatggttcacgcggccccacgaaaggtccgtgatgtggatcagaccgtccacaccgcccagatcgacgaatacgccgtacgaagtgatgttcttgacggtaccttcgagaatctggcccttttcgagtttcgacatgatgacctgcttctgggcctcaagctcggcctcgatgagcgccttgtgcgaaacgaccacgttgcggaactcctgattgatcttgacgaccttgaattccatggtcttgtccacgtatacgtcgtagtcgcggatcggcttcacgtcgatctgcgaaccgggcaggaacgcctcgatgccgaatacgtctacgatcataccgcccttggtgcggcacttgatgtaacccttgatgatttcgtccttttcgagggcctcgttcacacggtcccacgacttgagctgacgggccttcttgtgcgaaagggccagctggccgttcttgtcctcggccgactcgacatacacttcgattttgtcgcccaccgccagatcggggttgtaacggaactcggaaacggggatgacgccctcgcttttgtagccgatgttcacaagaacctcacgcttggttatgccggttacggtaccttccacgacttcgccgacattgacgttcgaaagcgtcttgtcatacgcttcggcaatctcctccttgggctgcgaatagacgcccagatcgttttcaaatgcgttccagtcgaaattctcgtttgcgactacagttttcgtttcttccataacggaaatactttgtgcgatacaatcgctcgttaaatgattaataatgaaattcatagcccctcattcgcgcctcgtgcgcgcatacggggagtgcaaagatactcttttcaactgaaaaaatgaaagattgagcgcaaaaaatcgcttaccgacagttttttacacctcccggcctcggacacgcccccggacgactccgccgccgcgcccgcacactttccggccgaccggtcgcgcagccgggacaccgccgcaaatgcttttcccgcccgtcgcaggcccgcggtcacaaaccactgttccgtccggacgcagaccgtcccttccgcaggcctacttccgccgcacccgctgccgcggcgtgttgtcgatccggagcggagagtcctcctccagctcttcgagcagaagcccggtcacatcctcctcggtaatcttgccgtcggtgtaattcaggtcgttgtaattcttgtagacgtaatcgctgacggcgaccgtgtagaccttcccttcgcgcagcttggggaactccacgtcgagcgcattgtccgcctgatcggtaacgatcacatagggcgttgtcgaaatcaggtcgatgcggtgcgcctccttgacgttcaccggatcgttgtatttcgaaacgatcatccgccgcatatccgccggcgtcatcttcatctcggccaccagcgtcccgaacggctccagcccgtatacgctggccgcgctcacgccgcccgcgggaatcgagtcgagccgcacgcccccgatatggtagaatccgatctcggcgtcgatcccgtcggccaccgccccggccatccagttcgccagcccccacttgttcgcggcgttcccgaacccgcccatcggtctgttcagctccggattggcgtaacaggcgtccacctgcttctggaaaacaggatcaggctcgtaaccggccagcggcacgagccggaaatccacgccggcgaccttcttgcccttcatgcgtatcgtcgtgacgcctatgttccgcaggtccttccccgtctgcgtgagcagcgtgccgccgatcaacgtatcgacctcctcgtgcgtgtgcccgccgatcaccacgtcgtactgcgaagcgcccccggcaagcagttcccggtcgcggtcgtcgcccatgtgcgaaacgagcaccagcacgtcgcacttcgggcgcagctcggcggcgtatttcaacgccatccgctgcggatcgggaaaggtcagccccgcgaagctcgacgcattgcccgccggatgccccggcccctcgtagttggtcaccacgccgacgaacccgatgcggagtccgccctcttcgagcaccgtgtaaggcggcagcgggggaaaggaacaggtgtcgctcactacattggcgcacaccacctcgaaatccatgctgtctatcatccgtcccagaaacgcctgcccgtggtcgaattcgtggttgccgagcgtcgccacgtcataccccagcccgttcatcagcgcgatcatcggcatccccggcgtcgccgcccggtctacgtaggcgtttcccgtccagcggtcgccggcgtcgaccagcaccaccagctgcgccgtgtcgcggcacgcctcgacagccgccgccagacgcggaaagtgctggattttggcgtgcatgtcgttcgtcgacagcaaaacgagcgtccgctcgcggggggcgcaggccgccgcgagcgctgccgtgacgatcagaaccgtgcggagtattctttccataatatcgattttgagtttgtcaaagttacaaataattcatatctttacacttcattcagcagaaaaacttatggcagacagcatcaaagtcatatgcgacaacctcggaggtccgatccgggtggcgatgggcaccccgctctccgacgtggccgcacggctgacgccgggacgctacccgttcctcgcggcgttcgtgaacaaccgcatcaaggagctcaactacaaaatatataccccggtgacggtccgcttcgtggacatcaccgacttcgcgggcatccgcgtctaccagcgcacctcgtggttcatcctccagaaggccgcgcgcacgctctttccgggacatacgctccatatccgccactcgatgggccagagcgggttctactgcgagcttgaaggactcgacgaattcacccacgaacaggccgcggcgctcgaagggcacatgcgcgaagtggtggcgcagaaccttcccatcgaacgcaccaaggtgctcacgagcgaactccgcgccatctacgccgaacagggcttcgacgacaagacggcgctgctcgacacccgtccgcggctctacagcgacctgtacacgctggacggcacggccggctacttctacggcgcgctggccccctcgacgggctacatcgaccgcttctgcatcgaaccctactacaagggcttctatctggccctgcccctgcggacgaaccccggcgtgctcaacaagaacgtccagcaggagaagatgttcggcatttttcaggagtaccagtcatgggtccggatcatgggcgtccccaccgtgggcgacgtcaattcgaaggtgctcgcgggcgacgccggcggcatgataaaactcgccgaagcgttccacgaacgcaaattcgcatgggtcgccgacaccatctacgacgccaacctctcgcgcggcgtgcgcatcgtgctgatctccggtccctcgtcgagcggcaagaccacctcggccaagcggctgggcatccagctgggcgtgctggggctgaaaccggtgctgatctcgctcgacgactacttcgtggaccgcgaaaagaccccgaaggacgccgacggcgagtatgactacgaagcgctcgaagccatcgacctcgaactgttcaacgaccacctccgccgcctgatgcgcggcgagagcgtcgatattccgcgctacaacttcatcacgggacgccgcatgcagcacaacgacccgctgacgctcgacgaacgttcgatcctgatcgtcgagggcatccacggactcaatccccgtctcacgccgggcgttcccgaagagcagaagttccgcatctacatctcctgcttcacgtcggtggcgatggacaacctctcgcgcatcgccaccaccgacaaccgcctgctgcgccgcctgacgcgcgactaccggcagcggggcgccgacgcgctggccacgctctcgcgctgggcctcggtccgccgcggcgaggagaagcacatcttcccctatcaggagaacgccgacgtcatgctcaactcgtcgctcttctacgagatttcggtcctgcgccccttcgctgagaaaatcctccgcgaagtgcccgacacggtgcccgaatacgacgaagcgcgccgcatgctgaagttcctcgacaacttcatccccattccgcccgacgagattccgcccacctcgatcctgcgcgaattcatcggcggcagcagttttcaatattgagaatcgtccgcacgccccggcgtcatccggacgcaaaccatgcaagacaataaacgaccgcccggttccgacccggccccgaaacgataattccgccgcaccgcggcgccaagtccccataacttcatacaactaacagatatgttcgacaaattttccgaacgccacatcggcgtcagcaacgaaaaggagcttaaagccatgctcgaaacgatcggcgtcaagtcggtcgacgagctgatctcgcaggtcattccgcactccatccggctcaagaaaccgctcgcgctgcccgcggagggcatgagcgagtacgaattcgcaggccacatccgcgctctggccgagcgcaaccgctgcctgcggtcgttcatcggcatgggctactacccctgcgcggttcccgccgccgtcacgcgcaacgtcttcgagaatcccgcgtggtacacctcctatacgccctatcaggccgagatttcgcagggccgcctcgaagcgctgctgaacttccagaccgccgtgatctcgctcacgggcatggagatcggcaactgctcgctgctggacgaggccaccgccgccgccgaagcgatgctgatgatgttcgccctgcgctcgcgcgaagccgtcagggagggccgcaaccagctcttcgtcgaccgcaacatcttcccgcagacgctcgacgtgctgctcacccgcagcgaacccttcggcatcgaactgatcgtcgacgaatacgacgaatacagcttcacgggcaaggagttcggcgccatcgtccagtatccggccgccaacggcgccgtgcgcgactacgcggacttcacggccgccgcccacgccaagggcgcgctggtcacggccgtcgccgacctgctggcgctggcgcttctgaaagcccccggcgaatggggcgccgacatcgccgtcggctcgacccagcgtctgggcaccccgatggggctgggcggtccgagcgcgggctacatgaccacgcgcgaagccttcaagcgcaacatgccgggccgcatcatcggcgtctcggtggaccgtctgggcaaccgggcgctgcgcatggcgctccagatgcgcgagcagcacatcaagcgcgaacgcgccacgtcgaacatctgcaccgcctcggcgctgatggcttcgatggtgggcttctactgcgtctacaacggtcccgaagggctgaagcgcgccgccaacacggcccatctggccgccgcgacggtagccaaggcgctcgaagcgatggactacaaactcgccgcaacggcctatttcgacacgctcgaagtcgccgccgaagccgccgtcgtacagtcgctggcgctcgaaagcggcatcaacttcttctacccgaccgaaggttcggtgcgcatgtcgttcgacgaagtcacgactccggaggagatcgccgaagtcatccgcatcttcgccgccgccaaaggcaagaaagccaaggccgtaaagcccgtcaccgaaagcaacgtcccggccggcctgcgccgccgttcggcctacctgaccgaaccggtcttcaacgcctaccgttcggaaagcgccctgatgcgctacatcaaacagctggaactgcgcgacatatcgctggccaactcgatgatctctttaggttcgtgcaccatgaagctcaacgccgcggcgctcatgcagcccctttcgctggccggcttccagaacatgcaccccttcgccccggcggatcaggccgagggttacatgcagttgatcacggagttggaaaacgatctggcgacgatcacgggcttcgcggcctcgtcgctgcagcccaattcgggcgcggcgggcgagtacacggggctgatggtgatccgcgcctaccaccagagccgcggacagggctaccgcaacgtcgtgctgatcccggcgtcggcccacggcaccaatcccgcgtcggccgccatggcgggcatgaagatcgtcaccgtggcgtgcgacgccaacggtaacatcgacgtggaggacctcgaagccaaggccaaggagtacagttcggagttgtgcggcctgatggtgacctatccctcgacgcacggggtgttcgaaagccgcatccgcgaaatcgtggacgccgtacacgacgcgggcggacaggtctacatggacggcgccaacatgaacgcgcaggtgggcctgaccaatccgggctacatcggcgccgacgtctgccacctcaacctgcacaagaccttcgccatgccccacggcggcggcggtccgggcgtgggtccgatctgcgtcgccgaacacctcaaagccttcctcccctcgcattcggttatggcgacgggcggcgacgaaggcatcaccgccgtggcatcggctccttggggctccgcactgctgctgcccataacctacggttatatcaagatgctgggtgaagccggactgcgccacgctacggaaatggcgatcgtcaacgccaactacatgtccgccgcgctcgcatcggagttcagaacctactattcgggcgagacgggccgcgtgggtcacgagatgatcctcgacctgaccaacttcaagaaggactacaacatcgactgcggcgacatcgcccaccggctgatggactacggattccatgccccgacgctctcgttccccgtgcacgagacgctgatggtcgagccgaccgaatcggagccgaaagccgaaatggaccgcttcatcgaagccctcgtgtcgatcaagcgcgagtgcgaagcggccgtcggacagcccgacaacgtggtggtcaatgcgccccatacggccgtggagatcgcgggcgagtggcagcatccctacacccgtcagcaggcggtcttcccgctcgaatgggtgcgccaagcgaagttcttcccctatgtttcgaagatcgacgccggctacggagaccgcaacctctgctgcaggaattgcgaataaatcgtgaaagccgcgattattaaggaattatatgtaactttgcagcccgtacggcgcggattccgccgctgacggagccgccggcggttcgaaagaacggtcccggcggcgggcggcgcagcgctgcaagccaacgtccgggttccggcaggcgcgttttttgccgtatgcggaagtaaccgcatgcagaaaacaggcaggcagaaacggacaagccccgcaaaggcaggcggagcgcggaaacgctccgcaagccaagcaccgccggagggaaatgccgggcggaaacgcagaccgggaataacaggcggtagcacagacccaaacgccgggcggaaatgccggacggaaacgcggagaagggccgcaaggcagaaacgccggcaaaaacggacaagcccccaaaggcagacggagcgcggaaacgctccgcgaaccaagccccgccggagggaaatgccgggcggaaatccgggcggaaacgcagaccgggaacaacgggcggaaatacccggcgggaacaacgaaaacgaaaaaacattttttaacgaattattatgaaagtagaacagaacaaaatggtcggcgtggactacaagctcaccgtcgacggacagatcgcagaccagtcgcgtccgggccagccgctcgaatttatcttcggaacaggcatgctgctccccaaattcgaagaggcgattctgggcaaggaggtcggcgaagccgtctcgtttacccttgagccgaaggacggttacggcgaactgatcgccgacgccgtggtagacctgcccaaaaacatattcatggtggacggcaaactcgccgaggacatcctcttcgtgggttcgcaggttccgatgagcgacaatcagggcaaccgcatgatgggcatcgtcaaggaggtcggcgaggagaccgtgaagatggacttcaaccacccgatggccggcaagacgctcaacttcgacgtcgagatcgtatcggtgcgcgacgtaacgcccgaagacctgcagggcggctgctcgtgcggagactgcggagacgactgcggcggcggttgcgaccacgaaaaagggcactgcgactgccactgacagaaaagcgggacttgcagaagccccgctttttttaaaaccccgaaaccgactctgccatgacccagaccgaactgctgaaaatgatcggcagcggcgccgtacgagacctcgacctgacgggccgcgaattgaagaacatcgatttcaaaggctgccgtgtggaaaacgtgacattcgacgaatgcacgctcacggagtgcaatttcgacggctgcgggatggagcgcgtctccttccgcaaggccgtgctgcgcaactgccgtttccgcagggcgaagatcgcatggagcgacttccgctactgcgagatcgaaagggccactttcgaagaggccgaaatccggttctgcgacctttaccgcgccatgctcaccggaatcgtcatcatgcgcaaggctcggatcggagagacgagcctctactacgcctacttcggcgaaggggtgaacatacgccgcgaaaacatcgccggcggcaggctgctccagcaggacctcgacgcctacaggcagtttctgatcgaatggaacacctccggcacgggagtccgccggaacgaccgcgccgagcagtcggcgtggagtcccgatgcggcgctgcatgcccgctgggccgacgccgaggagatatacaagaacttcaacggcttgtggacgggcatcggatttctgcgcgacgcgaactgggcctacgtgaagggccgccgcatggaacgccggcgcatgctggccgactggcgcggcgcaccgctgtcgcgcaaaccccagctggcatggaaaatagcgaccaatacgctgatggacatcatgttcggctacggcgagagtctcttccgcatggtcacgacctacgtggtgctggtgctcttcttcgcctacgtctttcagggaaacgcttcgctgccctcctacctgcaggccttctggatcagtctgaagaacatggcgggcgtcggttcggagcagctcagcggcatatccccgctggtagacatgctcaacgtcgtccagacgacgatcggcatcctgctcaccggtatcttcggcttcatcctcggcaacaagatacgcaatcagtaaagccgtgttcacactgcgccaatacctgaccacgctggccgatacgcacggcctcacccggacgctgggcgagatcgaggtgtgccgcgacggaaaggggcgcatatgctactcggcaggcaacagcgccgtcgtattccgcatccgctgcgaaggccgcgtccgctcgctgcgctgttacatgcaccatccgcgccatctggcggaaatctacggcgagaagctgctgccgcaggagcttttcatctacacctcgcccgcaggcggcgtctgggtggatgtggtgctgagcgactggatcgaaggcgtgacgcttcacgaagcggtcgccgcagccgccgaggcgggcgacacggcgcggctgaggagatttgccgccgcattcgaccgcatggccgcggcgctcacggcggacgactgggcgcacggcgacctgaaacccgaaaacatcgtcgcggacaaccggggacggctccacctgatcgatttcgacgccatgtttctgcccgctttcgcaggccggcacagcccggagctgggcacggcggctttccagcatcccgcccgcacggtgcgggatttcgacgcttcgctcgacgactatccggcggccctgatctccacggcgctgcatgcgctggcgctcgacccgacgctgtacgcccgctattccgaggccgacgggctgctcttcacgccgcagaagatcggaaccgacgcggcgctctgcgaggtgctcgcactcttcgagcgcaggggactcgcggcgcagtaccggattgcacggctgctccgttcgccttcgctccggctgccgggactgccgcaactgctggcactggcggcggaaacaacggaaacggatgaaagaacgggacctgaggaaacgaagaatacagtgaatacggcaacaacagggacaaccgaagccaaggaaacagccggatcaacaggaccaaagcgggcaatgggagcggaagaaacggcaggcggaaattccggcccaacagacgcccctgcagacagctcagcggacggctcggcagacggcacaacagaggacccaacagaggacccagcgggcgactcggcagaaagcacaacaggcgccccaacagaggacccaacggacggcgccgtcgccgaagcggccgaactcttcgtcgaaaacggcctgtggggctaccgcacgccggaacaggtcgtcgtgccgccactctacgactgcggattcgacttcaccgaagggctggcggcggtgcggctcggagcgacatggcactatatcgacggcgcgggccggccccggatcagctgtccgggatgcgaagccgtgaagccgttccgcaacggacgcgccccggtcgtccgcggcggaaggcggctggagatcgaccgggagggccgcgagtttgatatttagccttaaatcgttatatttgcatctgcttaatacgacaccgatgcctcaactcagatatatgactccggcggagatttccgccgccgaatccctcggatcttcggccgaagcatggtcgcaggtgagggtctccgaagatttcacgcccttccagctgctgcaaagccatctggaggggagggtcgagatcggctccggcgcgcgcatcatccgatcgcgcgtatgcaactaccggatcggcgagggcgcgctcatagagggcgtcacggctctcgaatgccgccgccggagcacgttcggcaacggcgtgggcgtagcgacgatgaacgagtgcgggggccgcacggtcaggatattcgaccggatgtcggcgcagatagcctatctgatggccgtctaccgccaccggccgcagaccgttgcggcgctggagcgcatggtggaggcctatgccgaagcgggtgcgtcggagatgggcagcgtaggccgcaacacccgcatcgtaggcgcgaaattcatccgcgaagtccgcatcggcgacgaagtgtgcatcgacggggcgtcgatactcgaaaacggcaccgtctgcgacgaggcgcatatcggcgtggacgtcaaggcctatgacttcatcgccgccgagaaggcgcacatcgacaacgggtcgatcgtcgaacgctgcttcgtgggcgagagctgccggctggacaaggccttcacggcggccgagtcgctctttttcgcaaactcgcactgcgaaaacggggaggcggcctcgatcttcgcgggtccctacaccgtctcgcaccacaagtcgtcgctcctgatcgccggcatgttctcgttcttcaacgccgggagcggctccaaccagagcaaccacctcttcaagagcggcgccgtacaccagtcggtgcatctgcgcggctgcaagttcgccagcggggcctacatcatgtcgccggcgctcgaaggggccttcacgatgatcatggggcaccactcataccaccacgacacgtcggcgtttccctactcctacctaatcgagaaggagggccgcacgacgctcatgccgggggcgaacctcaccagctacggcgccgtgcgcgacatcgagaagtggccggcgcgcgaccgccgcgaacgcaaacgcgacgtcattaacttcgaagaatacaacccctacataaccgaagcgatgctcagggccgtggacacgctccacacgctggccgaagaggaccccgacgcgccgtcgtacgtctaccgcaaggcggtcatccgcgccgcggccctcaaacggggcatcggcctttacaacaaattcgtcgtcgcggcgctgggcgccatgctcgaccgcggcgaatcggccgcacgctacgacggcagcggccgctggctcgacgtggcggggcagtacgtcaccaaacgcgaggtcgaagcgatcctcgacgccgtggaccgcggcgagctgacaacgcccgaagaggtggacaaccgtttcagggtctttttcgtgcattacgacgactacgcccacagctgggccgaagggatttacgcctcgctgctggggcgcgtgcccaccgcggcagagatcggcgacgcgatcgaggcggggcgcaacgcaagggaggcgatgcgccgcacgaccgacgccgaccgcgagcgcgactgttcgctcgacatggccgtcagctacggtctggacagcgacgacgagcgcgaagtacgcgacgactattactcggtccggggattaaaatagacgcaacatgtatacacaaagcatcacacgcaaccaccgcacggcattcatactggccatagactgttcgggatcgatggccgaaagcatcctcttccggggacgcaggctcaccaaggccgaggcagtggcaggcatcaccaacgacctgctgttcgagctggtagaacgcgcccgccgcagcgacggcatacgcgactattacgacatcgccgtgatcggctattcgggcgacgacgaggtgcgctcgctgctgcccgacggcgaagagctggtgccggtgagcgccctcgcggcgcgggagatgccggtgcgtacggaggtgatcgaacaccgtcttcccgacggcagcatcgccctgcgcgagattcccgcaccgtcgtggatcgaaccgcaggcggccggacagacgcccatgtgcgaagcgctgcgccgggtgcgcgacatcgccgccgaatggaccgcacgcgcggccaacgccgagagtttcccgcctgtggtgttcaacatcaccgacggcgaggcgaccgactgcgacgacgaggagctgcgtgcggtatgcaaccagatcaaggcgctggagacagccgacggcaacgtgctgctgataaacatccacatcgccgcaggcgacgccgggcggcacgtattctttcccgaagcccacgaagccaactacacgaaccgctatgcggcgctgctgtacgactgttcgagcgaaatgccggcggtattcaacgaagccatacgcgaagccaaaggccccggcgcggtgcccccgttccggggcatgagctacaacgcatcggcggcccagctggtcaccatgctcaacataggttccatcagcgtcaaaaccgaatagccatgacagcgaccatccaacacttcacccgtgcgctgctgacgcccgacctgtcgctggcgacgctctccgacgcccgcgccgtcaccgaccgcaacggcatgccgcgcatggtacgcaccacgcggttcgccgaagccgaaatcgaatggcgcggcgagcggtggctcgccgccatgcccctgacgcccgcagcactgccccgcatcgaacgcacggcttcggtcctgcggcgcatgaacaccgaacacctgacgcaattccgcatcctgccggaggaaatgcgctggaccgacgcgctgggcaacgagcggcgcacgggactcgtcctgcagcagcttccgggccgggaattcgccgaggcactgctcacggaggacaaaacggttctgctcgcggcgctcgacacgctgcgcgaagccctgcgggagctggaattcacgcacaacaacctccgggaaagcaacctccgctggcaccggggacgaatcataccgatccgttattacgacgcccgcataggcgcggcggaaaacggcggggccgatgcggaggcgttcgaggccctgaaacgccggatcgccgaggcgcccatgccccggcagtcggtaaacgacgtcgaagcggtctacaatccggtgcggaagctgaccgggcaccgctggacgagccatgtattcgaagggctggtatgcgtcgaagacgaaggcggattcggattcgtcgatacggacaacaacccggtgattccgtcgcagttcctctgggcgggcgacttccacgaaggccgcgccgaagttcagacgcggaccggcatggggctgatcgaccgcgagggaggctacgtcatcccgcccgaatacgaaatcgtcgattacgacccggcggtcagcatcgtgcacgtccgccacggcggacgctgggcgctgttcgactatctgggccgccgtctgacggagttcggccgggaggatatgcaggagcctgtccggcaggaaccgtgcaggtccgaaatttgcagataacaacgtcacaaaacatacgacaatggaagaaacgatcaaatgcctgattatcggcagcggccccgcagggtacaccgcagctatctatacttcgcgcgccaacctccggcccgtactctacgagggtatcgagccgggcgggcagctcacgaccacgaccgacgtggagaattttccgggctatcccgacggcgtcagcggccagcagatgatggccgacatgcgccgtcaggccgaacgcttcggagccgacatccgcatcggaaccgtgacgagcgtggacctctcgtcgcgtccgttccacgtggtgatcgacggcacgacgcagatcaaggccgagacgctcatcatcgccacgggagcatcggcaaaatacctcggcctgccttcggaaacgaaattccgcggcatgggcgtcagcgcgtgcgccacgtgcgacggattcttctaccgcaagaaggacgtggccgtggtcggcggcggcgacacggcctgcgaggaggccacctatctggcctcgatctgccgcaaggtctacatgatcgtgcgcaagccccacctgcgcgcttcgaaggccatgcaggagcgggtgttcaacaccaccaatatcgaagtgatgttcaaccacaacaccgccgaggtgctgggcgacgaatcgggcgtgacgggcgcgctgctgcgctgcaacgacggcaaggaggtcaggatcgacatagcgggattcttcctcgccatcggccaccatcccaatacggagcttttcgccgatcagctgacgctcgacgcggaagggtacatcaaaacggaagcgggcacctcgaagaccaatatcgaaggggtcttcgccgcgggcgacgtgcgcgacccgcattaccggcaggccataacggccgcggcgtcgggctgcatcgcggcgatcgactgcgaacgcttcatcctgagccgcgcagagtaaaccgaatcacgcagagcgaacaaaaacaggcaccccgcatgagtttcagcgtcaccatactcggatcgtcctccgccaagcccaccctgagccgccatccgtcggcccaagcggtcaatgtgcacgagcagtactatctggtcgatgcgggcgagggggtgcagcagcagctgatccgctgcgggatcaacccgctgaaactgcgcgccgtgttcatctcgcacctgcacggcgaccatgtcttcggactctttccgctgatctcgacgctggcgctctacggacgcaaaaccccgctgcgggtattcgccccggcgcctttcggcgagatactggcctgccacctgcggttttttgacagcgagctgccctatccggtggtctggaccgaggtggacacgatcaagcacgcgctgctgctggaaaaccgcacgctcgaagtgtggagcattccgctgcgccaccgggtgccgacggcgggattcctcttccgcgagaaggagccgccgctgaacgtcgagaagttcaagatcgcgaaatacggccttacggtcgcgcagatcaccgccgccaagcggggcgaggagatcgcgctcccgacaggcaaggtcatacccaacgcggagctgacctaccgcccctatgcgccccggtcgtacgcctacctctcggacaccaacttctcggcgaaggccgcgacgctggccaagggcgcggacctgatgtaccacgaggcgacctacgccgccgccgagcagaaaacggccaaggagcggggccactcgacaagcgccgacgcggccaaagccgccctaaaggccggagccaagcgactgataatcggacactattcgtcccgctacaagaacgaaaacatattggtcgaagaggcccgcgcgatcttcccggagacctatccggccaccgaaggcgtcaccttcaccatagagaaacaacgatgacgaaagccgaaatacaactcgtccgcgcgctggccgacaaacgcggacgcacggaacacggactgttcgtagccgaaggggagaaactcatcggcgaactgcgcggctcgcacctgaaggtccgcaagatcttcgcgctggagggcgtgttcgcagggccggaggtcgagaccgtcgccccgcgcgacatggagcggctgtcgctgctcaaaaccgccgccaactcgctggcgatcgtcgagacgccccgctacgggctggacatgcggtcgctcgcggggcggctgacgctggcgctcgacgacgtgcagaaccccggcaacctcggcacgatcgtccggctggccgactggttcggcatcgccgacatcgtctgctcggaggcttcggccgactgcttcaacccgaaggtcgtgcaggccacgatgggcgcgatcctgcgggtgcgggttcactacaccgatctgggagcgtttctgcacgacgcgggagccgccgggctgcccgtttacggcacgtttctggaaggggagaatatctacggcacgacgcttacggaagagggcgtcgtcgtcatgggcaacgaaggccgcggcatctcgcaggccgcggcgcgcgccgtgacgcacaagctcttcatcccgccctacccgaccgaccgccgtgggtcggagtcgctcaacgtggcgatggccacgggcatcgtatgctcggaattccggcgtcgggcaggcatgggaagcgggaaataggccgccgcaccacaaacaaaagactgccgggattactcccggcagttattttttgcgacatccggcaaggcccgcggcgcgggaaccaactgcggcacgccgcaagagaggcagcggcacaagggaggttcggcaaaagcaggctcaacgcaaagcagattcagcacaaagcaggtcggcacaaggcagattcgacgcaagtccggcgcgacgcaagtccggcgcgacgcaagtccggcgcgacgcaaaaccgattcagcgcatgccgcccggcggcaaaccgataacaaaccggcaacagaccggcaaaaccccgcaacagaccggcgccggcaaaaggctcagcccacggcaacggcagcgtgctcctgcacgatggcggcgatccgccgcacctgcgccagcgcttcggcacactgccagcgggagaaaagcgcctccgattcgagccggccgatggtctgcacgagccggtcgacggcctgcaagagcgtctgcagttcgccgggcgaggccgagcgcaagtcggtggcggccagcagcacggcagtctcccggctgcagcgttcgaatcccgaaagcgccgcattgctccggcgccggtcgtagggagccacccataatatttcgaacatcagccggaaaaccgtatctaccagttccggattgtgtttttcagtcgtcttttgtgcgcaaggttccatctttcgggcggtttatcgaaaaaagcgcgggcagtatcaccgaatccaccatcgaggtattggacgacctgtaacgtagaatacggtaaatgcccacgccgaaaacagcgagagcatcaacctttgttccttacgttacgcgaaagtgtccaattttcgacggtaagaaaaaagccgatgcgctttaatccgaatatgtcatcagccctaacaggctgcataaaacaaaggtaggaaaaaatagtccatccgcaaaacattacggatcgccgcagtgcaaaaaaacattttaattgcatccggcctattgcagattctgaataatatgtatctttgtagattgaaatacttgtatccatgtcagaacagaaacttaaaataggcatcacgcagggcgacacgaacggcatcggctgggaggtcatcctcaaggcgctggccgatccgcgcatgacggagcttttcacgcccgtcgtatacggctcgcccaaggccgcggcctattaccgaaatacgctcgcccagaccgaaccggtgcagttcaacgccgtaacgtcggcccgcgacgcccgccgcggcaaggtgaacctcgtcgcatgtggcgacacggagcagatcgagccgggcaaagcttcggccgaagccgggcgcgccgccgtcgaggcgctgcgccgcgcgacgcaggagctgaaggaggggctgctcgacgccctcgtcacggcccccttcaacaaggagagcgtacagggcgacgggttccacttcacgggccataccgaattcatcggggccgaactgggcggggagccgatgatgatcatgtgcagcgagattctgcgcgtggggctggtcaccaagcacattccggtgtcggagatcagcggcagcatcaccggggagaagatcgtgcgcgacctgcatacgctccgccgcacgctgaaagaggacttcggcatcgtcgagccgcgcatcgccgtgatggctctcaacccgcatgccggggacggaggactgctgggacgcgaggagcaggagatcatccgcccggccgtcgtcgaggcgttcaatcagggcgtgctggcgttcgggccgttcgccgccgacgggcttttcgcaggcggaggatacgcaaaatacgacggcatactggccatgtaccacgatcagggactggcgccgttcaagacgctttcgcccgacggcgtgaacttcacggccggactctcgaaggtccgcacctcgcccgaccacggcacggcctacgacatcgccgggcaggacaaagccgacccgcagtcgatgcgttcggcgatttacgccgcgatcgacatcgtcgagcaccgccgcgcatgggccgaatggagccgcaacccgctgcaacgcgccgagcgcgagaagggcggccgcgacgtctcggtcaaggacctgccgcagaccgaaaaggaggattagcgcaggagcgacgaaaaaccgggatccgggccggaggaagaggaagaaaaggaagagcaaacgacatccgccgtatccgcccaaagattgcgggcagggcgcagcaagaacagaaacaacaaaccgggcaaaccggaggcgtattccgtctcgtaattgtggaagcgccgaaggccccgaaaacttaatttatattttatgatcaaaatcacttttcccgacggctcggtcagagaatacgccgaagggactactgcttaccagatcgcagagagcatcagccctcgtttagctgccgactctcttgccgcttcggtaaacggcgcgacggtagacatgacgcgcccgatcggggaggacgcctcggtcaaattctacaaatgggacgacgaagagggcaagcacgccttctggcacacctcgtcgcacctgctggccgaagccctcgaagccctctatccgggcatcaagttcggcatcggccccgccatcgaaaacggcttctactacgacgtcgattcgcccacgccgatcaccgaggccgaccttccgaagatcgaacagaagatgcaggagctgtcccgcaacaaggagcagctcgtccgccgcgaggtccccaaggccgaagcgctcaagaccttcacagagaagggcgaccagtacaaggtcgaactgatctcggacctgcaggacggaaccatctcattctataccaacggtgcgttcaccgacctctgccggggtccgcacatccccaacacgggttacatcaaggccctcaagctgacttcggtggcaggtgcctactggcgcggcaacgagaagaacaagatgctgacgcgcatctacggcatctcgttccccaagaagtcgatgctcgacgaatacctcgtgatgatggaggaggccaagaaacgcgaccaccgcaagctgggcaaggacctcgaactgttctgtttctcgcagcgcgtgggacagggtctgcccttgtggctgccgaaaggcgccgcgctcagggaccggctcgaacagttcctgcgcaacgtgcagaaagaatacggctaccagcaggtcatcaccccgcatatcggcaacaaggagctgtacgtgatttcgggacactacgccaagtacggcaaggattcgttccagccgatccacaccccgatcgagggcgaggagtatctcctgaagccgatgaactgcccgcaccactgcgagatttaccgttcgaagccccgttcgtacaaggagctgcccgtccgtctggcggagttcggcaccgtgtaccgctacgagcagtcgggcgaactgcacggactgacccgcgtgcgcggattcacgcaggacgacgcccacctgttcgtacgccccgaccagctgctcgaagagttcgagcgggtgatcgacatcgtgctctacatcttcaagacgctgaagttcgacaactatacggcacagatttcgctgcgcgaccccaacaacaaggagaagtacatcggctcggacgaaaactgggagaaggccgaaagcgccatcatgcaggccgccgaggagaagggactcaatacggtcgtggagtatggcgaagccgcgttctacggtcccaagctcgacttcatggtcaaggacgccatcggccgcaagtggcagctgggaaccattcaggtggactacaacctgccggagcggttcgacctgacgtacaagggcgcggacgacaaactgcaccgcccgatcatgattcaccgcgcgccgttcggctcgatggagcgtttcgtggccgtactgctggagcatacgggcggcaagttcccgttgtggctctcgccccagcaggtcgtggtgctccccatttcggagaagttcaacgactacgccctgcaggtcgcggagtacctcaaccgcagcgacgtgaggaccgaggtggacgaccgcaacgagaaaatcggccgcaagatccgcgacaacgaactcaagcgcatcccctacctgctgatcgtcggcgagaaggaggaggccgaaggactcgtgtcggtacgcgcgcagggcgaaggcgacaagggtcagatgacgctcgaaggcttccgcgacttcatcgccggaatggtgaaggaggagatcgaggccaacaaaatggaaaagaaataacgactccggtccgcatccgggacttcccctttctggggaaattccggacggcggagtttacggccgccgcaggtcacgccccggcagccggacaatgaaaaacaaaagtaattaaccactttaatactttacgattatcgcagcaccgaaaccattcccgccgaggccattcaaccccgggaataaccggccgaaaccggcagccggcaccaacaaccggtacgggcgccgcccgcccgaaaaggagaatccgcaccgcatcaacgagcagataacggctcccgaagtgcgtgtcgtgggcgacaacgtcgaacaaccgctggttttacccatacgcgaagcgctgaagctcgccgacagcatggaactcgacctgatcgagatctcgcccaaggccgagccgcccgtatgccgcatcgccgattaccagaaattcctctaccagcagaagaagaaggccaaggagctgaaagccaatcaggtgaaagtcgtgatcaaggagatccgcttcggtccgcagaccgacgaccacgactacaacttcaagctcaagcacgccaccaacttcctgaaggagggctgcaaggtcaaggcgtacgtcttcttccgcggccgttcgatcgtcttcaaggagcagggcgaaatcctgctgctccgtttcgccaccgacctcgaagaggtcgccaaagtggagatgatgcccaagctcgacggcaagaagatgaacatgatgctggcgcccaaaaccaacaagaagtagcggcggagcggttccgacaccgcgcgaagcgactatatccgatccataatcggggtcccggaagggagtccgattgtggatttttatttcatgaccgacgcaagcggcagagagacggcggcctttcacacacctgcggaagcggacctgcaggcatgcacctgcgggaacgagctttggggacgaactgcgggaacgaacttccgggaacgacgcggggacaagctttcggggacggacttcggggaggggctttcggggaggggctttcgggagcagacattcggaagcgctacgcagggaaccgccctgccggacttattccgtccgcagaaaagggattttgccgaatttcgaaatatatttacctttgcaatgaaatgattacgcaggacgacatattcgggatcacggacgacgcggcgttcgaagccgctgcactggaggtattcaggcggcaggccgcagaatgcccaccctaccgcgagtatctcgcgctggccggagtgcagcccgaagaggtgcgagcggcccgcgagattccattcctgccgatcgaaatcttcaagacccacgacgtctactgcggcggcacggagccggaggcggtcttcacctcgtcggcaacgacgggcatgacgccgtcgcgccacccgatgcgctcgctggcgctgtacgaacggacgttccgcgcagcattcggcacgttctacggcgaaccggcgcagtggagcctctatgccctgctgcccaattacctgcgccgcaaggggtcgtcgctggtctacatggccgaccggctgatcgccgactgcggttcgggcggcttctacttggacgactacgacgggctgctggcggccatgcaggccgatccgaagcccaaaatcctgctgggcgtaagctatgcgctgtgggatctggcggagcgttacgccccgaagctcgaaaatacggtcataatggagacgggcggcatgaagggttaccgcgaagagattcccaaggaggagttccacaaaatcctgtgcggcgcattcggcgtcggcgcgatacactccgaatacggcatggccgagctgacttcgcaggcctattcgcagggcggcaacctcttccgctgtccgccgtggatgcgcgtcacgacccgcgacgtgaacgatccgttcgatccgcagcccgcgggaacgcgcggagggctgaacatcgccgatctggcgaactggtggtcgtgcgcgttcattcagacgcaggacgtgggccgggtcgatgcccgcggagcgttcgtcgtcgaggggcgcatcgatcacagcgacatcagaggatgcaacttactggtacagtgaacctaaacgggtttccgccgcaaggcgggcagcccccgatataaaaccgaattatgaaaacagcagcattcgtccccatacggctcaacagccagcgcgtcagcggcaagaacctgcgtccgctgagcgggtcgccgctcatgtgccacatactccgaacgctgaccgaggtcgagggaatcgacgaggtttacgtctattgcagcgacgagcggatccgcgaattcctgcccgaaggggtgcggttcctgcgccgcagcgaggagctggaccgcgacacgacgctgggacgggagatttacgacagcttcaccgccgaggtcgaagccgacctctatgtgctggcgcacgccacgtcgccctttatccgcgccgagaccgtcgcggatgcgctccggaaagtggtttcgggcgaatacgactcggcattcagcgccgaaaagatacagacgttcgcatggtacgaggggcggccgctcaactattcgcccgaaaacatcccccgcacgcagaccatcgagccggtgtatatcgaaaccagcgccttcttcatcttcccgcgggccttgtggaccgggcggcaccgcaggatcggcgacaggccctacatggcggtagtggaccgcatcgaggggttggacatcgactatccggaggatttcacgatggccgagatcatcgccgcaagccgcaacctgcccaaataaattccggcgcatttgccggtacatcagacgatacgaaaaaggaggaatttcgattcctccttttccgttttcatcgggcagctcactccgggttccgttcataggcgtcgatcatcgaaccgcgggtgcggttgacgatccgcgcaccgagcgcggcggcataatcgcgcaggacttcgtggccgcggaacagttcggcgacctcggccagatactccgccatcgtatagggcacatggggaaccttcttgtaaataggctgcggcacggcggcttccgctccgtcgtaatagtggcggtcgatgcggcagagccggttcccatcgtccacgcagagtccgtccaacagcgtatggtccacgccgtaaagctcgatccgcttataccccagcagcagagcgacgtattcgccgacctgcaccaccgttccgaaattggcgcttcccagcccgcggcggaaaagccaaaattcgagacttctgaaaccgcggtacatctgggtatggaaccggacgatgcggatattggaattgggcagcgcggcgcggtagtcgaagccttcggggttatagtactgcacgtagaggttcatcggccacgcaaccttgcgggcgagcgtcgcgtaaagcgcccggacgcggtcacggcatgcactgtcgcggaagaacatcgggtcggaaaggacgtaatacttcggcttcacgacctcgaagcggtcgtcttcggcgaaaaaattgacagcaaggaaatcttcggtttcgtattcgcggcgttcgatcagccgcggcaggtcatcggccagcgaggggccgttgcccagaatcaccatcgactgcgccggccggccgaccgttccggcacgcccgacgtagttgcggaaattctccttgactgccatcacggcgaaatacaacgccgtgtcgaacgagttgcggatgaaagcgatgagtttctcggctgcggtcatagtgcgttattcgttaattcccgtccggaacgggaagagcggaacgggagcggcggaagggactccgcgcgcatagggccggccggtttcagcccggaaggtcgcccgaagagtgccgcgcacccgttaattatttgcaaatgtaataaaatccatacacgattaccagtaactaggaaaaaataccgattgtctttatcggatcgggaaatgctagcgtttagtcatgatcacgatatattccttgaccatcgtactgacttttttgcccttttcattggtcggactcgttttactcggcattcttttattgggaatggctctcacaatggttatttcatgctggaagccattttgctcgaacatctccgcagtgaaatagtccaaggatatttgaatgccttttacggtccggtttcctacgacatagcataccctgccgccgcgtctcaatttccttgcgacattccttatggaggcattgtaatcattcaagaaggatacgacctccagataccttttcttatcgaggttccggatcgcctccagttcggtttttatggaagaggtttcgaacagcacctcccgggccgttttaccccccatcagataattgtccagcgtcttggcatgctcaaaaccaaaccattcgttcgcccaacgggaaaactgtccgtaggcgaccgtagtacggctatccccatagggaggagaagtcaccacgatgtctacagagccgtcggccaccacgttattggggaaaggtcgggaggaatcgaacgcataggtattcacacgccccttgttttcaatcccgcaatacttggacagaccgattgcatttctacggactttcgcctcgaacaatccgaatacatccggatggaaggtgcgtatcttttcctcctgcattctaaatcttttgaactctccgtttctcgtaaaagagacgtcccggacggtttccgccaaggcaagctcgaaaaacgacctgatctcttcggatacaagatcaatgttctgctgtatgaaagagagtttcagcaaagattccctaccataccaatagtcccaattggtgatatgcgtaaagtccctattccggacattatcctccgcatagcccgacaatgcattctgcaatgcaccgaacgtcttctcgatttcgttcggatcgtaggaggtcgtcttgaccttggcaataagccaagccaaagggtttatatccgttcctatggagtttattcctgcaatcgaagcttcgaccagagacgttcccgaccccatatagggatcgaacagcagaccgacttttcccgccggggcatattcttcaatcaatctcctagcgatctgggggatcatcatcgccgggtagttatggtacccatgcgtatactctttggtgtcggagcctttgaagtcccactcatcggtctctagtctcttatacatcttttccatcaaacaagatacaaatatacaaaaaaagaggtatcttagcatcacaaacccaatctcatgaataatcgagaaaaaattatcgccgcctttcaggatattaaacgacgcggatttattccgagtcaccgcacgcacgacacgggtatcgggaaaacctttgaagatctaatcggaatcatcgaaaacaacgaacgccgaccagacctgaatggatatgaaataaagaccaaaagagagacctccacgtcttactcgacactgtttaccaagagtccgtcgtatcccaagagggcaaatgcatacctacgggacagatacggagaggtttacgaggaattccccggtctgaaaaaaatccacacatccatattcgcccaccaagggaacagctgttacggagtgcactctttcagactcgtcaacgatcgggactgccggcgcatagcaatcgctatttccagcctgcaaaccggggaaatcctcgacaacgccatatactatacttatgacgacatcgaatacgccctgaacaacaaactagacaagctgctgttcgtttttgcggacactgcaatacagaacggacaggagcatttccactacaagagagccgagatttacgaaaatccctcgctggaaaacttcctcggcatggtagacgaagggaagatcatgtacgacatcaggatcggctcctataagaatccggcaaaacgcaactacggcaaaccccacgaccatggcagcggtttcagaatccggccggtcgatttgacaagtctgtatgcagaccagataatcgtcgaatagcgattatttcgtccgacgtttagaaaaactgcaaaagatcggtatcttcgcaataaatcaaaccgctaaaaatggcatccgcaaccatctcggtcatcatacccctctacaacaaggaacgcgaaatcggcgacaccctgcgttcggtgctggcccagacgctgccgccggcagagatcgtcgtcgtggacgacggttcgacggaccgcagcgcagaaatcgtgcgcggcatccgctcgccgctcgtgaaactcgtcacgcagcccaacgccggcgaatgcgcggcccgcaaccgcgccatcgccgaatcgacgggcgactacatcgccctgctggacgccgacgacacgtgggagccgggatttctggaggagatcgccgcgatgatcgcggagtttccgggctgcggggtctactcgacggccttcaacatcgtcagccacgacgggcgtttcccggcccgcaccccttcggaacgcggtgtggtcgccaacttcttccgcgactcggcgcaccggtacatctcgatcccgtcggccagcgcagtaccgcgcgcggtcttcgaggcggtgggcggattccccgaagggatgaagatcggcggcgacatgtatatgtggatcaagatcgcccgccgctacgcggtctgcttctcgcccaagccgctggcgaactactcgaaggtcgcatcgaaccgctcggcgtcgagctacacgcccgaacggacgcgctattcgttcgaggaactttacgacccgtcggcgcctgaggaatacaacgaattcgtggcccgcgcggcattgggcaaagcgctcatcatcagcgccaagggaggcacgaaagaggcggcgcgcgcggcggagtttttcggctacaccaagacctaccgccgcacgctgcgcaaggtccgcgtcctcaacgccctgccccgcagctggcgcgctccgctgatcgggctatacaacagtctggcatggcgcatcgcccgcaagggtctgtaaatcgaatactgcttaaaatgagacacctgctgaaatccgccgcggcaaagggctttcttcttacggcccttctgctcttcgcggcaagcatctgccgggcgcagtccgcggcgccggagaccccggattacaccctgcgttcgggcggcatggagcgcacctacaaactgcacctgcccgccggcctgccggagaacgccccgctggtcgtcgtcctgcacggctacggcggcaacaacaatcccgaccgtttcgccatgaacgccacggccgaccgccacggtttcgccgtctgctacccgcagggcgcgaaagacggacgcggcaagagctgctggaacgtgggatacccctttcaggccgacatgaccgtcgacgacgtgcggttcctgaccgagctggtgcgccatttgcagaaaaagcacggactgagccggcacaacgtcttctgcacgggcatgtcgaacggcggagagatgtgttaccagctggcggcgcagcggccccgcctgttcgccgccgtggcgccggtttcgggactgatgctcgactggctctacaaagcggaccggagtacggcgccggttccgctcttcgaaatccacggcacggaggacaggacctcggcatggctgggcgatccgcagaacaaaggcggctggggagcttatctgcccgtgccgctggccgtacattactgggcggcgaagaaccgctgcaccgtcatgcagaccgacacgctgccggcaaaggcacccggcggccgcacggtgatcgcgcaccgcttcacgggcggcaccgggggcagcgaggtgtggctttacgaaatcgtcggcggcaaacactcgtggggcgagcaggacatcgacacgggcgaggagctgtggaaattcttcagcaggttcgtaaagtaggcggaacgccccccccgcagggccgaaagagaagtgctccgaacgcgggcggcaataaaaaaaatggttccggaaaaaatccggaaccatttcgttttcaggaagcggcgcatccgaacctccgctccggcggtcttgcggctgctctcagttggcgaaagtcaggcccttgtcgtcggcgccgatcttgatcggtttttcgcggttgacgtcgccggccagaatccgtttcgagagttcgttgacgatgtaacgctggatcgtacgtttgaccggacgcgcgccgtagagcgggtcgtagccggcggcggcgatccattcgcgcgccttgtcgctgtattcgaggcggatgccgttctcggccagcatccggcgcacggcgcccagctggatgtccacgatgcgctcgatatcccggcgcgtcagcggctcgaacatcacgatctcgtcgatacggttcaggaattcgggcttcagctgctgtttcaaaaggtcgatgacgtccatccgggtcctctcgaccacttcgggcgcgagcttctcgccgctgaacgccgccgcgaaattctcctgaatgatatgcgatcccatgttcgaagtcatgatgatgatcgtattgcggaagtccaccgtgcggcccttgttgtcggtcagacggccgtcgtcgagcacctgcagaagaatattgaagacgtcggggtgcgctttctcgatctcgtcgagcagcacgaccgaatagggcttgcggcgcacggcttcggtgagctggccgccctcgtcgtaaccgacgtatcccggaggcgctcccaccagacgcgacacgctgtggcgctcctgatactcgctcatgtcgatacgcgtcatcatcgagtcgtcgttgaagaggaactcggccagcgctttggccagctcggtcttgccgacgcccgtggtgccgaggaagatgaacgagccgatcggcttgcgggggtcgttcaacccggcgcgcgaacggcgcacggcgtcggagatggcggcgatggcctgctcctgaccgatgacgcgccggtgcaactcgtcctccatgtgcagcagtttctcgcgttcggaagccagcatgcgcgtcacggggatacccgtccagcgcgacaccacctcggcgacgtcctgcgcatcgacctcctccttgatcatcgagccgttggccgacgccagcttgtactcctcctgaaaggcggcgatctccttttcggcctcctgaatcttgccgtagcggatttcggccaccttgccgtagtcgccctgccgctcggcctgctgggcctcgatcttcagctgctcgatccggtccttgttctcctgaatcctcttcagcagatcgcgctggccctgccatttggcacgcatctcggcgtctctggatttcagttcctcgatctccttggtgagctgctccacacgctccctgtccttctcgcggcggatcgcctcgcgctcgatttcgagctggcgcacacgccggtcgagggtgtcgatctcctcaggcacggagttcatctccagacgcaggcgcgaagccgcctcgtccacgaggtcgatcgccttgtcgggcaggaaacgcgaggtgatgtagcgcgtcgaaagttcgacggcggcgacgatcgcctcgtccttaatgcggacctgatggtggttctcgtaacggtccttcagtccgcggaggatcgaaatggcgtcctcctgcgtcggctcatcgaccatcaccttctggaaacggcgttcgagggccttgtcctgctcgaagtatttctgatactcgtcgagcgtcgtggcgccgatggtccgcaggtcgccgcgcgcaagcgcgggtttgaggatattggcggcgtccatcgcgcccgacgacttgccggcgccgacgagggtgtggatctcgtcgatgaacagcagtatttcgccttcgctggcgacgacctcctgcacgacggccttgagccgctcctcgaactcgccctgatacttggcgcccgcgataagggcgcccatgtcgagcgagtagatcaccttcgacttcaggttttcgggcacgtcgccgtccacgatacggtgggcgatgccctcggcgatggcggtcttgcccacgccggcttcgccgaccagaatcgggttgttcttggtgcggcgcgagagaatctgcagcacgcgccggatctcctcgtcgcggccgatcaccgggtcgagcttgcccgaacgggcctgttcgttgaggttgacggcgtacttgcccagcgcgtcgaactgctgttcggaggtctgcgaatcgaccgtcgcacccttgcggaagatacggatcgcttcgagaagctccttctcagtggcgccgctgcgcttgaggatgtcggccgcctgtccgcgttcggccacgagacccagcagaaggtgttcgaccgaagcgtatttgtcgccgaagttcttggtgaagtccacggcgcgctgaatcaccttcgaggtctcctgcgcaaagaactgctcgccgccgccctcgacccgcggcagggagccgacggcgcgctgggtttcgtcgcgcagtccgcgcacgttcacgccgacgcgtcccagcaggaacgtggccagcgaatcgtcctcgcggatcagcaccgcgagcagatggagcggctcgacagcctgctgtccgcgctcccgcgcaaggttgagcgctgcctgcagcgcctcctgcgccttgatggtcaatgtgtttatattcataatcgcaaagttaaatttcacacggtccgatggttcgcgtccggggccgcaacctgcggcttaccgccgcgcatgcaagtccgactcaccctcaaatccccgcccggcggggactcgtcgcattgcgaccggatcgcagacgcaaaccattcgtcatcaacatccgcaaaacacctgccaacctcatttttcggtcattgtgtcaccttttgtcacaacacgctgtcaaaatgcgccaatttggcgcaacggcggacagccgcgcagggacggcggaggggacaatttttaatcccgaattttcaaatcttcgctcatatttcttatctttgcggaactatgagtgattttatcgtcagcgcacgcaaataccgccccgcgaccttcgcctcggtcgtcgggcagaaacatattacctcgacgctcaaaaacgccatcgagcgcgcccagctggcccatgcctacctcttctgcggtccccgcggcgtgggaaagaccacctgcgcccgcatcttcgcaaaggccatcaactgcctgagccccaacggcgcagaagcctgcaacgagtgcgaatcgtgccgctcgttcaacgagggccgctcgctgaacatccacgagctggacgccgcgtcgaacaactcggtggaggacatccgcacgctgatcgagcaggtgcgcatcatcccgcaggtgggccgctactcggtattcatcatcgacgaggtccacatgctctcggccgcggccttcaacgccttcctaaagacgctcgaagagccgcccgcacacgcgatcttcatcctcgcgacgaccgagaaacacaagatcattccgaccatcctctcgcggtgccaaatttacgacttcaaccgcatccgcgtcgaggacagcgtcgaatacctcaaatacatcgccggacaggagaacatctcggccgacgaagagtcgctgaacctcatcgcgcagaaagccgacggcggcatgcgcgacgccctgtcgatgttcgacaaggccgtgtcgttctgcggcacgacgctcgactaccgcaacgtggcccagacgctcaacgtgctggattacgacacctatttcagcgttacggagatgctgctcgcaggcaactacgtcgatgtgctggtcacgttcgacacggtgctctcgaaaggcttttcggggcagaccttcacggcgggactcaaccgccacatgcgcgacctgctgatggccaagcgccccgaaacgctgcggctgatcgaaatgaccggaacgctgctcgaacgataccggacgcaggcgggcgcctgcaatgtcgagttcctgttcggagccatctccattctgacggagcttgacgggaagatccggcaatcgtcgaaccagcgattgctcgtcgagctgggcctgatgaagatcgcaggactcggccaaaaaaaaaatgacgatctgacctcctccggggagtattccctccccgccctctcaccccgtacggccgcaggcgcggcggcgactccgacggctgcggcacgacccgcgccgcagcagagcgcgtctacagttcaggcgcagacggtttccgcggcaggacaaacgacgccgggtacgccccagtcgggtgcgggagcaacggtgcaggccgcagttcggccggaagccggacaaaccgcggttcgaccggacgcagggcaggccgcaactccaccggcggcaggacaaacggcaccgtccgcagttcagccgggagcaggacaaacggggcaaggcactgttcggccggaagccggaccgacggcatcggccggcataccgcaggtatccggattttccgtacgcggaaccgcgatgcagacggcgggtccgcaggcagcggaagtttccgctcaggacaacgctcggcaggctgcggcagccggacaaacgataccgggcggagcagcgaatcccgcagcgcagggaggaatggcgaatccggcgatgcagagcgggacaccaaacccgaccgcgcagggcggagcggcaaatccggcggcgcagggaggaacgacgggaccgacggtactgggcggaacaccgcatccgacggcacaaggcggagcgaccgtcccggcggtgcaaaccgcaggcgaaacaaccgctgaaacggctccgcagcccgcaccggcaaagcccgcagtgcagaccgcaccggctccggcacggcgtccgctcatatcgggcgcttcgctctcggaactgctcgcctcggcgggcagcgatcccgacgaagagctttcggacggcgaaacgcccgacgaagccgaagtcgtaaccgtcgatccggagtgcgccgaaaagctggagcatgcccgcagcaggatactgaacctcatcaaggagaaacgcccgcgcttcgtgccggccttcgagctgatgacgttccgcgacaacacgatctcggtgagcgtgccgacgaccgaactgcgcgaagagattctgcgcagcaagacgggaatgctgatgcgcatcgccgaactggccggaatagagggaatgatcgaattggaggtcatcgtaaacgaggagatacgggcggtgcggccgatcaaactcgaagaccgggtacggtacattacggagaaaaacccgctggtggcggagcttcgcaaggcactggatctggaggtggaataacgcaccgatttacggcgcacgccgcaggaccggttcaggcgaacggccgcagacggaggcgcatgctgaccgccggcacgaccggccggacgccgtacaatattgataatcaagacaaagaaacaataaaatggcaacaaagaatttcatcgaagaactcgaatggcgcggcatgatccacacgatcatgcccggcgcaaaggaacaactcgaaaaagagatgacgacggcctatctgggcatcgaccccacggccgactcgctgcatatcggacatctggtgggcgtgatgatcctcaagcatttccagatgtgcggacaccgtccgctggcgctcataggcggcgcgacgggcatgatcggcgaccccagcggcaagtcgcaggagcgcaacctgctcgacgagccgacgctccgccacaatcaggaggcgatcaagcggcagctcgccaaactgctcgacttcgagtcggacgcgccgaatgccgccgtgctggtcaacaactacgactggatgaaggacatctcgttcctcgaattcatccgcgacatcggcaagtgcatcaccgtcaactacatgatggccaaagactcggtcaagaagcgtttcagcggcgagggcgacggcatgtcgttcaccgaattcacctaccagctggtacagggcttcgacttcctgcacctctaccagacgatgaactgcaaggtgcagctgggcggcgccgaccagtggggcaacatcaccaccggtacggagctgatccgccgcaagctgggcagcgaagccgaggcgttcgccatcacctgcccgctcatcaccaaggccgacggcacgaagttcggcaagaccgagagcggcaacgtatggctcgacccgcgctacacctcgccctacaagttctaccagttctggctcaacgtcagcgacgaggacgccaagcgctacatccgcatcttcacgctgctggaccgcgagaccgtcgaggcgctgaccgccgaacatgaaacggcgccccacctgcgcatactgcagaagcggctggcgcaggagatcaccacgatgatccactccaaggaggagtacgaaaaggccgtcgaggcttcggcgatcctcttcggcggatcgacctcggaggcgctgcgcaaactcgacgaagagacgctgctgcaggtgttcgagggcgtgccgcagttccgcatcgcccgtgccgagctggggctgccgttcgtggatctctgcgccgagaaggcgcaggtcttcccctcgaagggcgaatgccgcaagatggtgcagggcggcggcgtgtcgctcaacaaggagaaggtcgccgacgcggcgcgcgaggtgaccgaagcggacctgatcgccggcaagtacctgctggtgcagaagggcaagaagaattacttcctcctgatcgccgaataagatggagtaccgcatcgttctctcgcggatggagttccgggcgctgcacggctgctacgaactggaacgcaaggtcggcaaccgtttcacggtcgatctggaactgacggcagagctgggcgacgccgccgtgcaggacgacgtgcgcaagacggtcaattacctgacggtctacgaagtggtgcggatgcagatgcgcatcacgcagcacaccatcgaacgggtggcgatgaacatcatcgaagcgatttacgccgccttcgcgcaggtacggcatgtaaaatgcaccgtatcgaaactggcgccgccgctgggcggaaagcttgagaaagtgagcgtcgtgctggagaaataggacgggtgtgcgccatgcgcgcacccgtttccgataataaacaggttaggttatgcatcataaggagagtcgcgccacgctgggtggcaaattgagcgccgtgctcgtcgcggcgggcagctccgtggggctgggcaatatctggcggtttccgtacgtcgccggagacaacggcggcggagcctttctgatcatctacatcctctgcgtactgctgctggggctgccgctgatgatcgcggaattctccgtgggacgggcgtcgcacctcaatgcggtgggcgcctaccggaagctgaaccgccgatggagttttctgggctacaacggcgtgctggcggcatttctgattctgggattctacttcgtggtttcgggatggacggccgaatacatggtgcactccgccacgggcgagatcgcccgctactctacggccgaggagtacaaaaacctcttcgaaaccttcatcagcaatccgtggcggccggttctctacacctgtctgttcgtgctggcgacccacttcgtgatcgcgctcggcgtgcagaagggcatcgagcgttcggccaagattctgatgccgctgctcttcgtcatcctgatcatcctatcagtccactcgctgctgatgccgggcggcgaagcgggactgaaattccttttcgctccggatttctcgaaagtgacgcccacgacggtgctcgtcgcgctggggcaggccttcttctcgctctcgatcggcatcgggacgatggtcacctacgcctcgtatttcaagcccgacaccaacctgcgccatacggcgctcaacgtcacgatcctcgacaagctggtagccgttctggccggcgtggtgatcttcccggcggtattcagcgtgggcatcgagccttcgtcgggtccgtcgctggtgttcatcaccctgccgagcatcttcaacgacatgcccctgagcatggtctggtcgtcggtattcttcctactgctggtcgtggcggcgctcacctcgacgatctcgctgcacgaagtggtgacggtctacctgcatgaagagtggcacctgagccgcaagaccgcggcatggctgacgaccgccgcaacggccgcgctcgcatcgctggcgtcgctgtcgctgggcgtgctgagcggctggacgatctgcggactttcgcttttcgactcgcttgacttcctgacggccaacatcctgctgcccgcgggcggattcttcacctgcgtcttcgtcggctggaaactcgaccggcagatactcagggaccagatcaccaacaacggggagctgaaattccgcatttacggcgtcttcatcttcctgctgcgctacgtctgccccgccgtgctgctgctgatcttcctcgacaacctcggcgtattttaaccgccggaccgacggcaataccaaaacctgaaaccaataacaacccgaaccatgaaacatccgctacttctactgctgatctgctgcgggctttgcaccgcagtttccgcccgtccgatccggggaaccgtcaaatgcggcggcaaaccgctcgccggagtcgccgtaaccgacggctacaccttcgcgcaaagcgacgcgcagggagcgttcgccctcgacgccgacgacgaggcgttattcatcagcgtcgtgaccccggcggggtacatcgcaccgctgaaagagggcgtcccgcagtttttcctcccctacaccccttcggccaaacgcttcgacttcgagctgcaggcgtggcccggaaccgcggcatgttacgaactgctggccatcgccgacccgcaacccaagaccgacgagcatttcgaacggctccgcaccgagataatcccgccgctgcaggctgcaacagccgcgaaaaaggcgcagggagtcgatcaggccgtcattctgctgggcgacatcgtatgggactcgccgcagttgttcgccaaaatcagggagcagttcgcatcgctcggaatccccgtttacggcgtgatcggcaaccacgaccacgacctgaacaaattcaccgaccgcgaagccaccgaaaactaccggtcgcatttcggccccacgtattacgccttcgacatgggccgcacccactacgtcgttctcgatgacatcgtctaccacggcgcccgcaaatacgacgagcagatagactcgatgcagctgcgctgggcggcggcctacgccgaacgtctgccggcgggttcgcgcgtctgcttcgcgatgcacgctccggccatgaagtcgtggcgcgacgaacgccgcgtcatggagtcggccgaaaccctgatggacgcctttgcggaccatgaaatccatttcatatcgggacatacgcacatcaactcgaatttcgacatccgcgaaggcgcgatggaacacaacgtggcgcagatatgcggcaacctctggcgggacccgatcaaccgcgacggcacgcccaaaggctggcagcttttccgcgaatgcggcggggatttcgcgtggacctaccaaagtctggagatgcccgaagcccggcagctgcgcgtatggggtcccggcacggcggaggactaccccgcttcggtaatcgccaaggtatggaactgggattcctactggacggtcgtatggtatgaggacggccgctaccgcggctccatgcagcggatctggtgcaacgatcccgactacatcgccaacatcgactcgctgaaggccgccgggaaaacggtatccaagtcgcagcggccgcgcacgacgcacttctacttcaaggcccgcccttcggcatcggcccgcgagatcgaagtcgtcgccaccgaccgttccggccgccgctactcggagcgcataacgctcccgacaaaggaataggacaaaagacaggccgccgcaagcagacaaggcggacggcaaacagacacgcagacaaggcgctgcggacagacaaacctgacacagacaaaggcagacggcaaacagacacacagatagccacctcagacagacacgcagacaaggtgctgcggacagacaaacctgacacagacaaaggcagacggcaaacagatacacagaccgcagctgcgaatgcggccgcctgagaacgaaaaaaacggagagtcgcacaactctccgtttttcatgtatctgcgtcgctgccgatcagttgatattccgccggtcgggttcgtggtccggcgaagcggcttccatctcgatctgcagtttgaccatattgacggccgtggcagcggcttcgtcgcccttgttgccgtgacggcctccgcagcggtccaaagcctgctgcatgtcgttcacggtcagcacgccgaaggcaatgggcatgttccactggatttgcagctgcgtgatgccctgcgtaacgccctgacagatgaagtcgaaatgacgggtatctccctgaatgacgcagcccagcgcgatcacggcgtccacgtcggtatattcggcgaagaactgcgcgccgagggccagttcgaacgtccccggaacatacttgatctggatgttcaggtcgggacatccggcggcgcggagcgtccgcacggcgccttcgagcagggcttcggtgacctcgcggttccactcggccacgacgattccgaaccgcatatccgcggccgaaggcaggggtgagtcgaatttggaaaggttgtgattcttggtcgccatagtcccggttatttcacgctgccaaggagcttctccgcctcacgcgcatccgtcgatgcgggataggaggtcagaatctgctcgtaaaatgcggctgccttttcgttgttgccctgagcctgctcggccagacccgccttgcgcaggtacatcggtgccgtcaggttgttgtcggcggccttgacggcctgctcgtagaatttcaccgccttggcgtagttctgctgctcgacggcgatgtcgccctgcaggcccagattctgggcgttgatgagcgctccggggatgcccttgaccggcgaatacttcgccagatatttggcggcgttctccagatcgcccgtcttcaggtaacagatacccgcatagtgcttggcgaggttgcccgaaggcgtcgaaccgtactcttcgatcacgtcgaggaagccggcgccgttggcgtcgccttcgagtgcgagctgataatccggattctgctcctcgaaacggtactgagcctcggcgatccgctcggcggctttggtggcgcgaggggctacgatcagtgcgcggtatccgaaaataagggctgcaagaaccagcagtcccagaaaaatatacgccatgttacggccgtttttctcgaagaaaagctcagttctgttcattgcttcgccgagggtctcctgctcggctacatgctgctttgccatatgaaaaatatcttgttttagttaaatttcggtatgttagtctgcaaagatacaaaactattcagaatgtgcaatgcgctgtccgctttttttgtatctttacaaaaaacagacggcgccccgcacgggcggcggtccggcaaatcgcaaacaagtttgcatttgcactcaccttgcattatctttgggctatgtttctgaagaaaatatcgctgctgaatttcaaaaatatcgagcaggcggaacttgccctctgccggggcgtcaactgtctggtaggcgacaacggagccggcaagaccaacgtcatcgacgcggtctactacctgtcaatgtgcaagtcgtcgctgcccatgaccgacgggcagagcatccgccacggcgccgacttcttcctcgccgaagggcaatatctcaccgacgggggaaagagcgaaaacatcgtgtgctccttctcgcgcaaaggcggcaaagtgctcaaacgcaacggcaaggagtacgaacggctctcggaccacgtggggcttgttcccgccgtgatcgtatcgccggcggacagcgccctgatcagcgacgccgcggacgaacggcgccgctacctcaacgccttcatctcgcagctggaccggagctatctggccgccgtgatgcgctacaacgccgtgctggccgagcgcaaccggctgctcaagaacatgcccgacgagacgatgctgcagatttacgacatgcagctcgtcgaacagggcgagcggattcacgcccggaggcgggagttcgccgagcggctgcaacccgtcgcggcggagtattaccgcatactttcgggcgaccgcgagcaggtcggactgcactacaaatcggagttgaacgaccgtccgttcggtgagattctcctcgccgcgcggcagaaggatctggtcaacgagttcaccacgtcgggcattcaccgcgacgatctggtgctccggatcggcggctaccccttgcgcaaatacggctcgcagggtcagcagaagtcgttcctgatcgccctgaaactggcccagtacacaatagtcgcgcaggagaaaggcgagaagccgatcctgctgctcgacgacctgttcgacaagctcgacgcggggcgcgtggaacagctcatacggctggtgtcggaagattcgttcgggcagatcgtcattacggactgcaaccccacccgtctgcgccggattctggacaaggccggcggagcgtactccctcttcacggtcgaaaacggcggcatcgggcaggagaccgcaacggccggagcgccggcttgcggcgggcagcttccggccgaagagcgcgcgaaggaagcagcggaccggacgcggcatgcagggccgcaggaggctggggctgcggaaggaatccggatggcagcggtgcaaggcgaagcttcggaggatttacgcaacgcggcgtccgcaggcgaaaaatccggcggaaaggacgtccgcggaacagatacggcagacacggcatccggcggaaaggagggagcgcgatgagacggaccaagacgatgctgatgggcgacctgctggaagagtttttcaaacgcccctatgtcgctgccaaagtcgccgaagggaagctgcccgacacatggcgcgccgtcgtgggcgaccgcgccgcagacttcaccacggaactgaagctggaaaaccacattctctatgcccgcatccagtcgagcgtgcttcgttcggaactcttctaccagcgcgaagcgctcaaggaggagctgaaccggcgttccggcgtccggatcgtcaatgcggtgattatccggtagactcccggaaggtgcgggcgacacagatgacacaggtaaacacgggtaacacgggaggtgcgggtgacacgggaggtgcggaaaaatactggagcaacggcaaataaaagagataagaacacggcaggcacggaaaatacaggagatacgacaaaatacgggacacacgaaaaggctgggacagagacagagacagagacacaaactgagactgaaacaaattgaaacaaactgactgcctgagaaacacggaaaatgccggggcatactttccgccccgctccggatcacacaaaaaaagatgcgcctgatgagggcgcatcctttttttatccggccgggccgaccgggcgaaccggtcattccgtcccgcggggattactggataatcgcggcgcggttggcggcctgaaccttcttgaagggatcgggggagttgcccttgccctcgtaattcaactgtttgggattcacgcccttcgatacgaggaagtcgtaaacccgcttggcgcggtgctcggcgacgcgcttgttgccggcggcggtacccgtctgctggtcggcgtggcccacgatctggtaaacggcatccttcgagccgctcttgatctgctcggcgatcagctccagacgcgtcttctcctgcggcgtcagcaccgacatgctgtaatcgaagagaatgatcgaagtgtcggccagagcggcttcgtcggcggcgacaaccgttgcgacggcagctgctgccgcggcatcggcggcggcgttctgagcggcggcagcctgcgcctgagcggcggcgagctgctgggccagctgggcgttctcaagctcggcggcttcgacagcggccatgcttgcggcaacggcgtcttggaacgcctgaatgtcggcggccgtatagcccgctacgccgcgctgccagccgcgcttgttaaagcggtaggtgaagcccgccgtagcgctgaagccgaacaggtaggaaccgtccgtcttcgcggggcatacgcgcgaaggcgccagcatgcctttcagctcgatattgaagtcgaacgaacgcgacaagcggaatttgttgagcagaccgtaagagaatgcgaaagcctgatgcgtaccggtcatattgtcctcttggctcttgtccgtgaagttcgtagccagataaccgaagcctacgaacggcaccagataataggcccggtcgtcgcggtaaccgcccgcccagttcgagaagttaagcataaagtcggaatgcacgaagaggtaaggccacttgagtttgcccagatcggcgtcgtagttggcaaactgaccgccctgcagctgcaggcgcatacctaccaccggatgcacccattttacaagcgaaaagttcgcttcgaatccgaggcgttttccgaaggaccccgaattggagccgttcgtcagggccgtacctacaccgccgcccagcgacatctcccaattatcccaaaatccattggacacaaaacctgcaaagctcggttttttgggcgtctcctgcgcccatgccgtcgtcgcgaatgccacgaccgcaagaattagaataagttttttcatagctaacattagttattcccagttgtaaaattataaattaatttttcaaaatccattcatcaacagcatgaaacgcaaaaacagagccgaaagcgactaaaaaaggccgaaaacatacgtttccagccttttaatctcaatatcaaatcttttcagatcagccgcatttcgaataaccgcacgacatgcaggtcagacagccgttctggtaggccatattctcctgtccgcagctcggacacttgcctttcgacttggtgccgtccacgatatattgcttcagcgcacggcagacgcccgttttccacgtgttgatcgactcgctgtccagatggagcgactcgatgagcgaaacggtcttctcgatcggcatgccgtggcgcagtacgcccgaaatgagtttggcgtagttccagaactcctcgttgaacaggcgcgagatgccgccgatggtgttcgtatagccgtaacggtcggtatactggaagtcgtaacgcttggtgccgtcgtcctcgcggaccttgatgatgaagcccttgttgatcttgcggggaatatacatggcgtcctcctcgattttacccgtgaagacctcgtagggacgtccgtcctgaagtcccacgaaggcgatccagtcctcggtgccgttcttgaaccgcacgatgtcggcaggaatcgacttgggacgcttcgccacttcgccgggatgcccctcgcacttctttttcttgttcttggaagccttgtcgagcagcacgccgtcgcggcagccgtcgcggtaaaccgtgacgcccttgcagccgcactcccaagccgtgcggtacacatcggcgacgagcgcttcggagacattgttcggcaggttcaccgtcaccgagatcgaatggtccacccatttctggatcgcaccctgcatcttgaccttcgccacccagtcgatatcgttggccgtggcgccgtggtagggcgaagccgccacccactcgttcagctcggcgtccgagatggtctccagtttcgacgtatcgtatccgttcgcgtccagccacttgacgaaattgtggtggtagacgttgtactcctgaaacttttcgcccgtttcgtcctcgtaatcgacgtgcgtgtcgtggtccgaagggttgatcttgcggcggcgcttgtagaccgtgcggaacaccggttcgatgcccgacgtggtctgcgacatgagcgacgtggtgcccgtcggggcgatggtcagcatggcgatattgcggcggccgttcttctccatttcggcgtacagctccggatcggcctcgcggatgcgggcgatcatcgggttgttcttctccttcgaagcgtcgtagatcgggaacgctccgcgctgggcggccatccggaccgaagcgcggtaggcttcgacggccagcgtcttctgcacctcgacggcgaaagcgatcgcctcgtccgagccgtaaagcagccccagcgccgcgagcatatcgccctcggccgtgatgccgagacccgtgcggcggcccttctgcgccatggtgcggatcttcttccacaactccagctccacgcggcggacctcctcgtcttcggggtcggcggcgatcttggcgatgatctgctcgaccttctccagttcgaggtcgatgatgtcgtccatcatgcgcatggccttgccgacatgcgccttgaacctgtcaaaattgaacttcgcctccttggtgaaggggttgtccacatagctcagcaggttcatcgccagcaggcggcacgaatcgtaggggcagagcggaatctcgccgcaggggttggtcgaaaccgtcacgaagccctcgtcggcatagcagtcgggcacgctctcgcggatgatcgtatcccagaacagcacgcccggctcggccgacttccatgcgttgtggatgattttatcccagagtttcttggcgtcgatgtcctgctcgtatttgggatggtccgacttgatcgggaactgctggtggtacttcttgcccgcgatcgcggcgcgcatgaattcgtcgtcgatcttgatcgagacgttggcgcccgtgaccttgcccgtatcgaccttggcgtcgatgaaacgctcggcgtcgggatgcttgatcgacagcgagagcatcagcgctccgcggcggccgtcctgcgccacctcgcgcgtcgagttggaatagcgctccatgaacggaacaatacccgtggaggtgagggccgagttcagcacggggctgcccgtgggacggatgtgcgaaaggtcgtgccccacgccgccgcggcgcttcatcagctgcacctgctcctcgtccatgcggaaaatgccgccgtacgagtcggccgggttcttatggccgatcacgaagcagttcgagagcgaggccacctgaaagttgttgccgatacccgtcatcgggccgccctgcggaatcacgtaccggaaatggtcgagcagttcgaacacctcctccttgctcatcggatcgggatacttgcgctcgatgcgctcgatctcggcggcgatacgctcgtgcatctgcttgggcgacgtttcgtaaatattgccgaaagagtccttgagggcgtacttgctgacccacaccgttgcggcgaggtcgtccccttcgaaatactttttcgactcggcgaccgcatcgttgtattcgactttctgcggcgccacgggttttgcggcttttgacatgactatattactttatttcagaattttagcgtcggaacggacaaagtccggttttacaaaaatgactcttttatatggaaaaaaccagcgacgcacaccaattttatccacaagttatttacaaaaggtgcaaaagatgcgccccgcatacgtgagacgcatttatcggccggcggaaacccgcggcgccggtttcggcgtgcggaccgcggcccagaaaagcaccggctacttcaccgccacggcgtcgatctcgaccagcgcgcccatcggaagcgccgccacctgatagcacacgcgggcgggcatccgctcggtaaagaaccgggcgtaaacggcgttcatcgcggcgaaatcgccgatgtcctgcagcaggacggtggtcttgaccacgtcgccgagcgtatagccgccctcttcgaggatgtggcgcaggttcgtaagcgaccggtgcgtctgggcttcgacgccttcgtccattttgccggtggcgccgtcgatcgggagctgccccgaaacatagagcgcgccgccggcttcgacggcctgcgagtagggtcccacggctttgggcgcatggggcgatgcgataatcttcttcataacgggtatttttcaaattttacacaaaggtacgatttattccctatatttgcacaacacatataataatatactatgaagattttgctgaaaatcgcggctctcgccgccgttgcggccctcgccgcagggtgctgcagctgccgttcctaccagaagaaaaaccgcaggccgctcgtcggcaccgagtggcagctcattcagctgggcggcaaggccgtcaaacccgaagagggcaaattcacgcttacgtttctggccgaagagaaccgcatcgcgggcgtcggcgcctgcaaccgcatcatggggaagtacgaagcgaccgagaagggcgtgctgaagatcgggccgctggcatcgacgatgatggcatgccccggcatggagcaggaggacgcgttcaccaaggcgctcgaatcgacgacgcactacgatatggacggaccgatgctgctcctgctgagcgacggcgaactgcgggccgtatttcaggcgaagccctgagacgaagcacgggcgcagcctgacgacaaaaaaggggaggactttcggacagtcctcccctttttcatacggctcgccgcgtctatttcagatgcggattcaggctgcgccattcctccacgggcgggatgatacccatcgaaatcacctcgtcgcgcaatttgcagaggtgttcgtagctggccgcgagggtcttgttctcctcggccgtgccctgcacgttcttgtagctgacgccctccttggtgatctgggtctccatcgccatcaggatatgcttgaactcatcgttgtgcacgaatacgcccgccggatagccgaacggcttgccgcccatggccgccgcgatcatgcagatcgacaggtaggccgggctttggaacgacgagcggccgcgcaggtcgatgatatgcttgccgccctgaatcacacgctgctgcaggtcgtgccagtcgccttcgggcatttcatggccgatcagctccgaaaggggacgtccggcgacgagcgtcgtcgaggcgaagacggccatctgctcgccgtggccgccgtaggtgcggcagttgcggatttcgtcgggcgaaatcttgaaatacttggccagctccgaacgcaggcgcgtgctgtccagcgcggcgagggtcgaaagctgcgagggacggatgcccgcatagatcagcgtcaccagtcccgtgatgtcggcgggattgaaaaccacgaccacatgcttcacaccggggcagtaggtcttgatgtccttgcccagctgcgcggcgatctcggtattgcctttcagcaggtcttcgcgcgtcatgcccgccttgcgcgccgcgccgcccgacgaaacgacatacgaagcgtccgtaagagcctccctgatatcgctcgtccaagtgatgttcaccccttcgaacgcgcagtgataaagctcctcggccacaccttcgagcgcgggagcgtacgggtcatacaggcagatgttcggcgtaaggcgcatcatcagcgccgtctgggccatgttcgagccgatcataccggccgcgcccacgatcgtgagtttgtcgtttgtcagaaattccataactgaaactattttaaattgggtacgatcccgtacccgggtcttatttgctgaagcggaacgtaaattcgttcttcgcgtcgcgcatccaagcgaactgccgcgtagtgggcgaaatggcgaacaggggcgagaaagtcgtcgccttcaccgtcacgccgtcgggcatgaactccagaatacgtatccagccgtcgccgccgttgccctcgtaaccgccgcccatcgactgcgcgtcgaagagcatctggtgtacgtcttttccggcgctgtttctgtcggtgcggaacccgcttcccgaaatgtggccgcagaccaccagttcgatgttggaagccgggcggaccagtttctgccagagctcctcgccgttgctggcgtcgggaagcggcagtcccttgatcttcacgatcctgccgttgcgcaccagcggctcgtagctcgtcaccttgcagggaccggacagccgctgatccttggcatcgaggtaagcgtgggtcatcagcacgatccggtgatcggcgtactcctccagccccgccacctgctgcgcccacttcatcaccgtatcgcggggcgcgaactccatattcaggaaaaggtagtccttgccgtcgggggccttcagttcgaaggcgcagttctcgacggcgggattctcgtccgaatcgagtccgaactgacagatcgccgccgcgttgagcgggttgcggccgatcgggaaatattcgttcaggtgcgtgcgccgcgcgccgctgcgggtgtaggtgtagtcgtggttgccggtggcgaccagatagggcacgcggccgtccagcacgtcgaacgcatcggccatgccctgccattggcgcaccgaggtcagatcgcccgaaaagccgttgccgatgcggtcgttctgctcgaccacgtcgcccacgcagagcaccatccgaacgttcagccgctcgatattgtcggcgatccatgccgtcatcaggcgggcgatgggctggctggcttcgttcttggcatatccctgcaggtcggggatcaccacgacgctccacgattcgggattctccagcgcgggttgccggtattcctcctgcgccgcagcgggcaggctccacaacatggcggccaacgccgcgagggtcattattcctcttttcatttttcgtaccgtttatttatcgggccgcgaatcattcgacttcgcggcggttccgcagggcatgcgtgatggtcagctcgtcgacgtattccagctcgtcgccgaagccgatgccgcgggcgatcgaggtgactttcacgccgggaaactgccgcaggcggttcatcaggtagaagagcgtcgtctcgccctcgaccgaggtcgaaatggcgaggatcacctccttcacgccgccgcgggcgatgcgttcggtcagcaggtcgatcttcagatccgagggcgaaatgccctgcatcggcgaaatgaccccgcccagcacgtggtaaaggcccttgtactggtgggtattctcgatcgagagcacgtcggcgacctgttccacgacgcagatcgtggtccggtcgcgctcgtcgtccagacagatcgggcacacctcctcgtccgaaaggttgttgcactcggcgcagtatttcacgtcgttgcggaaacggtcgatgctctccgtcatttcggccaccgactcccgctccatgcgcaggatgtggatggcgaggcgcagtgccgtgcggcgccccacgcccggaagcttcgacaactcgccgacgacgtcctgtagtaatttagacattcagatcgtttcgattttgcggcactccagccaccctttcttgccgtcggcgatcaccacttcgcaccagtcgtcgagccggttcgtgatcgtcacgaccgtgccttcgtgcagcacgaaaagatcggtggacgacttgtcgggcgaactcttgaccgccgtagaagcggtcatgaccacggccgaagtgtcgtcgagcatctcgcggcgttcgcccagcgcaaaccacgtcgtcagcatgcacaacagcacggcgacgacggtgccgtaaaacccggccttgcgcagcgaaagccgctgggccagcaggtagaccagaaacagcgccagcgcgcaggccagcagcaccagcgaaaggacgctccacgccgtacagctcatcgtgtggcgggcttcgcgcatccacgtcacgaagaagaattcggggatgtcctcgatgttgtccttcgtgcgggcttcggcgacgctcaggttgtggcggatgtcgtcgttgccgggcgccagccgcagcgcccgtttgtaatagaggatggccttgccgatgcggtcctccttgaagtaggcattggcgaggttatagtagagtttcacggagcttaccccgcgggaaagaatctcttcgtagacttcggcggccgaatggaaattgccgttgatataggccgtgttggccatgtcccacaactgttcggtcgtgggccggggcgcggactcgctctgctccgccgccggctgcgcaaggctgtcggcaggctcctgcgcataggatgccagacaccccagcagcaggacgagacaaactgaaattcgttttttcatagctgttcctatcgttttatcatcgcttcgatccgcgaaatgatatcgacgccctcgccgtagacctcggtcatccgggccgatgcggccggcgaatactgcgcctcgtcgcacttggtgatgatggccgtgaaacgctgcgactcttcggacgagacgccccgtttgtgcagctcctcgcggacgttctctttcgtgaggttggcgaccggaatgttgaacttgtcgctcatgtagccccacaacgcgcggagcatctcctcgtagaacgcatggcggttctgctcctccatgtagcgtttggcggcgcggaaacgctgcacggcgaccttgttggcgcgcttgccccgcagcagggccacgttctgcgactcgcggatctgccggcgcagcgcgacgtagaccattgcgaagaggatcaggatgccgaagaacagcacccagtaggccgcgctgaagaggaacggttcgcggaccgaacgcagctgcggactgcccagcttgatgaagcggatatcctgtccgagcagcttgacctcctccttcgacatgccgcggccctgcaccacgggggcgtcgccgccgcccttggcgtcgggcgtgatctccagctccagcgccttcgacttcagcgtcatgtactgcatgcgcgacgggtcgaaatagctgaattcgacgggttccacctcgtacgtgccttcggcgcgcgcgatgaagggatattcgaactggcggtagccggaaatgccggccgccgaggtgttgatcgactcggtggtcttgacgttatactgctcgaacgaagcggggagcgtcagtttgggcgcctgcacgaacgtaaggttgcccgtgccggagatcttcaccgtataggtcgccgcggagttggcggccagccgctcctgcggaagcacggcatccatcgtgaaactgcccacggcgccgctgaagctggcgggagcgcccgcaggcagcggcttgacggcgatgttgatgcgcggactctgcaccttgcggggcacgttgacgaagtcgggaccgcccccgaagaaggggtccacgttgcggcgtcccggcaccacgacctgcgccacggccgtcagttcggccggctcgatcacgagcgtcccggcctgctgcgggtagagcaggtactccttggccacgagcgtctcgtagaccttgccgttgaaggtctcgcgctggcgccgggcgttgtcggtattaagctcctgcgcccagaatccgttgaacgacgggaatttcacgtcgttgtatcccacgaccggcacccgctcgtacagcttgaacgtcacgcgcagcggctcgcccttgtagaccgaggtccgcgacacgacggcgcgcagcagaatgtcgtccttggcgatctggttctgcgccgtaacgtccggcgaggagtcctcgcgcggccgggactgcgtgccgccggcgccgggggacttgccctcgttcacgatctcgatcggcagggcgttggaacggtagacggtgccgtccaccgtgacttcggcagccccgacggtgacgttgcccgcggcctgcggaagcaggacgtaggtgatcgtgtaattgatgcttttggtcatcgctccgttgacgatctggatcgactggcccgacgactcggccgggccggcgatcacgtcgaatccttcgaacgaaggcgccttgaacgtccccttgtcgggataggcgttgagcgcgaactccacgcggaacgcttcgccgacggcgaccgtcagcggagagctggcctcaaaagtgaccttctcggcagccgatgccgagaagatcgccagcgcgaagagcgccgtcagggatattttcgcaatgaaatctctcattgagccttacaataaaatctttcttcagattttacaacgtaaacttttgcccgttagtatatctccgggccgttttttaatgtttgaaatcggcaaaaaagtcgttgcccttgtcgtcgacgatgatgaacgccgggaagttctcgacgtagatcttgcggacggcctccatgcccagttcggggaagtccacgacctcgaccgacttgatcgagttcttggccagaatagccgccgggccgccgatcgaaccgagatagaaaccgccgtgcttgcggcaggcgtcggtgacctgctgcgagcggttgcccttggccaccatcaccagcgaaccgccgtgcgactggaacagatccacgtaggggtccatgcgtccggccgtcgtggggccgaacgagcccgaagccatgccctccggcgtcttggccggacccgcgtagtacaccgggtgcttcttgaagtattcgggcatgggcttgccctcgtcgagcatctgcttgatgcgggcgtgagcgatgtcgcgcgccacgatcagcgtgcccttcaggttcaggcgcgtcttgatcggatatttggtaaggatttcgcggaccttgtccatgccttcgtcgaggtcgatgtccacggcgggcgacatggcgggggcctcggcgggcaggaagcgggcggggttcttctccagcgcttcgaggaagatgccgtcgggcgtgatcttggccttgatgttacggtccgccgagcagctgacgccgatggccacggggcacgaagccgcatgacgcggggcgcggatcacgcgcacgtcgtgtacgaggtacttgccgccgaactgcgcgccgacgccgctctcctgacagatcttgagcaccttctcctcccattcgaggtcgcggaagcagcggcctccctcgttgcccgaagtgggcagctcgtcgaggtagccggccgaagccttcttcacagtcgaaaggcacatttcggccgacgtgccgccgatgcagatcgcgaggtggtaaggcgggcaggccgacgtgccgaggtcgaagatatgctgtttgatgaatttcgtgagcgactcctcgttcagcagcgccttggtctgctggtagaggaaggttttgttggccgagccgccgcccttggtgatgaagaggaattcgtattccatgcccggacggccgccgtagatgtcgatctgggccggcaggttggtgcccgaattcttctcgtcggtcatcgtgaagggcacgacctgcgaatagcgcaggttgcgctccttgtaggtttcgtaaacgcctttcgagatgcacgcggcgtcgtcggcgcccgtgtagacatcctcgcccttatggccgatgcagatggccgtgccggtgtcctgacaggtcggcagctcgccctcggccgcaacgacctgattcagcagcatggtgtaggccacgaacttgtcgttgtcggtagcttcgggatcttcgaggatgttgtgcagcttctgcaggtgcgaggcgcgcagatagaacgacacgtcgccgtaggcggccttcgacagcagttcgagacccgcggggtccaccttcaggattttacgtccgtcgcactcgacgaccttcacgtaatccttcgtcaaaagacggtactcggttttgtcctcccccacggggaacggctcctgataaataaagtcagccataatggtagtttgtttatgtttgtagtatcaatatccttgcaatccttgcagtccgccccgacgcttcggccgccgcggggcgcggaaggccgtccgcgattcgggaatcccccggagctaaagccatgcaaaaatacaaaaaacaatccggattgcgcaacaatttccggccgtctgttatttttttcacaaaaaggcgaataaaatagcccgaacaggcgcaattaattagaatatttattaaatttgtgcggtttttcgagagaaacaattcactgcataaattaaattactatggtatcctacaaagatttgggtcttgtgaacacccgtgagatgttcgcaaaggccatcaagggcggttatgccatcccggcattcaacttcaacaacatggagcagatgcaggccatcattcaggcttgcgtggaggcttcgtcgccggtaattcttcaggtgtcgtcgggcgcgcgcaagtacgccaaccagaccctgctccgctacatggctcagggcgccgtcgaatatgccaaggagctgggcaagaacattccgatcgttctgcacctcgaccacggcaactcgttcgagctttgcaagagctgcatcgacatgggcttctcgtcggtgatgatcgacggttcgcacctcccctatgaggagaacgtggcgctcaccaagcaggtggtcgactacgcacaccagttcgacgtgacggtagaaggcgagctgggcgtactggccggcgtggaggacgaggtttcggccgagcaccacacctacaccgatcccaaggacgtcgtggatttcgtatccaagaccggcgtggattcgctggccatctcgatcggcacctcgcacggcgccaacaagttcaagcccgaacagtgcacccgcaacgccgagggcatcctcgttccgcccgaactgcgtttcgacattctggccgagatcgagaaggagcttccgggcttccccatcgtgctgcacggatcgtcgtcggttccgcaggagtacgtgaagatcatcaacacgcacggcggtgcgctgaaggatgccgtaggcattcccgaagagcagctccgcaaggccgccaagagcgccgtctgcaagatcaacatcgactcggacggccgtctggcgatgaccgcagccatccgcaagatcttcgtagaccagcccgccgagttcgacccccgcaaatatctgggtccggcccgcgacgagctgaagaaactctacatgcacaagtgcgagagcgtgctgggttcggccggcaaggcttaatccgcaacattccgacaaagaaacccggtctttcgagaccgggtttctttcgtttccggcgtgcgttgccggaaaacggcggctccggagaaaagagtcgcaagggcgcggaattccggacgcaaagcgacgcggagacatcggatataccccggtccgggcgggaccggacagagtcataaaactaaaaaacaataacttaacagcaacgccccaaacccgatttgacccccggctttgttttgacaagaaagggggtatttctatttttgctgccgagcggcactatgccgatgccggaccaatcacaatcaaatcaggttaattatggaaagaatagaaaaaaccttgctgctgccgctgctgacggccgcagtattgtcttccgcgtcctgttccgacgacaaggagaaggagccgcccgtgcgggccgtaaattacaccatcgagttcacgaccgtcttgcaggcggtttacctcggagacaagtaccggaccggagacggcaactaccgtctgacgctgaccaatgcggacggagacgtgctggaagcggacctgacgagcgtcaaagcccccaaaccctccgccgcgatgcccgaagcgggcgtttacacggcggcggagacccgccgggcgggaacgttcgcgccggaggcatcctcgtgggaaaccgccaaaagcggcgtcgaggtccggagcgcgaatcaggccgggcagaaaacgaagttcgcgatccgtgcgggcagcatgacgctcgcgcccgcggcatcgggcgacgggaccttcaccctgtcgggcgaggtgaccgacggggacaaaaccgccctcgcgttctcgtggagcggcgcgctggccttcgcaaacgaatccggggaggaagacccggtcgtgtacgaacggctgtcgatggtcttcggcgactactatcccaacgactacggcattgcggccgacacctacatgctccgcggcggcaacgaaagggtcgaactgcattcgcagctccgcagcgtgccggccgccgatccggcggcgccgctgcccagcgacggcaaatacacgatcgacctgcgttcggaagcgggaaaatacgccaacgaaaccttcacgttccgctcaggctacatctccgagagcggccgggccgccggcacctactggaaaacagaccaagccacctacgtcgccacgtcgggatcgttcaccgtctcgaccgtcggcgaaagctggaagatagagggaacgctccgcgacgacggggccgaagagacgctttctttcacctacaccggaaaacccggattcaaaaactaatccccaaatacgttacgacctatgcaaatcttcagaaaatcactgctcctgaccgccgcgctggccctgacggccttcgccgcatgcagcaacgacgacaatgaaaacggcggagacggcaaagagaccgatcccgattacctcgcactcccccacgcctacggcacctattaccacacctactggggcgatgcggccggcgactactatctggtgctgaccgacgcagacctcgatcaggccgatgccgcgccctacaagtaccggctcgacatcgacttcctgagcgtactggcgaccgatccgaaaagcgcgcgtccgctggacggcgaatacaccatcggaaaatccaccgacaacaaggccggcgtattcatcgagggatttctcggaaccgattccttcggcatgccggctctgttcggcacctattggaacgagcctaacgaagaggagggttccacaacgccccacgccatcgtcggcggaaagatgcggatcaagaccgacaacggcatcaccacgatcaaggcggagttcatcgacgaagacgacagcacgctgcgcgtcagctaccgcggagcgctcgaattcgaaaaccgcataaacgactcttaccgcggcgactcgaaactgaatgccgactatgcgatgaacgccgacgcgccggtggtttcgatcaagaagatcacggacgaatgtacggcccggtacgaccgctgggacctgcacttctacgaaaaggagtgctacgcgacgcagggcgcgacggggtactacctctggttcaggctgaaaacggctccggggcaggaatacattccgtcgggcacctacaaagcaacctcggacgacacgcccggcttcctgcccggcacacgggaagagctcggcggcggaaatctccgggccgtgaacacgtggttctacagcggccgcacgccccatgccccgatgaccaacggttcgctgaccctgaaaacgtcgaacggaacggactacgaagtgtcgttctcgacgggcgacgaccacccgatgccctatctggtgacgggatcgttctccggaacggtgaaaaagctcgcctccaattaggcgccccggataggcggattttcgcggccgtccctcttcccggcacttccgggaaggagcggtccggaatccggaagatgtcaagaggctgtctaacaagttttagacagcctctttttcatgcgaaattagtttattcgaatatctcagagg

SEQ ID NO: 12038 - DNA, 1935 bp, Unknown
  gut microbiota DNA sequence
tccacacttagatagtcttttggagtatcttccgtttcgattttatccaaaaagtcattgatattggttttgattagccgattgcgataaagaatcttcaaaagtcccctgaatgttgaccaatagccggaagcagagttctttgaaatgcggtcgtcacgcctgagttgcttggcatttagcagatactcccggaacttattacaaaggtcaatatcaatttcttcaaaagtacatttgccatgaacgaagttgtagaaatggtggtacacaaattcccacttttggtcatgcttgcgaagctgcttgcggtagtattccagaaaatccgctttgagtttgtgcctgtcaaagaaatcatacctgtcattaacgatagattcaaagcgtcggcatcggatggcttccgccttttccgacatagttgcattgaagttgcgttcacgttcattcttaggattggcataaatataaatgttcaatccttcgtgacggatggttttcattgtttcttggtcacgataccccggataataatctaaatagaaagaaagcatcccatgtttcaagggacgtgttctcaatgttactgttttacattctaacatagttacaattattattagtttatacttgatttgctgcaaatgtccgtaatggcttgacacagacaatgctcatttttagaatcattttctggtctgcctaaattcagacttaggcttattttctgacacccattacatgatcaaattccactttcaggaatctcacgaaacgacctttcttctcacgtttgatttcgtggaactgcagaatgccatagacagaatcccttgtgagattgtatttcttcatgacttcctgcacggtgtagtactccgaagcattgtcttcggcagtctgcttggataggtcaaaatgtagcttcgagtagaatatctgaccgtgttctttcttggacgggatgttgttgcgatagacatgggagcggatggcaacccgactcatcccatacttttgttctatctcttcgggagtgtaccattcggtcagatcattatctgtcttgtacttggcaaaagcaacatcaatatgctttttgctgtaatagttgaactggcggatttttacttttggcacattatactcccgtgtataagtccatacccatttggtgttgaccttgtatttttgggcaatttcttcagcagtgtaatattcagcaatatcaaattcgacttttgacatcacacgttcataaggtttagatttaagcaaaagttctatatcagctcttcgaataaaagacattcgtgaactaatccgacttgctctcaacttatcctctttgactaatttgtagatgtattgacgagaaactcccatcaatttagctgcttgtgaaaaggtaaagtactcttgattttccagcatcttctttacctccaacaattcttgactctgaatgagctccattcttcgctctttcattcgatgtttgtagcctcgtttagaacattgaggactacaataattggtggtggttttctgagctataaaaggtttaccacaccattgacaaattctttttacttccatgttgttttctccatatttttagtgaaaccataaagatttaatttccctttttgtctctctacgtaaaccattgttcacccatgtcgccaaatgtgtcactgtgacatcggggacaaaccccaatttgtttcgcggtagaaatacggtagaaaaatatggtgaacaacactatccaatcgctatgaactggattttggataaataaaaaagccgctgaaattcagcgacttcattatagttgattctaattcgttgcggttaattgcgatgtatcatttcccgatgcaaaagttttgaaatatattttgcaatgtttcttccgaggttatacct

SEQ ID NO: 12039 - DNA, 103589 bp, Unknown
  gut microbiota DNA sequence
cctctgagatattcgaataaactaatttcgcatgaaaaagaggctgtctaaaacttgttagacagcctctttctctgtttccacggatattacaaattcgcttccggcacgtactgacgaatcagctcgccggtcttgccgcaaatggtcttgaacgagttctgctccttgtccaccatgtttacgatcatcgtgccgcccttcatcgtaccataggcttccatgtcgtcgaacataccgagcacggagagcgccgcttccgcctgcggagtgacattgccgccgagcaattgggcgatcatcgcgttcagtccctcgaaatcgaggtagaaggtcgaggactgacctttgaaaatcttatccatcgactccatcgacgcgatttcgccgccgtcgagcgccatcttcacgaccgcgtcggtcgtgcagtagagcacgtcgcccttcacgccgaacaggatcgtcacgccgcccatgttcaacgtgtattcaccctcggcggtctgctgaaccggcatgccggccatgttggtgacgatcgtctgcagcacggccgggtctttcacctgcgccagcatcgacgccacgggatatttgccgtcgacgctcatgccagagaaggaaagcaggaagtcgccgtcgaagggttccatcacctgcttgaccatcggatttgccatcagcatgccgtaaccgggcatcgccgagagcatcgaatagagcttttcgccgttgagtcccagcgacatcgcgccgatcgaagcggccggcacatagcgcagcagcgctccggtctggggcttgacataagcgtagaaatccatcatcttggcttcgctctccttgtccttatacgacacggcggcctccgtaacgatccggcccttctcgaaattgaccgaaccgaccatcgtcgcccccttcagcgcgtccatcatcggcatcgagctgagcatcggattgttcatcatgggaagtatctcaccgtacgaaagcaccatattgatgtcgttcttccgggcgagctgctccgcaacggccttgtcgcccatcaggctctcgccgctcttctgagcgaacagcttccgcacgccgccggccagatcgtcagcgccgttctgcacgaaatagaccatgaacgcgatgtcgttgtaggcgcacaaaacgccggcatcgccctctttacccagatcgatgaccgaaacgccgcccttggtttcgggcgcgacaccgctcttttcgttgatccgcgcaagcagagcgtcgaatttggccttgtcgccgatcggcagcagcaaaccgccccgcataacgggagcatcgacagtgccttccatcgccgcaaagaagaagaaatcctttttcacgtcgatacccgactcgcccggattcttcagcaaggcgagcaggtactccttctcctcggcggagaggttctgatccttgtccagctcggccttgatccggacataaagcggatgctggtccaaatcgccggcttcgcacttccgcatcagcgatgcgggattgaccgacacggtcataaacgagtctgcgggcaggatgctgcggtaatccgcgctgccgccgcaggaaacaatcagcatggacgccgccgcaaggcacgccagcttcaaaggtcgtaagaaattcttcatatgcttcaaatttaaaatgaatccgattaaggaacaaaactataaaaaatcggcaaacgacacgctgtttcaggcaaataaattcgcactcggcagcaaaatattccgcgcgcgccccgaacggctcgttttccgggaataaattgctatttttgcatggaatagattaccgcacaagccatgaccccgacctcgcttttcatactgacaacctgctgcctgacagccatcctcgccatcgtcctgctgctctggcaccgggaatcccgccgtctcggcgcgtcgaacgccgacgccgaagcacgcgaacgcgacgccgccgcccgtctttcggccgccgaagcccggctggccgcggccgagcaggccgtgtcggccgaaagggagcttcgccagcggtacgaagcgcaggcacaggcgctgaccgaacagcggacccgcaccgaagcggagctggcggcgctccgggcctcgtccgagacggaactcgcgtcgctgcgggcgaaaaacgccgaagagcgagcggccgagaaggccgagcgcgaaaagctggaggagactttccgggcgcagttcaaaaacctcgcgaccgaaattctgggcgaacactctatgcgcttccgccaaaccagtcaggagcagatcgacagcctgctgaaacccttccgcgacaacatcaccgacttccgcaggcgggtcgaagagatctacaccacgcagacctcgcagcggggcgagctgaaagccgagctgaaaaacctcatggagctgaaccgccgcatcacggccgagacgaccaacctcaccaacgcgctgaaaggcaactcgaaggtgcagggcgactggggcgagatgctgctcgaaacgatcctcgacagctcggcactcatcaaaggcatacattaccagacccagtacaacatcaaggacgaggagggccgcaacctgcgccccgacgtagtgctgcacctgcccgaaaagaaggacatcgtcatcgactcgaaggtttcgctcacggcgttcgtcggctacacctcggccgaaagcgaggaggagcgccgccgtcacctcgcggcgcacgtggcctcggtgcgccagcacgtcgccgaactgggccgcaaggagtaccagcggcggctcaactcgcccgacttcgtcatcatgttcgtccccaacgaaccggcattcctcgccgcgctgcagaacgatccggcgatctgggcggacgcctacgaccggaaagtcatcgtctcctcgccgacgaacctcttcgccctgctcaagctggtggccgacctctggaaatacaacgatcaggacaagaacaccaaggagatcgccgcctgcggactgaaactctacgaacagctggtggccttcacctcgtcgctcgaaggggtcggcaccgcgctcgacaaagcccgcgacgcatacgaggatgcccacaagcggctttgcacgggcaacgacaacatcgtccgcgtcggggagcggctgcgcaaaacggcgagcctgcaaaccaagaaacgccattcggcccgcacgctcgaaatcgccggagccgaccaagacccggcggccctctccgcaacggaatctgcaacagaatccgcggcggaaactgctgcaaaatccgcggcggaagccgctgcgaccgacacgacggcgcaatagccccggcaaaacttgctttccgaaaccaataattttcgtttcgaaagaaaaatatttgcggattcgttccgaattgcgtatctttacccggtaaccaagctaaccaaataaagatgaaacgatttcttgcccttttgacagcgctcgcctgcacgctgtcgcctgcagtcgcagacaatccgaaggccgacgccaaagccgtcgtaacttcgggaaacgcccgctttacggtgctcacgccgcagttgatccgcatggagtggagcgccgacggacaattcgaagaccgtgcgacgctgacgttcgtcaatcgcgagactccggttcccgaattcaaggtccgcgaaagcaaatcgaaactcacgatcacgaccccgacgctgacgcttacgtatcttaagaacggcaaattcagcgacaaaaacctgaaagccgtattcacgctcaacggcagggaggtggtctggactcccggcatggaaaatccgcagaacctgctgggcacgacccgcacgctcgacggcgccgacggctcgaaactcaaagagcctatggagcagggaatcctctcccgcgcgggctggtccctgatcgacgattcgcagcgtcacgtgctgacgcccgacggttccgaatgggaagagtgggtcgaagcgcgtcccgaaggcgaccgtcaggacctctacctcttcgcctacggacacgactacaaacaggcgctggccgactacgcgctcgtcgccggccgtgcgccgatgcctccgaaatatacgctgggctactggtggagccgctactggcagtattcggacaacgaattcgtcgatctggtgaacaaactcaagtcgatggacgtgccgatcgacgtgctgatcgtcgatatggactggcacgagacgtggggcctgcgcaaaagcaattcgccgaaggacgaatacggacagcgcatcggctggacgggctacacgtggcagaaggagctgttcccctcgcccgcgaacttcctcaaatggaccgaaaacgaagagctgaaggtggcgctcaacctccatcccgcttcaggtatccaaccttacgaagctgtatacgacgactttaccaaagagtacggatggtctgagaaaggcaagagcgtaccgttcaaaatcgacgaacggaaatgggccgacgcctatttcaaaaccgtactcgaaccgatggaacgcaacggcgtggacttctggtggctcgactggcagcagtggaaagagtcgaaatacacccccggactgagcaacaccttctggctcaaccacaccttcttcaaccatgcggagcgtcagaaccccggactgcgccccttcatctaccaccgctggggcgggctgggcagccaccgctatccgctggcattttcgggcgacacctacgccacatggcccatgctcgcctacctgccctacttcacggctacggcttcgaacgtcaactacggctggtggggccacgacatcggcggccacatgttccacaagacgcagaaggcgaccgatccggaactttacacgcgctggctgcaatacggcgtcttcaccccgatcttcaaaacccattcgaccaaagacccgcgcatcgaacgctgcatctggtgtttccccgaccatatgttcctcatgcgcgacgccatccgcctgcgctacacgctggcaccctatatctataatgcggcccgcgagaattacgacacgggcgtcggcatgtgccgcccgatgtactacgactatcccgaatcggacaaggcgtacgagacgcccgaacagttcatgttcggcaacgacatcctcgccacgaccatcacccagccggtggacagcataacgggtctggcaccccgcacgatctggttccccgaagggacgtggttcgactgcgcgaccggctcgatgtacgaaggcggccgcaccgaggagctgcactacacgctggcggaaaatccccattacgccaaggcaggctcgatcattccgatgaatccggcaactgtaaagaacctccagcagccgtgcgatacgctggtgctgaccttcattccgggcggcgacgggcagctgcgccactacgaggacgacggcatgagccagcagtacaagacgaactacgccgtgacgacggtcaccaaaaagcaggagggcaacacggtgcgcgtacgcatttcgccccgcgagggttcgtttgcgggcgcgtccgacagccgcagctacgaactgcgcttcccggccgtcttcccgcccaagtctgtaaaggtcaacggcaaagaactggcctactcgcgcttcccgaaggccggggagtggacctacgacggctacacgctcgcgccggtgatctacacgggcacgacggcctgcgacgctccggtggagatcgaactcgcgttcgacgactatgcgacggcgcatcaggccgacctgtacggcatgagcggcgtcttcaaacgctgtctcgacctgaccgtcgaattcaagaccgagcagggcgcccacagcgaaccctatctgatgctgcccgaagagtacctgcgcgtttcgcagtgccccaacttcatcctcgaagagccgttccgcatcgccgaattcatcggagcctatgcgaagaacaaggccgcactgttcgaaaagaccgattccatgaccattatcggcgacaacttcaaacagcgcctgaaggccgtgatcggcagcgtgaaataaccggacgacataccgcaacaaaatccccgcgaagcaagttcgcggggatttgttttacgaggtattacatgctccggactcatcccgtggtccgaattaatcccggattattttttcaggctttgtcgctccggcccggcttccagctcttgcgcatccgacattcgatgcccggcgtcgcgccgtgcgccatcgtctcgacaagatcgtcccacacctccgccacccagccgacccgctcacggcagtgtttcagcacctcgacggcccagatccgcaccgcgaccttcgtgccgggatcgacggcccactgcgccgccgtctcggcgataagctccagcgaagaggaatcgggcgtataacgtcccagcaggtcggccatgatctttgcgaaatggcgctgcgcgctccggtccgtacaagcggggaagtccctgtcacagaacgccccggcaaagggcatgaacgcatcgggagcggcgaaatagatcttttcgagcacataggcgctgcggaaggccgctttgtgtcccgcaggcttcggcaggttagcatacgaggaggtcgccacccgataaagcagctccaccgcacccgcatcgcgcacccgccgggccaccgtatcggcgaagtccgaatagaaccgctccgaaaggctctttaccagttccgcttcggtcatatgtcggcaacgggactaaaacagacttttcttcgaggtcgtgacgacgaaatccttcaggtagaaaggttcgaagtaagcgatatcctccgtacggccttcgtcgagcgcctgctgggccagccgcgcaagaccgcgggccgaaggggccacctcgacgaactcggcgccggcaagcacgtcggcgcatttgcgggcgccgctgccgaaaatcacgaacggacggccctgctcccggaattcccggaagctgccggcatcgatcacctcggccgtgacctcgttctgcggacggccctccgcatcgaagacctgcgcataaacctccatgcggcgggcatcgaccatcgggcaaagcagcgcacggtcccagtcggaaacagaaagaatacccgcttcgtaatcttcgcgggcaacctccgtcagcgcgtcgagcgatcccacggcgatcagcggcttctgcaatccgtaacacaatcccttggcgaacgacacgccgatgcgcagtcccgtataggagccgggacctttgccgaccgccacggcatccagctcgtcgggcgcaatgcccgtttcgcgcagaagttcatcgacgaacacgccgaccttgcgggcatggtcgcgcccctcgtcgctctcgcgcagcgaaagcagctccccgtctttcgcaataccgaccgaacagatgtccgtgccggtctcgatacaaagaataagactcatatgattttgtaatttacctccccaacttccgttcccgccggcgcatgcgccgcccgtgacgtcattcataaatccattttccaaagcgactccgcggaggacggcttcatgccgtttcggaacaaaaggcctgctgacgcccgtcaaatcacccccagatgcgccagcgcctttgcgataccgtcgtcatcgaccgaagcggtcacgtagtcggcggcgttcagcgcctcgtcgcaggcgttgcccatcgccacgcctacccctgcggcacgcagcatcgccacgtcgttgccgccgtcgccgaaagccgcgacctcggccgccgagaagccgtaactgcgcataaactcctccattccggtcgccttgtcgatgccggcgacattgacatcggcgaaaatcgggcaccagcggctcgccacgagtgtcggcagctcggccatgacccgccgctgggtctgcgcatcgaaatagaagcagagctgacaacattcggcccggccgaaaagctcgcgcaggtcggtctgttcgggcaccggatgcgccaccatatgcgcgacccgctcgacgtcgggcgtcacgcgattgacgaaaacgccctcctccagttccagccccattgcaaagccctgctcctcggagagtgccaaggcgcgttcgaaatcggcccgcggaatcggatgcaagctgacgacacggccgtcgctggccacacaacgggcaccgttgagcgacaccacgccgtcgtaaggaattccttcgagcggtccgagatcgttcgcggcgcgccccgtggcgataaaaagccgtacgccgcgctcatgcgcctgcgccagcgcccgaagcgccgaagcgggaatttcatgcgtactgaaactgatcagcgtcccgtccacatccagaaaaatcgcccgtatcatcgtctgtagtttttcatcgccttgtcgatctcccgcttggcgtcgttttccttcaggtattcgcgtttgtcgtaggtcttgcggccgcgggcaagccctatgacgatcttcaccagcccgcgctcgttgagaaacatacgcaggcccacgatcgtaaggcccttgtcctgtccggcgcgctggagtttgtccagttcgcggcggttgagcagcagcttgcggtcacggcgcggcgtgtggttgttgcaggtgccccacgcgtactcggcgatattgacgccgcggatccaaagctcgccgcggtcgaaatagcagaacgaatcggtcagcgaagcccggcccgcacggatcgacttgatctcggtgccgaccaatacgacgcccgcaacgtactcttccagaatctcatagtcgaacgtcgcgcgcttgttgcggatatttatatttttctgttcactcatatactcggaaacggcacaataattgcccatttattcgcaggggtgggaatcggtcaaggtaactaattcttttatctttgatatgttttacacatctttctgtttattttctgtttgcacacggtatgcgtagtgatacgtgtacgacccgatacccgccccttttttcgttaaaaattcaaaacaccacatatattattccggcggctacaagatcagccgctgcaatttccttgcaatggtcaccttcaccttgttgaagccggccagccgctggatcacctcgttctgctgctcctcggtcaggctctcgtcggcaagtttggcctgccactccttgatatagccctcgatcaccttcgacttgtagagcgtcacggccttcggcacacccacggccagcatctcggcatcggtgtcgatatgaatctccttgcgccgccacaactcgctgggcacgtaattgtcgtccgacgtgaggatgtccaccgacacgttgcacacctccggatcggggtggttcagaaaaaagtgcgccggcacctccgctccggtgccgagcagcttccactgctcccggtaggtcgccagaatcttgtcgtacagcggattgctgaacgagagtccgtcgctgtcaagttccatgaagatcacctcggcgacgttgcacgccaccatcgtacgcccctccttgaagtcgaacgagcagtggccgtacttcagcaggtatttcaccagctcgcgttcgagcgcctcgacgctgctgccggcctgcacctgcttcacaaactcgacctccggctcccgcacttcggcacgccgctgggccgtctgacggcgcacgaattcgtccgtctcgcggtcccccgtggtggacatgcgcttgcgggccacctccgaaataaggatgttctcgtcgatgtccatgatgcgggcgcactccttgatatagaccgaccgctggatcggatcgggaatctgcgcgatcgactgcaccatgtcgccgataagggccgccttcttgatcgggtcgccctcggcgtcctgcagcagcagtctggccttgaaggcaaggaaatcctgctcgttggcgcggatatactcctgcagctcggcggccgtatgcgtccgggcgaaggagtcggggtcttcgggttcgggcagcagcaccacgcgcacgttcatgccctccttgaggatcatgtcgataccgcgcagcgaagcgtggatacccgccgagtcgccgtcgtaaatgacggtgatattcttcgtaaagcggttcagcaggcgtatctgctcggtcgtaagcgaagttccggacgaagcgacgacgttttcgacaccggcctgatgcatcgaaatcacgtcggtatatccttcgaccataatggcgaagtcgagctgctggatcgccttcttggcgaaataaagcccgtaaagctcccgctttttgctgtaaatctcgctttcgggggagttctggtacttggcgaccgtcttgtcggtacgcagcgtacggccgccgaaagcgacgatgcggcccgaaatattgtgaaccgggaagatcacgcggtcgcggaaacggtcgtagagcgatccgtcgctctcgcgctggagcgaaagtcccgtcgcaaccagaaactccttcttataccccgccgccagtgcgtctttcgacatccggtcgcctttggccggacaaaaaccgagaccgaacttcttgatcgtggcgtcggtcatgccgcgcttctggcggaaataggtcatgcccacgctcatgccttcggtctcgtggtggaggtaatcggcgaagtagtcggccgcccagccgttgagcgcgaacatgctttcgcggtcgtcgttgcggcgcacctcctcgtcggtcatctccttctccttgacctcgatgccgtagcgcttggccaccatcttcagtgcttcgggataggtgatgttctcgtgctccatcaggaaagtgacggcgttgccgcctttgccgcagccgaagcacttgtagacgcccttcgagggcgaaacgacgaacgaaggggtcttctcgttatggaacggacagcaggcctgatagttcacgcccttgcgtttgagcgtgacgtattcgccgataatatccacgatattggcggcggcgtaaatgcggtctactgtttccctgtcaatcatacctgcaaagataggaataattcgggaaaaggagcggaagagcggactccgaggcgcaaaattcccgcaaaaatgcgacggcgccgtccccggcccgaatacgggtattttaaacgagtattcgctccggccgcaatttatttcggattttatcgttatttttgtcctatggatttcaaactcgtatcggattacgccccgatgggcgaccagccggaagcgatcgaacagctcgtcggctcgatccgccacggctccaaacacaacaccctgctgggcgtcaccggctcaggcaagaccttcaccgtggccaacgtcgtcgcgcagctgaaccggccgacgctggtcctgagccacaacaagaccctcgcggcacagctttacggcgaattcaggaacttctttcccgaaaacgccgtggagtatttcgtctcctactacgattactaccagccggaggcctacctgccttcgacggacacctatatcgaaaaagacctttcgatcaatgccgagatcgaaaaactgcgtctgcgcaccgtcgccacgctgttgtcggggcgccgcgacgtgatcgtcgtgtcgagcgtgtcgtgtctctacggcgcgggcaatcccgcggatttccacgccacggcgatcgacatcaaggtcggacagatcgtcagctacaagcacttcctctacaagctggtcgaagcgctctacacccgcacagagcgggagctggagcctgcgacgttccgcgtgaacggcgacacggtggacatcatggcggcgttcggcgagttcggcagccagtgtttccgcgtgatgttctacgacaacgagatcgaagccatccagaccatcgaccccgtgacgggacagcgcatccattcgctcgacaacctgacgctctaccccacgagtctcttcgtaaccacgaaggagcgcatcaacggtgccgtacagcagatatacctcgacctcggccggcagatcgaattcttcgagcgggccggacggccgatggaggcccagcgcatcaaacagcgcgtggagtacgacatcgagatgatcaaggagctgggctactgccccggcatcgagaattactcgcgctacttcgacggccgcagcgagggcacgcgtccgttctgcctgatcgactacttcccgaaagactacctgctggtcgtggacgagagccacgtgaccatcccgcaggtgcacgccatgttcggcggcgaccgcgcgcgcaaggagaacctcgtggagtacgggttccggctcccggcggccaaggacaaccgtccggtgaccttcgccgagttcgaacagttgcagggcacgtcgatctacgtcagcgcgacgcccgcggattacgagctgatgaagagcgaaggcgtgatcgtcgagcagctgatccgccccacggggctggtcgatccgccgctcgaagtgcgcgtaacgatgaaccagatcgacgacctgctggaagagatcgacaagcgggtgaagaacgacgacaaggtgctcgtgacgaccatcaccaagcggatggccgaggagctgtccaaatatttcgaccgcgtgggggtgcgcaaccgctacatccactcggacgtggatacgctggagcgcatacagattctggaggacctgcgggccggcatgttcgatgtgctggtgggcgtgaacctgctgcgcgaaggtctggacctgcccgaagtggcattggtggcgatcctcgacgccgacaaggagggattcctgcgcaacgtgcggtcgctcacgcagatcgcgggacgtgcggcgcgtcattcgcagggcaacgtgatcctctatgccgacacctgcaccgattcgatgcgctacgccatcgagcagagcaaccgccgccgcgagaagcaggtgcgctacaacatggagcacggcatgctgccgcgccgcgcacagcgaagcggttcgggacagagcacgctgctgaccacgcggaccgacgtaccggaaatcgcggcggtctaccccatcgccgaggatcattacacggctgcggcggacgtgcagaagacttatgccgcgagcgaaaacctcgatgcgctgatcgtcaaggcgcgcgaagacatggagcgtgcggccaagtcgctcgacttcctcgccgcggcgaaattccgcgaccggatgtacgaactgcaaaaactcagggaagagaccggcaacggaaattcccgcaaaacagcacgccatgaaacgctgtaaaatcaccattttcaaaacgacgatccacgaggacctcgcccgccaatatgccggggcggggttcacgaagtgtcccatgatgcacgaagggcaggtattttacgccgattacgcaaagcccgcaggattttgcgacgaagcgtggaaagccgtataccaatacgtgttcgccctctcccacggcgccgggcaggctataatagagtaaggatcgggggggggtcagacctccgcatggcggaaggtgaaatatttggcggccagatagctgtagatcatcgtgacgaaagtcgccagcatctgcgacggcgtggcccacaagccgcagaactccacgaaaaatttcagtccgacataattcacgaccaccgagccgccgatcgacagcagataacggaacaactgcgtcccggtcggcagcggcgagtgacggaatgtcacatagcggttcagccagaacccggtaaagaacgtgaagggaaagatcagcagcatcgtcgcgacatacgcagagacaaccacgaaaccgaggtccagctgctccttgtcgaggacgaaattataaaccagaaagtaacacacccagctgaacgccacgttcgcaccgccgcagacgacataacggaacgtctgccgcggcaggatcgccgcgacgggcttgcggtagaaccagtcgatgaaacggattatcagctcggaaatgcgcatcaacgggcggtatagatccaaaggcccggaaaccggtcgctgtaattgcggacgaagagcgcacatgcctccgtatcggccgattcgaacggcgaaaccatgaatttcgtcccgaaacggtagattccgcagcgcaccgaaggatccttttccgccgccgcatcgacggcgcgggccgcattttcgggcgtactgaacactcccagcacgacataacggcggcccgaaacaagcgatgcgggcgcatcggccgtccctgcggaacgggtttccgggcgtttcgccggggcaacatccttctgcccggcaggagcactcccctgaccgccaaccgacgaggcggcagtgccggcattcgcaccggccgcagcgggttccgatcgcgtttcggcgttcgtccccgatgcagtgtcggccgtcgtgcccgcggcctttgcggcgtccgcaccggacgcagatgccgccggtccggtcgtcgcaccggaatccgcagcagccggaatcgcgaccggactgtcagccgtcgccgcgccggcgtttgtatccggtcccggaataccggttgtctgcgcgatctcctccgggccttcgtcatagagcttcaggaactcataccccccgaaaccgagggcgaccaaaatcgccgcgatgccggtccacaaggcccagtcgaacttgcgggcgggtttgatccgcaccggctcacgcccctgcggattgagtcgcctgtcaaacgccgcatcgggcgtaaaatgtttgagtttgagcacgccgacgccctcgatcgtcagctcgccgttttcgagcgtgcgggccagccagcggtcgtatacatcctgcgcttcggcggcgtcgcactgcacggcgccggagatttcagcgaccagcgacacgccccgctcctgcgaggtaaacgacacggcccggctcggcggcaccacgctccgccgcgaaatgcgccgcgcgccgcggcgttccgtatagagcgatcccacacccggcaggaacacctctccgcccccggcgagcaggtcgccgacgagacggttgatctcgtttaccatcggataattactcattttttcttctttttggcagttgcagccggggatttcggcacaacgggaaccacctccggctgcgtcgcaccccggtaaatcatatagatacccagcagaatgaacggaatgctcagccactgtcccatgtcgagcagccatccctgttcgaacgcctcctgctcggtcttgatgaactcgatgaagaagcgcgtcaggaagatgccgatcagtccgatgccgaacagaatgcccggacggcggcgggccatgtctttcgcataatagagccagcagagcagaccgaatgtcgccagatagcagagcgcttcgtaaatctgggtcggatgcaccgccgccggggcgaactcgttcacccatttggccgagcggacgaactcgaaaccccacggcagggtcgtcgccatgccgaaaatctccgaattgaaaaggttgcccagacgcacgacggcgccgccgatacccacggcgatcataatgcggtccagcgaccagacgtaaggcagcttgttcttgcgcgagaagagccagagaccgatcagcaggccgatggcggcgccgtggctggccatgccgccgtcgcggaagcccgtgatgatggtccacggcctgctcaggtactccatcgggtcgtagaacagacagtgccccagacgtgcgccgaggatcgtcgccagcgtaccgtatatgaatatagactcggagactttcgacggaagtccctcgcgtttgcagaaattatcgaagaatttggcgccgatcaggattgccagcgcccacatcaggccgtaataacggatgtcgagcgacccgatggaaaaaaacaccggattgaaatcccagacgatgcttagcggttgtatcatattacttggaatgggttctatggatttctgccgttatttgatgtcctgcagatttactttcttgagcgtgaacgagaaagtgcttcccacgcccagttcgctgcggacggtgatacgctcgccgtgcgcctcgacgatatgtttcacgatggccagaccgagtcccgtgccgccctgctcgcgcgaacggcccttgtccgtgcggtagaaacgttcgaaaacgcgcggcaggtcctccttgccgatgcccgaaccgttgtcctcgacttcgatcaggattttgtcgagcatgtcgcggaaatggacgcgcgtctgtccgccctccttgccgtaacggatcgaattgatgatcaggtttaccatcacctgaccgatatagtgcttgtcggccagcacccagaaaggcgacggcaggttttcggcccctttgaccgaaatcttgatcccctttttgtcggcctccatctcggcctgctcggcgatctccttggtcagcgcaacgatgtcaaaccgctccatcttcaggcggttcatgttgctttcgagtttggagatcgtatcgaggtcgttcacgatgttgatcaggcggtcgatgctcttttcggcccgttcgaggtatttgcggttgatcagctcgtcctccagtccgccgtccagcagcgtcgagatatatccctgaatattgaagatcggggttttcagctcatgcgccacattgccgaggtactgtttgcggaactgctcggtctccttcaggcgggcgatctccttgtcgttggtatcggcccacgccgtaagctcctcgccgatattctcgacgtgcttgtccttcagctccgaaaaaatctcgttggtgtgcacgtcgcgcgaaaggacgatcgaatagattggcttgagcttgtaggccacgtacttgcggatgatgaacagcgccacgagagccatgacgacgaaaacgccggcggcggcgcagagcgtcatccaccagaccacatcgagcagggtcgtcgtcacggcgacgatgaccgcagcgaggagtgcgaccagaagcgacgccccctcctttgttttaatgtacaccatagctacttcgtatattgttgcatgagacgggcgatgtatttgcccacgatatcgaattcgaggtttacgaccgagccgacttcgatgcggcagaagttcgtatgctcgaacgtatagggaatgatcgccacgcggaagctggattccttcgaatcgcagaccgtcaggctcacgccgttcaccgtcaccgagcctttctccacggtgcagagaccgccgccctgcggttggtattcgaaagtgaaataccagctgccgtcggcgtcttccttcgcggtgcagacggccgtctgatcgacgtgcccctgcacgatgtggccgtcgagcagcgcatcgggtttcatcgagcgttcgaggttcaccagatcgcccgtcttcagcaggccgaggttgcttttgtcgagcgtctccttcatcgcggtaacggtataggtgtcgtcgcggatgtccacaactgtcaaacatacgccgttatgtgctatgctctgatcgattttcagctctttgcagaagtccgcgcgaagcgtaaaatccttgttctgacggtcggtgcggatctccacgacctcccccatgcgttccacgatacctgaaaacatacttctcaactgttaattatcaacttgccttttaccttgtagaccgactttatgtcgctgacattcagaattatgtcgtcataattctctttgtctccggccaccagacggagtttatcctccccgtcggagagccgaactatccgcaaagttacaatttttcggctgacaatcacatattcgccccccggaataatcgcatccgggtccacggctttcagcaggaccaccgcacccggcggcagcgcgggtcccatggcgcgtcccatgtagcacatcgccagatcgcactgcccggcctgcggcaccatcaggctgctctcggcttcgagatgcgcgacatgggcgatggcctgttcgacatccacattataaaaaggtatctgcacgccgcgcagcttttcgtcggagaacatctgtccttcgcccgtcagcagccacaacttgtccacctgaggaaatttagagacgattcggtcggcgacatcgagtgatataccgttgttgccacgtttgatctgataaaggttttccccgcgggccaacccgatataacgcgcaaaatagttggtcgacatgttcgcccacttgattacggcctcgattctttgccaattattctgcttttctcgcatttttttagcaataattaaaaaaaatttgcatctttgcactcccggtcccgtagttcaatggatagaatataagattccggttcttacgatatgggttcgattcccgtcgggactacaaagcacaagtgcagagattcaagcacttgtgtttttttgttcaactccagtcacaatctattattcaacaaaaataataacaaatttccattagacaatagaaaatagcacaattaagctttttaatagcacattcagacacgaccgaaaaaagtccgcgcaacagaagatacggacttttccggtcgtatttcgtgcccgaaaggcactgcaaaagcttgtttcagagggattgtcagaaggaaagacgcacgcccagccgcaaggtaagcgacagcggcgagtcggtacgcgaggtccgcagatcggtttccgtgaaataataggagacttcaggctcgaaataaagcccgacaagcccgcccagatcgtactgcgcgcccgcggcgcccagcacggaccattgcacgcccggctcgtccatcgccctcgaaccgaatttcgcggagacgcacttctcgatcataccgccggcgcctgcatacagcgagaagcgccccgtatccagaaactgccagttcatacgcagcggcacgccgataaaatggagtttctgactgatatcctgccggctggacttcatgcggacgtcggcccagagcagcgtgtaattgacgccgctttcgagcgacagaccgtgcgcgaattccttgcgcaccgagagtccgaaactgagcggctggtgatgtttgaaggaataatcgtcgtaattgtatttcagctgggccatcgtgccggcgccgccgcctaccggagcgtcggacatcatcatgccggggccgggccccgccgacacggttcccccgcccgtcacgctgcctgccgcaaagagcgacacggaagtccgcctgcgggatttcggctgctcgaaggcgatctggtcgccgtaataagaagtggtgctcggataggtcctcgccgatgcagcgttttctttcggagccgtccgttcctgcacgccggaagtctctgcggcggcctgtttctgcgcgatcgtttcttccgaccgcaaagttgcggcagcttcattctccggagcaggttgcggccgggagtccgtcacatcaaccgccacgaccgccggcgcagcgttccgcgcaacggcagtcgcaggatacgccgcccgcaccgcctgccgggcttgggcctctcggcccggaagcgactcggtctgcaccgcctcctgcgacggcacgacggcccgaagcgactcttcgagcgttccgatccccccggccggatatgtccgattgtccgcggcggaactgccgccgtctgttgccgatgcgataacaaaccctttatcccccaaactacgattttcatgcagcagcagttccccgcctccgacaaaaatcagcacggcagcagcagcggcagcaatccgcggccaatatctgcgcaatacggaaatccggggcgccggagttttcagctcccgctccagacgcgcccatccgtcggccgggggtgttacctcggcgtcccggagcgcgctccgcattacatctgtccagtctttattttgtttcataatctaatgtgtctccatatacgccgcaatcctgcgggccagcagcgtccgcgcccggaacaactgcgacgaggaacttttttcgttgatccccagcatctgcgcgatatcgcggtgcgaatacccctcaatgcagtaaaggttgaacaccgtacggtaaccgtcgggcagctcgcccacgaactccatcagcacgtcgcgcggaatacgcgccacctccgacggatcgggttcgggaacgtcgggaagcgcccggccttcgtcgagcgtcctgaagttgagcttattccggttccggagccattcgagcgccacattcaccgctatacgctccatccatgcgcgcagcgaaccgggtccgcggtaggagaatcggtcgaaagccccgtatatcttcaggaacgcatcgtgcatgaggtcctcggcggtagcccggtcgcccgaataacggagacagacggccagcaaacgggctgcatagcggtcgtacagctcacgccgggccgtatcttccccctctctgcacccctcggccagtatctgttcctccatttccatatttgcgttcactcttataaatggtataaagaccaaaagactgcacgggatcaaaaaaaattttaatccgcatgcagtattatcctccagaatacgtttactgacatgaaagataatacaaaaatagtataaaaatatgaaaagattcggatttatcacgcttgcggtcctgaccgcagtattcttctcctcctgcaacgattcggacggagattacgcgagcagctgggcattcgcctcggcagagacgctcagcaacgactactacttcgtgctggacgacgacaaaaccgtctatccgagcgacaaatcgcgcgtagccggctacaagcccgaagacgaccagcgcgtcatcatcttcttcaacctgctgaaaacgggagtcgaagggtacgattacaacatcgcgctttacgacgtgaggaacatctacacgggagagaccagaatcgtgaccacgcaggaagaggtggaggaactgcccgacgcacaaaccagctatttcggcggcagcatgaacagcaactggctcaacgtgggaatcggcttcaacgcttcggatctctcgaagcataagttcctgctcgtgcgcaacgacttcacgcagatcgaccccgacaacaagaaagagggatacctcaacctcgaactgcgccacgacgccggcaccgacaccagcggagtatacagctacgacgaccgctacgtctcgttcaagctggatcagttcaaggaggacctcgaaggcatgaacggcatcatcctgcgcatgaacacccgtcagaacggcgtaatatatcttcagatcaacatgtcgaaggagaagtagccactcccgaaacatgaccgccccggcccgcagaatctgcgggccggatttttttgtcttgccgcggaaaccccgcaacaccccatcctttcagaccaaaaccgggccttccggcgcgccgcaaataaatttgtttttggccgcggcatgtgctatctttgcatcatgtctatcgtacgcaacaccgagagcgatctcgaattcgaaaacaagatccgcccgcaggagttggaaaccttctccgggcaggataaaatcgtcgataacctccgcatcttcatcaaggcggcgctcatgcgcggcgactcgctcgaccacgtactgctgcacggccctccgggactgggaaaaacgacccttgccaacatcatctccaacgagatgaacgcgcagctgcgcgtcacgtcgggtcccgtgctggacaagccgggcgatctggcgggactgctcacgagcctcaatccgggcgacgtgctcttcatcgacgaaatccaccggctcagtccgatcgtcgaggagtacctctactcggccatggaggattacaaaatagacatcgtactcgacaaaggcccttcggcgcgttcgatccagatcgagctggcgcccttcacgctcataggcgccaccacacgcagcggcctgctgacctcgcccctgcgggcgcgcttcggcatccagtgccatctggaatattacgacgccccggtgctggccggcatcgtcaaacgctcggcgcgcattctggacgtctcgatcgacgacgacgcggcgcacgaggtggcgctccgctcgcgcggcacgccccgaatcgccaacgcgctgctgcgccgggtacgcgacttcgccatggtcaagggcgaagggcacatcgacctcgaaatcacacagatcggactcgcggcgctcaatatcgactcgcgcggactcgatcagatggacaacaagatcctcggaacgatcatcgaaaagttcggcggcggtcccgtaggactgaacaccatcgccacggccgtcggcgaagacgccggaacgatcgaggaggtttacgagccgttcctgatcaaggaaggcttcctcaaacgcacgccccgcggccgcgaagccaccgagctggcgtaccgccacatgggattcactccgcccggcggaagcgataccctgctgttctgacccgtccgcccgcctaaccctcaaaaatcccatagcatgcgccatttctccgcttcactgcaggccctcgccgccggagcactgtttctcacgacaggctgcgccccctcggtttacacgagcattcaaaaaagctacccggcccgcatcgaaggttcgaccgtgctggtttacgacatggcggactcgctgccggaaccggccgaagtcttgggcagcgttacggtcaaggacagcggattttcggtcaactgcaattatgcgaaggtcatgcagcgggccaaggacgaaacgaacaaaatcggcggcaacgggcttcatttgttctggcacaaggagccgtcggcgctgggcagctcgtgccaccgcatcgcggcccatatgcttctccttcccgactcggtctacacggcttcctacttcgacaacgtagcggcgcagaacgcccggctggcggcatacggtctcataccggcagacaggacagttgcaccggggaaggagacgcccaaggcggcgaacaacaacacgctgacattcaatgcaggatacgcctttatcaccagtgacttctaccttccggcaggagtttcaggcaatcccaagcagggactcgacatcaacgccgcctatcaatggacatcgcgtatcggaatcggtttcggactgcgctattcgggctatttcacatcggtcatgagcgaaggggcgaaattaaaggtccgcctgcactacttcgccccggaattcgtactgcggcaggaggcaggccgcaaccgcagatgggccttccacgagtcggtcggcttgggatacgcgcgttatacggagcaaatgggaagtctgtcaggcggtatcggcggactgggcttccatgtcgaggtcggctttgaatacaaattggcgcaaaacgtcggaatcggagccagcgtcggaacttacggcacacggttcagttcgatggacgacgcggtgtcgcaatacaacgacgaccagaaaggcggcatttcgcgcatcagcctcaacggcggcctgcgtttttatttttagcgacaagtcccattagggaacgtagcataaaacagatgcgactatgaatcaacgatcatctctggcttcacgaatctgcggcacggcggcgctcgtcctgctgacctgcggcgccgcgcggctccatgcggccgcccccgcaacggccgcatcccgcacggacatatctgcggcggcttgcacgccggcggaagagcggggccggacaacggaagagcaggtgcgaacggcggaaaccccggcccgaactacagaagtgcaggtgcgaacaacggaagacccggcccggacggcggaagagccgctcagaacggcgccgtcggacgaccggagcaaacgcgcccggcatctcgccccgcggggccgttcgcagcacacgttcttcgccaacgccgggtacacggcgatcctctccacgatctacctccgcgaaagttcttccggttcgctgaacgaaggactggagatcaccgcgggatacaactggacatcgcgccggggtttgggcgtcggcgtcgtctattcgggcgggttcatctcggcccggcgcggaggtttcgaacgcaccagcctcattcattacatcgcccccgaattcgtcgcgcggcagcgcgtcggacgcaggtggctcttccgcgaaagcgcgggtatcggctacggccgttacatccgcggctacgccggcctgactggcagcaggggcggcgtaggcattcacgagtcggtatcggccgagttcatgctgacgcgcttcctcggactgggagtcaccgtcggcgggcagtggctgatcgtcgattcgcccgacgtggacgacggggccgagctgaacttggccggcatcttccgggttcagctgggcggaggcatccggttctatttttaatgccggccgggcgcaataattgcaggttatttaacgttgtgtcttttagacgcaaacaaaacagttaggataatgagcaaaggtaacaaaatggatcaggcggcgcttcgctatcatagtgagggccgtccggggaagatagcggtcgtaccgacgaagccctatcacacgcagcatgacttgtcactggcctattcgcccggcgtcgcagccccgtgccgcgccatcgaggccaatcccgacgacgtgtatcgctacaccaacaaaggcaatctgatagcagtcatttcgaacggcaccgccgtcctcggactgggtaatatcggcgctctggcaggcaagcccgtgatggaaggcaaaagcatgttgttcaagacgttcgcagacatcgacgctttcgacatcgaagtcgacgagaccgaccccgaagcgttcatccgcacggtcaaggccatcgccccgaccttcggcggcatcaacctcgaagacatcaaggctccggagtgcttcgaaatcgaccggaggctgagcgaagagctggacattcccgtgatgcacgacgaccagcacggcacggccgtgatttcgacggccgcgctgctcaatgcggcgaaaatcgccggcaaagcgctcgacaaactccgcgtcgtagtgaacggcgccggtgcggcggccatcgcctgcgcgcggctcttcatcgccgtcggcgtccgccgcgaaaacatgattttctgcgacagtcagggcgtggtcaccacctaccgcacggatatcaacgagataaaacgcgaattcgccacctcccgccgcatcaccaccctcgccgaagccatacacgacgccgacgtattcctcggcgtatccaaggccgacgtgctgactcccgaaatgctgcgcacgatggcgaccaatccgatcgtcatggcgctggccaatcccgatccggagatcgcctacgacaaagcagtcgtttcgcgtcccgacatcatctttgcgacgggccgctccgactaccccaatcaggtaaacaacgtgctgggcttcccctacattttccgcggggcgctcgacgtgcgggccacgaagatcaacgaagcgatgaagctcgccgcggcacgcgccttggccgaactggcgcaggagcctgtaccgagcatggtgctgcgcgcctatgcgctgggcaaactggaattcggccgcggctacctcattcccaagccgctcgatccgcgtctgctctgcaccgtgacgcccgccgtggcacgcgccgcgatcgaatcgggcgtagcccgacagcccatcacggactgggacgcctacatcgagaagctgaggaccatgaccgagatttaacgataagtagtatatagaaaagaccccgccgttgagcggggcctttctttttatggatatgcgtcgtatgccctacgcaaagagcgcggcgaaatcggcaatcggcatcggacgcacctcgcaatcgccgatccctacgggcagcacgatgcgcagcatgccgtcctcgctcttcttgtccttgcccacctctttgagcagacgtttcacatcgaccggcggcgtgaggtcgaaacccagcttctccagcacgttcacgatccggtcgcggtcggcaggctgcaggacgcccagcttcaccgcggcggcggcgatcagggccgtgccgacggccaccgcttcgccgtgattcatccggttcgagcacttctcgatggcgtgggccagcgtatgccccaagttgagcttgcggcggtcgcccgtctcgtgctcgtcgcgttcgacaatatcggccttgacgcggaccgcggcggaaatagcgtccgtaagcaggtcggtatcggtgcgcagggcctcgaaagagacgttttcgatccgggtgaaaagatcggcgtcggcgatgacggccgccttgacgacctcggcaagccccgcacggaactcccggtcggagagcgtgcgcagcatttcgggatcgcagatcacgaagcgcggctgtttgaaggttccggccatattcttgtacccgtccacattcacgccgttcttgccgcccacgctggcgtccacctgccccagcagggtggtcgagacgaatccgaacgacagtccgcgcatgtaagtcgccgcggcgaaacccgccacgtcggtcacgatgccgcctccgacggcgagcacgaacgtggagcggtccgcgcccagctcgatgaaacgccggtagatggattccacggtctgcagggtctttatgctttcgcccgcaccgatgagcaccgtgtcgtacggcgccagcagcggatggtaaaggcggtcgatcgtagcgtcggaaacgacgatcacgcgcccctcaggcagcaccccggagaggatgtcggccgtgggaccgatgtaaatctcgctttgttcccgaacgttgaaggtgggtttcatgatctttaacttttttaagaagccaacaaatttagtacattttccggagaaattgttacctttgcaccacaaaatctattcacatgcaaaaactacgcaatatcgcaattattgcacacgtggaccacggcaagaccacgctcgtcgataaaatgatcctcgccggcaacattctgcgcgacaacgccaaacaatccggagagctgatcctcgacaacaacgaccttgagcgtgaacgcggaatcacgattctctcgaaaaacgtctcggtaatttacaaggattataagatcaacatcatcgacactccgggccacgccgacttcggcggcgaggtggagcgcgtcctgaacatgtgcgacggcgtgctgctgctggtcgatgcgttcgaaggcaccatgccccagacacgcttcgtcctgcagaaggcgctggcgctgggcaagaaacccatcgtcgtcgtgaacaaggtcgataagcccaactgccgccccgaagtggtgaacgaacaggttttcgaccttatgttttcgctcgacgccaccgaggagcagctcgactacaagaccatctacggctcggccaagcagggctggatgtcgcacaggtggaacgagccgaccgactcgatcgttccgctgctcgacgccatcatcgacgagattcccgaaccgaagatcgtcgagggaacgccccagatgctcatcacgtcgctcgaatactcctcctatacgggccgtatcgccgtgggcaaggtgacgcgcggctcgctcaaggcgggccagaacgtcacgctggccaagcgcgacggcgtgacgatgcagaagaccaagatcaaggacctgatggtcttcgaaggtctcggcaagaagaaggcggacgaagtaccctgcggcgaaatctgcgccctgatgggcatcgagggattcgagatcggcgacacgatctgcgactacgagaatcccgaaccgctgccccccatcgccatcgacgaaccgacgatgtcgatgctcttcacgatcaacaactctcccttcttcggcaaggacggcaaatacgtcacctcgcgccacatcaaggatcgtctcgaccgcgaactggagaagaacctcgccctgcgcgtgactcccggcccctcggccgacagtttcaacgtcttcggccgcggcgtgctgcacctctcggtgctgatcgaaaccatgcgccgcgagggttacgaactgcaggtgggccagccccgcgtaatcgtcaaggagatcgacggcaaaaaatgcgaaccgatcgaggagctgaccgtggactgccccgaagagtattcgggaacggtcatcgaactggcgaccaaacgcaaaggcacgctgacgaacatggcgtcgaacggcgatcgcacgcggctggaattcagcatcccctcgcgcggcatcatcggcctgcggtcgaacatgctgacggcgacggccggcgaagccatcatgacccaccggctgaaaggcttcgaaccgtgggtcggcgatatcgagatgcgcgtcaacggctcgatcatttcgggcgagaccggcacggcctacgcctactcgatcgacaagctgcaggaccgcggacgcttcttcatcagcccgatggagcaggtgtacgaaggtcaggtgatcggcgagcacacgcgccagaacgacatcacggtaaacgtcaccaaagccaagcagctgaccaacatgcgcgcgtcgggttcggacgagaagacctcgatcgccccgcccaagatcttctcgctcgaagaggcgctcgaatacattcaggccgacgaatacgtcgaagtaacgccccattcgatgcgtctgcgcaagattctgctgcacgaggtggaccgcaaacgggcatcgaaataaactccgggatatggaccacttcaccctttcgctggcggtaggcgccgtggccggagcgctcgacgtgattccgatgattttccagaatttgtcggcgcggtcgtgtttctcggcgttcttcatctacttcttcgccgcggtcatcgtcttctacagcgacctgccctacctgccgtggtgggccgacggcatggccgtcacgctgatgctgatgattccggtgctgttcaccttttcgggcaaggaccgcaaggcgatcccggtcgtggtgttcaacggcctgctgttcgggttcctgatcggcgtggcggaacgctatttggggtaaaagatgcaaaaaacggacatatgtccgtttttttcgtatatcccatgcagtatcaggcggttgtctccatttatacaatgaaacgacacggaaagccatgagaaaatacatcatactgctcttcatatccgcctttgcgctcggcgcatgcgacaagaacgacgattatacggtccgggaatggaccgtcgcatcccagctgggcatctcccacgggttccacacgctgcagcccgtgctgctcgtcaaagccaacgacgacacctcgtggcgcgccgtatacgagggcatcgagggattcgactacgaacccggatacgaatacaaactccgcatcaagaccaagcagctggccgacccgccgcaggacgcatcgtccgtacggtactcgctgctggaactgatctcgaaaatcccggcgcggtccaatattcccgacagctactaccctacgttcacgatggaggtagcccccgaacccgtcagttactacggcgaattgtacctcagcgtccgtttccccgaagtcggcctaaacgactggcagcggtggccgttccggatcgagggattcgactacgaacagggctacagctacaagctgaaagtcggcacctcggtcgtcggagtggacgaaggatactacacggtacagtattcggtgctcgaaatgctggacaaacagccggcgcaggagtaaaccggcagagatacctaagaaccggcccttcttacgaggggccggtttttactttccggacgccgggcggttttcatccgcgccattcgtccggcgttattcatccgacgcttagtgtccggcgccatccgtccggtgccatccgtccgacattatccgtccggcattcccttcaagcctcatttcttcagcgtcgcaaacgaaagaatatgccaagtaacgcccacggcaacggcgagcagcgcggcctgcgcccaccaccatccggagagcggcgcaaaaacgcagtagagcatcgttccccacatcagcgtgagcgaaacgatcttggcgcgaagcggtatggcgcgattttcgcggaagttgcggacatacccgcccagacaggggtgcgccaacagccaatcgtaaagccggggcgaagagcggacccacaatgcggcggagagcagcagaaacggcgtagtcgggagcagcggcacgaaaataccgacgacacccagcacgaacgacagacaccccaaggcggcgaggaaaaatttcatggagcaaaaatagcataaattcggaacccggaagagcggcgaccgttatttttgcctatctttgtatgacagaacctaaaaacaacacaaaaacaaaaatacgatgactaaaataggtatcgccagcgatcacgccggctacgaaatgaaagaatttctggtgggctacctctcggccatgggttacgacgtccacgacttcggccccggctcccccgaaagcgtagattatgccgactacgcacacccgctggccgaagcggtcgagaaaggcgaattcgaatgcggcatcgccctctgcggttcgggcgaagggatgaccatgaccctcaacaaacatcagggcatccgcgccggactggcgtgggaaccggagatcgcatcgctcatccgccgtcacaacaacgccaacatcatcgtcttcccggcccgcttcatcaccaacgacgaggccgtggcgatgctcgacgcctacttcgcggcgcagttcgaaggcggacgccaccagcaccgcatcgagaagatggccgtaccctgcggcgtcgcggctgaaaaatagccgaccgggagacgcctgcggatcaaaaacgaatgcgggcagcacagatgcgatgcgggcaagtgccatgcgcgcaaccatagatgcaatccggacaggcgcgctggacagcggatgcgataggggcaaaggccacgcggacagaacggatgcgatgcgcggacagcgaatgcagcaggtacggatcgacggatacgacgatccgcaaatgcagcaaacgttccggcaaaaacagggaaaaccggacgccgcctgcgcgcacagccagccggacaacgcaccggcaagcgccggaatcacatccgcccaagaccgggcaacgcctacaacgaaaagatgaagggagtctgcgaccgcaggctctctgctttttcgggacggtcgaacagcccgaaaactgcagagccgctgcccgacatcgaagcgtaaagggcaccagcatcgagtaagttccgcttggatgcgctgatggcgggatgcgcggcgaagatatgcggttcgaaatcgttggtcacgatctcctgccactccgcaacgggacgccgcagacgctcggcaagcggcacggagggcacccgcggacgtacgcccgcataggcttcgcgcgtcgagaccccctcgtccggcttcacgatcacgagggtcagccccgcaagatcgagcgggaaaggcgacatgatctcgccccgtccggtgcagaactgcggggagttgcgcacgaagaacggcgtatcgctgcccagctcggcggcgcgggcgatcagctccgcttcggacaggtgcaggtcgaaaagccggtcgagagccagcagaaccgccgtgccgtcggacgaaccgccgcccagcccggcgccgaacggcacccgcttgtcgagccggatcgcaacgccgtccacgccgtatcggtcgtgcatcagccggaaagccttgatacagatattctgttcgggttcgcagtccaccgccagcccttcggcacggaaatccacacccgccccggccgtgcgcacgacctcgacttcgtcgtaaagtccgcgcacgggaaacatcaccgtttcgaggtcgtgataaccgtccgcacggcggcgcaggatatccagccccagatttattttgcagtttgcccgtaagatcatacggcaaagatataaaatttgtacttttgcagtatgaaattccgcaccgaaatcgaaattgcgccccttggaacgaagatcggctacgagaaccgcatactggccctcggctcctgtttcgcggaacacatcgccgggcggctggcacaggcaaaattccgcgtcacggccaatccttcaggcattctgttcaacccgctctccatcgccgccgcgctgcgcagctacgcaggggagaatcccgtacgacattcggaactgggattcgacggcgaattgtggttccattacggattccacggctctttttccgccccggaggcggaccaagccctcgcggcgatgaacgccgcccgaaaaagcggagccgaagcgctgcgcgcggccgaccggatcgtgctgaccttcggcacggcgtgggtctacgaacacgacggcgcagtggtcgccaactgccaccgccggcccgccgcggagttcacgcggcgcaggctgggcgtggacgagatcgtcaccgctttcgcagacctcatggcaggtccgctcggcggcagggaggtgatccttacggtcagccccgtgcggcatctcggcgactcactggcgggcaacgccgtgagcaaagccgcgctccgtctggccgccgaagagctggcggaacgttttcccgacgtacactatttccccgcatacgaaattctcaacgacgacctgcgcgactaccggttctacgccgacgatctggtgcatccggctccgcaggccgtggaatatgtctgggagaagttctcggcggcggttctctcggagcaggcccggcgtctgctgcccgacgtccgccatatcgtcgtggccgcagcgcaccggccccgcaacccgcagagcgcaacctaccgcgagttctgccgccgcaggctcgaagagatcgcggcgctgccgcagatcgattttcggaccgaagcggaatatttccgccgatgtatcgaaataaattcgtaaatttgcggtctatcattcgcataccatgaagcacaaaatcatcttactcgccatagccgccttcgcggccctcgaagtctcggccgcacggccccggctggtcgtcaatatcgtcgtcggctcgatgcgcgccgaagacctctcgcgttacgccgacaattacggcgaagggggactccggcgcctgatcgacggcggcacggtcttcgccgacagccgttacgactaccagcagaccaccacgcccgtgtcgctggccacgttatcgacgggcgcgatgccctcgacgcacggggtcatcggctcgcgctggcgcgactacgtcgccaacgaggccgtggagctgatcgccggacgcaacggcgcaggcccctacaacctgatcgccccgacgctctccgaagcgctcctgcagcacgaacccggcagcaaggccgtcaccgtggcggccgaagccacgtcggcgatcgtcttgggcggacgcggcggcgaggtcttctggctcgactcggcgcgctgcggctggaccacctcgccctactacgccgccggcgttcccgaatgggtggcgcgcagcaaccgcgaacgctacaacctctcgtacatcgcccccgaatggcggacgctctacgaaaaaggccgctacgtcaactcccgcaactgggacgtaatcctcacgggcaagaacaaaaaggagaaggacgagacgggcagcggccgcctgaagctcaccaccgatttcgaccggatgctctacaccccggcgggcaacaccgccgtattcggcttcgccaagcaggccatcgcccagttcaagctcggcaccgacggcacgcccgacctgctgaacatctgtctcgattcgtcgcgccgcatcagcgaagcctacggtcccgaatcggtcgaggcggaggacatgtattacaggctcgaccgcgatctggccgactttttgacgttcgtattcgcgcaggtcaagaacggcgaagtgctcgtcgtattcacgtcggaccacggaaccagcccctcgtacgacgcgggccgcgaagaggccgaccggttcaacgcccggcagttcgaggtgatcgtaaacgggttcctgaacgtccgctacggcatgggcaactgggtgctggagtacgaggacaaatgcctctacctgaaccacaacctcatctacgagcggggactcaatctggccgacgtgcagaacgaggtggcgatcttcgccatgcagttccgcggcgtctcgcacgccctctctgccacggccatgcgcacgagctacttcggcagcggctacgcccgcaagatgcagaacagcttctatccccggcgttcgggcgacgtgatcatgaacctgatgcccggctggatcgaggagaacgaccgctgcgcatcgtcgtcgggttcgatgtacggctacgacacgcaggtgccgctggtattttacggcttcggagccggtcccctgcgcgtgaagcgccgcgtggacatgacggccgtggcgccgaccgtggcgcgggtgctggagatcaccgaacctgcggcgtcggagggcgaagtgctcccggaaatcatcgatttttaaggattaaaaaaatatacggacatggataagatacaggaggagatcatcgaggagttctcggtattcgacgactggctcgacaaatacgactacctcatcggcctgagcgattcgctgccggccatccccgccgagcaccgcaccgaacagtacctgatcgaggggtgtcagtcgcgcgtatgggtggacgcccgcatggagcagggccgggtctattacgccgcagacagcgacgccataatcaccaagggcatcatcgccctgctgatccgcgtgctgaacggtcgcacgccgcaggagattctcgacacggagctctatttcatcgacgccatcggcctgagcgcaaacctctcgcccacgcggtcgaacggcctgttgtcgatggtcaagcagatgcggctctatgcgctggccttcgcgagcaaggacggtgcgaacgaaaaataaaaaatcggaaaccaacgtttctttcggcagaagaggcgtccggccctgcgaatcggccggaaccgggaagccggaagggagagtttccggcggtttttagttttcaacgcttaatttcaatgtcacgatgacacccgaagagatactgaaggtcgagaaggagatcgtccttacgctcaagaacatatacgaccccgaaatcccggtgaacatctacgatttgggactgatctacgagatcgactacacgcccgacggcgtcgccaacatccgcatgacgctcaccgcgcccaactgcccgatggccgacatgctcgtcgaagacgtaaaccagcaggtagccaaggtcaaaggcgtgaagtcggtgaacgtgattctcacgttcgatcccgtatgggacaaaagcatgatgtcggaagaggcactgctggaactcaatctgttttagcatgacggcggagcgggaacagcgcgcgatgaaccggcttcgggccggagccggggcttacgcctgcggcggattcctcgcggggcagtctgccttgcagcgcagcgagatatgcacgtcgctgctcttcgaccggctcgaacgcaaaatgcgcatggtggaggcgctgcggcacgaagcggcggagaactggaaccagaccttctacctgctttacttccgcacgctgggcgaccgtcagaatcaggaagcctaccttacgctggcgcggcgcgtatcctacaaaaccgttctgcgcgaacggctggcgccgcatgccgtcgaatcgctgctcttcggagcgtcgggactgctggcgctctatccgcacgacacctacacgctcaacctcgcccgcaatttcgaatatctggcggccaaatacgacatcgaaccgatgcaggccggagcttggcagctgggcgacatacgcccggccaaccaccccgtactgcggctggcgcaagccgcggaattcttcgctcaggacgagttcgtcatggagcgcgccatggcctgccgcacggaagaggagatccggcggctcttctgcgtcgaggcctcggattactggcggacgcaccatattccgggaatcgcaggcgacgaccggcccaagcgtctgggggctttcaaggccaacatcatcggcatcaacctcgtctcggtgctgcaattcgcctacggcagctacaccggacgcgaagccctgcgcgacagcgccctgacgctgctcgaacgcctgcccgcggaggataaccgttacatgcgcggctggcacgacgcggggctgacgccccgcagcgccttcgagtcgcaggccctgttgcaactggcgacggaatactgcgccgccaaacggtgcgcggagtgccccgtcggacggcgcatcctgaacaatctgaaaatcggaaacaactaactctaccgccatgcaaaaacagacaccactgatcagcgtcatcatgccgctctacaatgcggagcgattcgtcggcgaaagcatcgagaacgtcctccggcaaacggtcggcgacttcgaactgatcgtcatcgacgacgcatcgaccgacgcttcggccgagatcgcacgcgcctacgccgcaaaggacgaccgcatcgtactgatgcacaacgaactcaattcgggagccgcacgcacccgcaatcgggcgctggacgccgcccgcggaaaattcatcaccttcatggatgcggacgacctctgctctccggaacgcttcgccaaacagctcgccttcttcgaacaacacccgcaaaccgacatctgcggcagttactacacgatgttcggcacaagggggggggtaatggcgaactgaaaatccaagtcccgctcacccacgaggaaatccagtaccaactgtttttcgggtgcccgttcggcatgtcgtccgtcatgctgcgcagcgaatctttcaaacggaccggcatacgcttccgggagtgtatggccgaagactatcagttatgggtcgatctttcggaacacctccgcatggccaacattccggagtacctgaccttctaccgtcgatgggaagaccaaatctcgacacgccagctggaccgccagaccctcagcgcccagcttacccagcaggaacaactcgcgcgcaaactgggcgtccggctctcggacgacgaagcccgcatcttcacccgtttctccctgcggaccggagacgtgaagaaaagggaactcgcctcgtaccgccgcattctcacacgtctctacaaggccggcatccggcattcacacgatcccaagctgctcaaacggcagcttatgcgccggtacaaaatggcctgcggactcttctatccgtcgtggagggtctggattcacaaacgtctgttcctcgtccgacttctcgcgtcatgaaaaaaatcagcatcataattccgctgtacaacctcgaagggctgatcggcaagtgtatcgcttcggccctcgatcaggacctgccgcccgaagagtacgaggtgatcgtggtggacgacggatcgaccgacggttcgttggccgcagcgcagcgggcggcctgcgggcatgcgaacgtccaagtgcacgccaagcccaacgaaggcgtaagcttggcacggaattacggcacggagcgcgccgcaggcagatatgtcatgtacgtggatgcggacgactacctttcgcccagcgtactcggagggctgacgcagatcatggaccgggagcggctcgacatgctctgtttcgacatggcgggcgtcgacgaacacggcggcgaccttccgctctggagcgacgggcttttcgcacgcggcggcggggaggtgcagagcggacgcgatttcctgcgtcgggactgtttcctgcccatggcctgcgcctacctctacgaccgggcgatgctcgaacggcatggactcggcatgctcccgatgcggcacgaggacgaagagttcaccccgcgcgccatttacttcgcaaaacggatccgatatgtcccgatccgggtgtacaactacctgcagcacaacggatcgttcatgggaagctacgatccgcagcgccgctcggactttgtccgggcgatgaaaagcctgaccggcttcgcggcccttatcgaagaaagcgatccggaaggcgcacgcctgatgcggctgcacgtgggcaaaacaatgtttttcgcctgcaaacagacgatactcggcaggcagggaaacgcccgcgaaatgctgcgcgacgcccggcagcagggagtcatgccgctcgcattccgcagatacaacttccgccatttcctgataaaccgcgcgcccgcgcttttcgtcctctactaccggcttcacaaaagacggtgacccgtcggccggaatgcggctccgaatcgcggaaaacccgcttcgggtccctttatagggacctatttttttgtgcattcgggaaaaataagtatctttgtaggatttacaaccacaaccccgaaatatcagaaaacgaatatggatatagctgccagtttaatcaaactcatcttcggctccaaagccgacaaggaccgcaagcagatcgagccttatctcgaaaagatcaaagcagtctaccctgccatagaagccctttccaacgacgaactgcgcgcccggagcgaagcgctgaagaagcagatcgccgatttcatcgcagccgacgaagcccgcatcgtggagctgaaggccaagctggagttggccgagacgtcgctcgaagagaaggagaaggtctcgaaggagatcgacgagacgaccaaacgcatcgacgaaaagatcgaggagaaactcgacgaaatactgcccgaagcgttcgccatcatgaaggacacggcgcgccgcttcgcccagaacgagacggtagtggtcacggccaacgatttcgaccgcgatctggccgccgccaaggatttcgtaaccatcgagggcgacaaggccgtatacgccaatcactggatggccggcggcaatgacgtgaagtgggacatgatccactacgacgtacagctgttcggcggcgtggtgctccacaaaggcaagatcgccgagatggcgacgggcgaaggaaagaccctcgtggcgacgctccccgtattcctcaacgccctcgcaaaaaagggcgtgcacctcgtgacggtcaataactatctggccaagcgcgactcggagtggatggggccgatgtaccagttccacgggctgtcggtggcctgcatcgacgacacgcaacccaactccgacgcccggcgcaaggcatacatggccgacatcaccttcggcacgaacaacgaatacggcttcgactacctgcgtgacaacatggcttcgtcgcccgccgacctcgtacagcgcaagcaccacttcgccatcgtcgacgaggtggactccgtattgatcgacgacgcacgtacgccgcttatcatttcgggtcccgtgcccaaaggcgacgaccagatgttcgagcagtaccgcccggccatcgaccacctctacaacctgcagaagaacctcgtgacggggctgctggcggaagcccgccagctcatcgccgagggcaagaacgacgaaggcggcgtgaaactctaccgtgcgcacaaaggtctgcccaaatacaagccgctgatcaaatacctctcggaaacgggcgtcaaggcgctgatgcagaagaccgaaaacacttacatgcaggacaacaaccgccgcatgcccgaaatcaccgacgacctgttcttcgtcatcgacgagaaactcaactcggtggaactgacggacaaaggccatgaagtgctgtcgaaatacttcaacgaggacggatttttcgtgatgcccgacatcggtgcggaagtggccgaactggaaaagagcgatctctcggccgaggaacgcgcccgcaaacgcgacgaggtgatcaacgactactcgatcaagtcggagcgcgtgcacacggtccatcagctgctcaaggcctacgccatgttcgagaaggatgtcgaatacgtggtgatggacaacaaggtgaagatcgtcgacgagcagacgggccgtattctcgacggacgccgctattcggacggactgcatcaggcgatcgaagccaaggagcacgtcaaggtcgaagccgcgacgcagacattcgcgacgatcacccttcagaactacttccgcatgtaccacaagctggccggtatgaccggtacggccgaaaccgaagcttcggagttctggagcatctacaaactcgacgtcgtggtgattccgaccaaccgtcccgtggtccgcgacgaccgtcaggacctgatctacaagaccaagcgcgagaaatacaacgccgtgatcgaagagatcgtgaagctggtcgaagcgggccgtccggtgctggtgggtaccacgtcggtcgagatctcggagttgctgagccgcatgctcaagctccgcaacatcaagcataacgttctgaatgccaagcagcaccagctggaggcccaagtcgtggccgaggccggacgttcgggacaggtgaccattgcgaccaacatggccggccgcggtaccgacatcaagctcacgcccgaagtcaagcaggccggaggtctggcgatcatcggcaccgaacgccacgaaagccgccgtgtggaccgccagctgcgcggacgcgccggacgtcagggcgaccccggatcgtcgcagttcttcgtatcgctcgaagacgacctgatgcgtctgttcggttcgggccgcatcgcctcgatgatggaccgcatgggactcaaggagggcgaggtgattcaggccggcatgatgacgcgcgccatcgagcgtgcgcagaagaaggtcgaggagaacaacttcggcatccgtaagcgtctgctggaatacgacgatgtgatgaactcgcagcgcgaggtgatctacacccgccgccgtcatgcactctacggcgagcgcatcgagatcgacctcaacaacatcatgtacgactacgccgacaatttcgtggagaccaaccgcggcatcgagttcgaggatttccgcttcgagctgatccgcgaagtggccgtagagccgtcgttcggcgaagagacctacggttcggcgaagcccgccgagctggtggagctgatcgtcaaagacctcaaggagacctatgcacgccgtgccaaggccgtggccgacacggtacgccccgtcatggagcgcatctacgaggataagaaggatcagctggattcaaacatctacttcccgattacggacggccatctgggctacaacgtcccggtgaacctgctgaaatgcaagaacacggacggcgcggagatctacaagatattctcgaaagtggtgatgttcaccaccatcgacgacgcatggcgcgagcacctgcgcgaaatggacgacctgcgccaaagcgtgcagaacgccacctacgagcagaaagacccgctgctgatctacaagttcgaatcgttcggactgttctcgaagatgatcgtcaaggtcaaccgcgacgtgctggcgatcctcaacaaggcctatatccccgtgcgcgaccaaaacgccgaagccgtacagcgtcagcgtcaggaacgcgccaaggtggacgtgaacaaactgcaggcttcgcgcatgcaggcggcggcgcaggcaggacagcaggacaagcagaaaccgatgccgatgcacgtcgagaagaaagtgggccgcaacgatccctgcccctgcggaagcggcaagaaatacaaacagtgccacggcaaaggaatgtaaaccggcaatgggctacaacgaagagaaacaacgtcagctggatatccgctacctgcgcatggcgcgcatctgggcggagaattcgtactgcgtgcgccgcaaggtcggagcattgatcgtcaaggacaagatgatcatatccgacggttacaacggcacgccttcgggcttcgagaacatctgcgaggatgaaaacggccacaccaaatcctatgtcctccacgccgaagccaacgccatcaccaaggtcgccaaaagcgccaacaactgcgacggctcgacgctctacatcaccgccgccccctgcatcgaatgttcgaagctgatcattcaggctggtatcaaacgggtggtgtactgcgaggaataccgctcggaagaggggctgaatctgctgcgcaaagtaggcatagaatgcgtccagctcgaagtggaagactgctaatcggaatgagaatgaagccggcggtgattctgctgacatgcctctattgctggctccccgcagccggacaggctcctgcgcaggacgcggtgggcaaagtgctgctcgcgacaccgcccgcacttcccgaatatgtctactgcgaaatcagcgggtacaaaggagcgggatgcaacggcatttatgtcgcattcgatttcgggcagcctatgacgaaaaagaaccgtctcataacagatgccggaggacgtgcgatcacgttcaactcgtgcatcgacgcattgaactatatggtatgccgcggctgggaattcgtgcaggcttatgcggcgggcgaagacaatgatttcagctgcatgctgctgcgaatgccgacatcgaagatgagcgccgcacaacggcaggttatgctcgaagcagcgatgaaaacgggcgagtaaacggatacggttcaatttttctgcatgttttatataaggagtccccgcggctccttatttttgtaattccgccgggcggcgggcggtcccagatgtctccgagaacgggctttccccttgacaagcgtttcgagcggcattccggcaaatgttccgacgactattcccacaagcgtttccggtatgttcggaccgggatttgcatttcccggaaagaatcattacttttaaggtataaaccactaaaaccgcatcggtatgaaacgcatcgtcatcgtcggagcgacatcgggcatcggactcgaagtcgcaaaactctgtattcaggcgggttggcaaatcggggccgcaggccggcgcgaggaggcgctcgaaaagctccgcacccaagctccggacctgatcgtgaccgaatcgctggacatcacgcgcgacgatgcgcccgaacatctgtcacgcctgatcgacaagctgggcggaatggacatttacctgcactgttcgggcatcgggaaacgcaacaccgagctgcatcccgacatcgagatcgacaccctgcgcaccaacggcgaaggattcgtgcgcatggtgacggcggctttcggctatttccgcgctcacggcggcgggcatctggccgtcatcagttcgatcgcaggcaccaaaggactcggcagtgcaccggcctactcggccaccaaacgcatgcagaacacctacatcgacgcactggcgcagttggcacatatggagaagctgaatatccgctttacggacatccgccccggattcgtcgccacgcccctgctggccggcgacgggcattatccgatgctgatgcaggtcgggaaggtcgccgcacggattatgaaggtcctgaagcggcagcgccgccgcgtggtgatcgaccgccgctatgcggtcatggtattcttctggaagatgattcccgaatggctttgggaacggctcaacatccgcaagaacgactgacgccccccgtaatgaagggttcgcggctacacccctgcggaccgacgacagagcgtatccgatactgatgcagctcgaaaagggcgccgccagaaactctcaacgaggctccgaaacataaaaacggaacggaggtgcggctgaacggcaacagccagaaaagcccccatctcccgaattatcggtgcatccggtccgtaaatccggttcctcaccgaggtcggattccacacaaacagattccacacaaaagtcggccttcgtcccaaacgggtccggcggtcaagacgatgcagataaaacgaacctcccggtctcttcgaagccgggaggtcttgttttcatatttcaaaaacggcaggtcatccggatcagaatgacaggtcgtccggatcagaacggcaggtcgtccggatcgtcggcgggaatcgacggcgcgggggcgggcttcggagccgcaggctgctgatagccgcctgcagactgtccggcagaggactgctgcgaaccgtaaccctgctgcgatccatagccctgctgtccgtcggacgacgggttgtcgctgcggcggcccagcagattcatcacatcggccagaatctcggtcgtatagcgtttgttattgtccttgtccatccattcgcgggtgcgcaggcgtccctcgacgtaaatctgcgtgcctttgcggacatacttgtccaccacgtcggccagaccgcgccaaagcgtgatcgtatgccattcggtatgctccttggcctcgttggcctgccggtcgaacaaccgttcggtcgtagccagacggatgcgggcgaccttcacgccgccttcggtggtccggatttcggggtcgataccgacgttgccgatcaaaattaccttatttaccatattctataacattaaaattatcaataaacacacgacggaccgggagaaatccgcatccggcacttctgcggagcggcccggcgccaaagccgggatacagcggtgaagatccaagccacatccccgacgactccgcagcgaacgtccgtgacaaaaacccggaacgacagtccgtccaatgccgcaacaaaaccggcacggcccgaaacggcattccttctaaagctcctttatcatgcgcttgaagagcacctccatcttgattccggcctttttgccctgacgctgcacgtcttcgtggtcgcccacttcgtccgagagtccgcagttggtgatgaccgaaacgccgaagaccgggatcgacatatggcgcgccacgatcacctccggcacggtggacatgccggccgcatcgccgccgatattcttgaaatagcggtattcggcctgcgtctcgaacgtcggccccgtgccgcccacgtacacgccgtactggagcttgatattctcctcctcggcgatggcggtcgccttggcgatcagctccttgtcgtagcagttgtgcatatccggaaagcggggaccgagttcggcgatgttggggccgatcagcggattgggcatcaggttgatatggtcggtgatgaccatcaggtcgccgacgcggaacgaggtgttgatgccgcccgaagcgttcgatacgaaaaggtatttgatgccgagctgccgcatgacgcgcaccgggaacgtcacctgctgcatgccgtagccttcgtaatagtggaaacggccctgcatggccacgaccctgcggccctcgaccatgccgaaaatcatacggcctttgtgtccttcgaccgtggagacggggaatcccggaatatccttgtattcgatggcgaagcgtgtctcgatcttatcggcgaagccgcccaaaccggtgccgaggatgacgcccacttcgggagcgaaagagtcggtggcggcgtcgatgaaagccgccgtttttttaatttcctctaacatcttcttctagtttttgcagaaaatccgtagccgaatcctctatgaatgaaatatttatcggtaaatagtatatgctgcgccggatctcttcggggatcttggcgcggttggtcagtttcacggcgtccttttcggtcgtcacgatgaccgcaccgggacagcggcccagcaggtcccgcagccggttcaggtcgcggaccttgtaaacatggtggtcctccagcgtcatctcctgcacgacctcgtagcgttcgcgcagcgtcgcaaggaacggcttgggattgccgatgcccgaaagcgcgatgacctgccgcccgtgcagaagcggttcgtccggggccgcatcgggatagagcggctggggcatgaagctctcgaaacgggtgaaatacacccgctggtaggcgacctgaatcagcaccttgcgcatgatgcgccggtcgatgggggccatcttctcaggacacttcgtgaccacgaaatagtgggcgcggtgcagctcttcgggcaggtcgcgcagcgttccgagcggcagcatcctgtcatgctgaatggggcgcgtcgcgtcgatcatcacgatattgatcttcggctccacataacggtgctggaagccgtcgtccatgatgatgaggtccacttcggggtgttcggcccggatgcggcggatgccctcggcgcgtttctcgcacacgacgaccaccgtgccgggaaatttgagtttgatctgaagcggttcgtcgcccacgtcgcggtagtgggaatcggtcttcacctcccggtagcctttggtgcggcgaccgtagccgcgcgacagcagggccacgttgtgcatctgcgacatgtaggcgatcaccatttcggccatcggggtcttgcccgtaccgccgacggtgatgttgccgatgcagacgaccgggatgtcgaacttctcgcttttgagcactccccagtcgaacaagcggtgacggaaagtcacccccgctttatataagagagctgcaggtgcaagcaggcatttcaacatcttcggtctgtttatctacacaatttttcaaaggtagaaataaatcttcggaacgcaaaacaaaaaaaagcaaatctcaggcctcactgacaaacgaataataaaattggcggaagagtcgtttttttatatctttgtttcgattatgaaaagtctcagattacccatatgcgccctgctgctggttgcggcgggggcgtgcagcagaacgcagcagcaggagacggccggggaggaagccgccgagcagcacaatatcgtatacggcatcaacgccgacaattaccgcaccgagaccggcgaggtgggaagcggcgaaacgctgggcaaaatcctgaacggattcggcgtttcggcgctgacgatcgaccggctcgacaaggcttcgaaggatattttcccgctgcgcaacatccgcgcgggacacaagtacacggccttcatccacgaggattcgctctatgccccgcacttggattatctggtttacgaacgcaacgtcgccgaatacgtggtcttcggattccacgacgactcggtgagcgtccgcacgggcgaaaaacagtttaccgtgcgccgcaccaagaagagcgccacgatcaactcgtcgctctggggcgctatcatggagcaggagctgccctatgcgctggccgccgaaatggaggacatttaccagtggacggtggacttcttcggcatccagaaaggcgacaacttcacggtcatctacgacgagcggttcatcgacgacagcgtctcggtcggcatcggccgcatctggggcgcgaaattctgtcagggcggcaaggagtactacgccattccgttccggcagggcggcaaaatccgctactgggagtatgacggcgcaagcctgcgcaagcagatgctcaaggcgccgctgaaatattcgcgcatcagctcgaaattcacctacgcccgcaaacatccgatctacaaggtataccgcccgcatacgggcgtcgattacgccgcaccgaaaggcacgcccgtgcatgccgtcgccgacggcgtggtcaccttcaaaggctggggcggcggaggcggcaacacgctcaagatcaagcatgcgggcaacctgatgacgggttacctgcacctgagcggctacgccaaaggcatttcgaagggttcgcgcgtatcgcaggggcagctgatcggctatgtcggatcgacgggcgcttcgacgggaccgcatctcgactaccgcatctggaaaaacggcacgccgatcgacccgctgaaagttccgcaggaacccgccgagccgatcgcaaaagagaaccgggcgacgttcgaattcgtacgcgaccgcatcgcggccgagctgaacggcgaggtgaaggacgaagagcgcatcacgcagctggattcgctcgtaattccgcaggctccggcggcttccgccccggcaggcgaaaccacggcaggcgaaaccacggcagcgaaataacgcatatggcggcagcggaaacggacgggaaaaagatgcagccggcagtcgcaacaaaagcggcggagaggcgggacacggaaaaaccggggacggaacacaaggctcaggaaatgaaaacggaagaagccccggctgagaaagggagcgtcccggctgcggaaagcaactccccggctacaaaggggcacgctgcggctgcagaagggagcgccccgactacaaaggggaacactccggctgtggaagagaacgctgccgttgcggaaggaagcgtctcggctgcggaaaggaacaccccggttgcggaaacgcccggaagcgcggaatccgggacggcaaaaacgagcggctgcggcgaagcaataaacgaacgtttcgtgcgttttctccggcggcaccatgtactgacgctggccaccgtcgcggaaggggtcccctactgctcgaatgcgttctactgttacgacaaggagcgaaacctgctcgtattcacatcggaccccgcaacgcgccatgcgcaggaaatggagcgcaatccgcgtgtcgcggcatcggtggtcctcgaaacgaaaatcgtgggccgggtgcagggattgcagttgtgcggcacggcagcgcgggccgacgaaacggccagacgggcatacctcaaacggtttccctacgcggcgctggccgagctgacgctctgggcgataaggcccgattatatgaaactgaccgacaatacgctcggttttggaaagaaactgatatggaacgacaaactggagtcatcatcgtagcgggcggcggcggaagccgcatgggaggggcgcgtcccaagcagttcatgctgctggggggcatgcccatattggcgcgcacgatcaacaacttcgccgcggcgcttcccggagcggaaatcgtcgtcgtactgcccgccgaacacaccggcttctggcacaatctgtcggcgcgtttcgaagtggcgccgcacacggtcgccgaagggggacgggagcggttccactcggtgaaaaacggattggcggccctgaaacgcgatccggagctgatcgccgtacaggacggcgtacggccgctggggtcgcaggagctgatccggcgcacggtcgcggccgccgcggaacacggcacggcgattccggtcgtcgagcctgtggattcgttccgcgaaacggacggcgcggcttcgcagatcatcgaccgccgccgcctgcgcatcgtccagacgccgcaggtattccgcgccgagctgctgcgccgcgcctacgaaacggaataccggcccgaattcaccgacgacgcttcggtagtcgaactgtccggggaagctgtatttctctgcgaaggcgaacgggcgaacctgaagatcacgactcccgaagatacggtcatcgccgaagcattgctggctgaccgcgaagaaacacacgaaacggatggagaaaatatataaataccgcttcagccgccgcacgatctattggacgctgatctatctggtggtcttcggactgctgggcggactgctgtaccacctctacgagggaggttatctctcggcgtggttcacgtcgttcatcgtggcgctcatcgccctgatgtcgctgtcgattccccgctacatcgtggttacggacgaaaaggtcgaggtgcgctgtctgctggacatcaccgagataaagcgcggggaaatcgcctcggtacgccgcgtcgatcccaagcggatgaaatggttctttccgctcttcggcggctgcggattcttcggttactacggccattttctggacctgcgccggttcgaacgcgtacgtctgtacgcttcggagtggaagaacttcgtggagatcaccgacatatacgaggagcggctctacgtgtcgtgctccgacgcggattgtctggtcgccgaactcatgccgccgggcggcaaccggctgaccgaagaggccgcggaagaagaggaggaggaacgggaggaagcgcagaccgcaaaggagacgcagacgacctgagaaacgcaggcgacataagacggcatccgatttgcggaagcgacggaatgcccgaccggacaaaaaacggcccgaaaaggagagaatacgcaattaactgcattataccgaaatcaacacattttttattcacttaaaaagacagagaagatgaaaaagtaccgttgcatcgtatgcgaatggatttacgatcccgcagtcggcgatcccgacggaggcatcgcccccggaacgtcgttcgaggatattcccgacgattgggtctgccccgtctgcggcgtaggcaaagaccagttcgaagaggtcgaggagtaaatccgaaagaccggaaaagtgcgagacgcatcccacgggtgcgtctcgcggcgtatacggcgtcggcgtcaaaaagcggaaaaggctgttgtgcagtttgcggaaaattattatttttgtctgccgtgcattttgcgcggtacaatccaaatttatataacgatgaaaaaaatcctattcctgatggccgtagcggccatgacttgggggggggtaacgccgtaacggcacaaaccctcgaacccgatttcgagggtgaggtcgtcggaatatattccgacggatcgtccgcaaaactcgaaaaacacaacgttcagatgcgaaccggcggcggcgtatacattgccggattcgcagccagcaaatccaagacaaaaatagtcatcgaaggcggcagggccggaatacggttcaaaaccggagagccgttcgccctcatcgtccgcgccaaggacaacaaagccgacccgatgtcgatcgtgcgcatcttccggatgaaaagcacgaagaagaaccgttcggcggtgatttcggccgtcgggtccttcgccgtccaatccaacaccatggaatacctccccttctcggccgagaaatacggggaaagctcctaccgcctgacgttcggggagcagcccgaaggcgaatacggcatcatcgtctcgaaccccaacaacgtggacgagaagatggtgatcgtttcgacattcgccatcggcggcggcgaagaggcccggaaccgatgatgacgacacactgaaaaacaaaagatgcgcccctcgcagggcgcatcttttcgtaaaggagattaccgtcagttgatattgggcaggaacgaataattcttcgaataaccgagcatctgtttcacgtagtcggccggatagctgatcttgacgtccacgatttcgccgtccttctccacgagttcgaattcgggattcacgaaaccgccgtaaggctcgatgctgagcgcataatagcggtcacgcacctccttgtgcagttcgggatcgacctgtacggcatactgctcgacaagcgcccggcccgcctcgtagtcgccttcggacttgatgcgctgtatctcgcggagcatgtcgccgaacagcccgcgcagcttctcgtagtcattgaccacgacgtaggtcttgccgttttccctgaccatttcgatcacgttgtcggccttgccgcgctcgtagcaccactcgcagatcagtttgcggttgcgcatgtgcgactcttcgacgttcttgcccggctcgatgcgcgccagctgagtcatcatgccgttcaggatatatttcgcatacccggccttcgccacgtcgaacgagggtaccagccccagctcgaccattttgggatcgcccagatagtagagaccgaacaggtcggcgcgcgtctcttcgagcgtcgagctgtagcttttcagctcgccgcccttgacgcccggagccagctggcccgaaccgtggcccagacactcgtgcaggtcggtgtgcaggtcgtcggccagcttgccgtacttgtccatcaccgcacggtcgtcggcacgcagcacgaactcctcgttgaagccgttgccgtgcgcggccatgtcataagcataggtgatgttgtcgatggtcaccgacttagagccgtattccttgcggatccagtcggcgttgggcaggttgatgccgatcggcgtggcgggatagcagtcgccgccgagcatcgccaccgtaatgaccttggccgaaacgcccttcaccttctccttgcggtagcggggatcgacaggcgaatggtcctcgaaccactgcgcgttctccgaaatgacctcggtgcggtggcaggcctccttgtccatgaaatcgacgatgccttcccacgacgccttgcgtcccagcggatcgccgtaatcctcgataaagccgttcacgaaatcgacgttcgagacggtatccttcacccagccgatgttatagcggtcgaattcgcgcaaatcgcccgtcttgtaatagctgatgagcgcggcgatattgctcttctgcggctcggcagccacggcctgcgccttttcgagccagtagacgatcttctcgatggcgggcgaatacatgccgcctatcttccagacgcgctccctgaccaccccgtcctccttgaccagcttggaattcaggccgtaggagatcggttcgggatcgtcaaggtccgccatgtcggcgtagaacttctcgacttcggcctgcgtcacaccctcgtaatagttgttcgaagaagtggcgatcaggtcctcgccggcagtctggttcaggcgcgtcttgtagagcgacgcgtcgaaaatggctttgcagacctcgccgcgcagcgggttcagctcgccgaacttctcttcgggaatggtctcgatcacgtcgagcaggtaaccttcggtgaattcgggcacgaacttgtcgttcgaatagtgatgatggatgccgttggcgaaccagacctttttcaggtatttctccaacgccttccactcggccgtcgtgcggtcgccctcgtaattctcatacaccgtttcgagcgtgcggcgcacggcgaggttgtatttgaaattctggtcgaacaggatgtcgcggccgcacttggtcgcttcggccagataatagatcagctccttctcctccagcggaagctgctcgaagccggggacttcgtaacggatgaccttgatgtcgtcgaaacggtcgacgatccacggggtttcgcttcgggaagccccgccgcacgaggtcagtgcgagagcggtaacagtcatagatgcaaacgtcaataaatttttcatatcgttcgggtttggaatttctcgccaaaagcggcacgctcccggcaaacggccggaaccggatttcgccgggaagcgcccgccgtgcaaggacagcgcaagccgaatgcagagccgccgaccggccctgccgggacaccgactgtccaagccggggtttctcttcggcaaagatagcaaaaaacggacaaaacaatacgaaagatgcgcacatcccgaaggacatgcgcaccgtttatgcaggcagcgggactaaaagttgtaacccagcgaaatgaagaaactgccgttctttatcttgccctcgcccgaatccttggagatattgagcaggccgagatcgtagccgacgcccgcatagtaatgcttcatgacggtaacccctacgccgaagcgcagtccgaaatcggaacgcttgaacacttggccttcgacggagccgtcctcgacgggcactgaaatctccttgaacagatcgactttcgcggcgtcgcccttgagcttgccgtggatgccgaaaccgtaatagacgccggcggctggctggatcgagacgcttttaatattgaagtgccagctcaccacagccggaacctgcaggtacaacatattgaatttggcctttccttccacgcccaaatccagatcgcccgccgtcaccgacgccccgcgtccggagaggtaaagtcccgtttcgaaatagaggggaagcacccgcagcaggggctgctgataggcaaagcccacatgataggaggcgcgcgagtccaacgacgcgctcaggccccctgcgctgagatggagattagccacgttgagaccggcacgaacgccgaacgagctttcgttctgtccgaaagcggtcagcccggccgcaagggcaagcagacacagtaagattttcttcatagtcaattaaaaatcgtctccggccccggagagagcggttatcagtgtattgcggaaacgaaggcccccggactcccgcatctgccgatgcgggcgacgggcattcccgcttgggtctaaatatctgtaaatatagtcgctttttgccattccccgaaatatattcaacgaattccacatcttttcgcacgaacggcttgtccgcagcgcggcggcgccctgtccgaaggcggtaaaacgccccgcagaagcgtttccggccggggaaacgccgccgccggagtgtccggcgctttttttccgttttttcttcgttatgtttgcgggaattcatacctttgccccgcaagttcgtttcagaagagatgaaaatattcacaagcgtcaaagagctccgcgcggagctggagactgcggagcagtccggaatcgggttcgtcccgacgatgggcgccctgcatgcgggacaccgctcgctggtcgagcgcgcccgccgggagaacgccaccgtcgtggtgagcgtcttcgtcaatcccacccaattcaacgacaaaaacgacctgagacattatccccgcaccccggaggccgatgcgcgtctgctggaacgggccggcgcggatttcgtgctgatgccttcggtcgaggagatataccccgaaccggacggccgtcagttcgacttcggacagatcgacaaggtgatggagggcgccacacgccccggtcacttcaacggcgtggcgcaggtcgtcagccggctgttcgacatcgtacgcccggcgcgcgcctacttcggggaaaaagatttccagcaaatcgccgtcgtcaaggcgatggtggaccagttgtcgcttccggtcgagatcgtcgaatgcgagatcgtccgcggcgaagacgggctggccctctcgtcgcgcaacgcgctgctcgacgcggagcaccgcgccgcagccccgcagatctacgccgccctgcgcgccgcagccgaaaagtcgcaggaactgacgcccgaagcgctgaaggcgtgggtcacggccgaggtggagcgcaatccgctgctgaaggtcatctactaccagtccgtcgatgcgcggacgatgcaggaagtcaccgcatggagcgacgccgagcgtattcagggctgtatcgccgtgcaggcgggagacattcgtttaatcgacaacatccgtatccgataatgaaattccagattgaagtcatcaaatccaagatccaccgcgtaacggtcacgcaggccgatctgcattacgtgggcagcatcaccatcgacgaggcgcttttggaggcggccaacatcatcgagggcgaaaaggtccagattatggacatcgacaacggagagcgtttcgagacctacgtcatcaagggagaacgcggaagcggctgcatctgcctcaacggcgccgcggcccggaaggtgcaggtcggcgacgtcatcatcatcgcctcctatgcgctgatggatttcgaagacgccaaacagttcaagccgtggatcgtattccccgacacggcgacgaaccggctcgtgaaataacggcttcaccgtcctgcaaggcggtaaaccgtcataagtaatgtaaaatctcccgtttcagggagattttttgctataaatgcttacctttgttaaataacggatatttttcccactgctgaatattatggacatagcactctccgtcgcagcatttctgctctcgatcgtcggcatcgtcggctgtatcgtccccgccctgcccggcgtagtactcagttacgcaggacttctctgcgcctacttcacctcctattcgagcatgtcgccggcggccatctggctatggctggccattaccgtggcggtcagcgtcgccgactatttcctgccggcgtggatgacccgccgcttcggaggctcccgttcgggcgccatcggcgccacggtcggcgtcttcgccggattcttcttctttccgcccgtcggcatcatcctcggccctttcttcggcgccgtactcggcgagctgctcaacgaccgccgcgacgcgggcaaggcgtttctggtcggcataggctcgttcctctcgttcgtcgtcggcacgggcatcaaactcgcggcggcgatcggcatgttcgtccatgtgacggccgacacctaccccgctgtccgggactggttcgcaactcttttctaaccctatcgataatgagaaagtttctactatttgcggtagtcatcgcagcgatgctggccgcggcttgttccaagtacaagtacgaaacggtggcgggcgatccgttgaacacccgcatctacacgctcgacaacggactgaaagtctacatgagcgtaaacaaggaggcgccccgcatccagacctatatcgccgtgaaggtcggcggcaagaacgaccccgcggagaccacgggtctggcgcactacttcgaacacctgatgttcaaaggcacgcagcagttcggcacttcggactacgccgcggagaaaccgatgctcgacgagatcgaaagtctcttcgaggtttaccgcaagaccgccgacgaggccgagcgcgcggccatctaccgccgcatagactcgatcagctacgaagcttcgaaaatcgccattcccaacgagtacgacaagctgatgtcggccatcggcgccaacggcaccaacgccttcacgtcgcaggacatgacggtctacgtcgaggacattccctcgaaccagatcgacaactgggccaaaatccaagccgaccgtttcaagaatcccgtgatccgcggcttccataccgaacttgagaccatttacgaggagaagaacatgtccctgacgcaggacagccgcaaagtctgggaagcgatggacgccgcgctgttccccaaccacccctacggcacgcagaccgtgctgggaacacaggagcatctgaaaaatccgtcgatcaccaacgtccgaaactaccacaagacctactacgtgcccaacaacatggccgtatgcgtttcgggcgatttcgaacccgacgaaatggtcgccacgatcgagaagtacttcggcgacatgcagcccaatcccaacctgcccgaactgcagttcgaacccgaaaagccgatcacgactcccgtggtgaaggaggtttacggactcgaagcggccaacgtcatgctgggctggcgtctgccgggcgcgaacgacaaatcgaccgacatcagcgacatcgtgggttcgatcctctacaacggacaggccggactgatcgacctcgacctgaaccagcagcagaaggtgctctcagcctacggctatgcctcgacgcagcccgattacagttcgttcctcgtggccggacgccccaaaacggggcagtcgctcgacgaagtccgcgacctgcttctggaggaggtggcaaaactgcgggagggggacttcgatgaaaaactgatcgaagcgaccatcaacaactacaaaatggagctgatgcgctcgttcgaggagaacgacagccgcgcgatactctatgtctattcgttcatcagcggcgcagactgggccgacgaagtcgcacggctcgaccgcatgtcgaagatcaccaagcaggacgtcgtggagtgggccaacaaatacctcggtcccgaaagttacgccatcatctacaaacgcgagggcaaagaccccgacgagcagaagatcgccgccccgaagatcaccccgatcgtgaccaaccgcgactcgcagagcgaattcctctccgagatacagacctcgcaggtgcagccgatcgaacccgtattcgtcgattacaagaaagacatgtcgcagttcgaggcgcagcccggcatcgacgtcctctacaagaagaacgagaccaacgatatcttcacgctgatctacgtcttcaacaccggtacggagaacgatccggcgttgaatctggcattcaactacctgagctatctggggaccgacaagatgaccgccgaagagatcgcatcggagatgtacgacatcgcctgctcgttctacatgaacgccggggccaaccagagttcgatccagatcaccggactgagcgaaaacatgggcaaagccatggagatcgtcgaagggctgatcgccggcgccaaacccgacgaagcgattctggagaattgcaaggccgacatgctcaagagccgtgcggatgcgaagctcaatcagagccgctgtttcggcgcgctccagcgctatctgttctacggcggcgacttcatccgccgcacgaccctcaccgacccggcgctgcaggcgctgacctcggagcagctgctcgccaaaatcggcggtctgatgggcaaacagcacgaagtgctctactacggcccgcagaaagaggccgaagtcaagagtgcgctggcggaacaccacaaggtcgccgccgacctgcagccgctggagaagaaattcagcaccctgctgcccaccgacgcgaacaaggtcgtactggctcagtacgacgccaaacagctctactacctgcagttctcgaaccgcggcgagaaattcgacgtggcggccgatcccgaaatcacgctctacaacgaatatttcggcggcggcatgaacaccatcgttttccaagagatgcgcgaggcgcgcggtctggcgtacacggcatgggccaccctcgctacgccgagcaacgccaacggcgattacagctactacgccttcatcgccacgcagaacgacaagatgcagaaggccgtcgaagctttcgacgacatcatcaacaacatgcccgaatcggagaaggcgttcggcatcgccaaggaggcgctcgtctcccgcctgcgcaccgagcgcacggtcaaagacggcgtattgtggagctatctccgcacccgcgatctgggtctcgacgccccccgcgacaagcagattttcgagaaggtccagtccatgacgctcgacgacgtgaaagccgcccagcagaagtgggtcaaaggccgcaaatacgtctacggcattctgggcgacattcaggacctcgatctcaactacctgaaaaccctcggtcccattcagaccgtatcgcaggaggagattttcggctattgacgcgccggaatccgcagaaacgaagaacgccgcaggaaatctcctgcggcgtttccgttttcagtacgtccggaacagctaacggcggaaaactttgccgcccatggcgctcgcagcggcgtttttcacgctcgtctgatcgatcgtacccttcgtcacgaagcgggcgagggtcggacgcgtcgtgatcgccccgtcctccgaaacgccgtaggcgcaaacgatataagccgtcgcggcccagaggtcggtccacttgttgctgtcctcacccttcgaaagcaggctggaaagcgtgatctgctgcgactcggcccatatcttggtccagatcaggtcgtccacggcaaactgcaggtcggcgtcgaactgctcctgctgcgcggctctggtgacgctgaaataataagtgacgttcctgttcgacggcacgacgttcaccgtcacgtcctgacgctcgaccgtggtggtgatttcgaacgtacactcctcggaaagggtgaattttccggtcttgaaggcggccttcgacaacggcgaggtggcattgccgtcggtgcaggagaaggcatagacatagtactccgtatcatcgaccagtcccatgcgcgtagcgcctgcctcttcgatataggccggagccacgacggtctgcgtttcggtgaaagtcagatcggcccatgtcagcgcgccgctctccagttcatccctgtaggccctcttgtagatatcgatgcgcgacttcatgaatgcggcgtcatcgtcataagtgtcgaattccgacttgcggacgaaaccgtggaggtaacccagatcgtccgacggaacgcagacgtacttggcgccgtaccacgacacgtcggagacgtcgatgcggtaaacggtattgattacgaccggttcctgcgtcttgaagggaacagtcatcacttcggtgttcaaagtaacgggaaccgggtatgaggcagaggcatcgggtgtaaatccgaacagcacggcgcaaaattccgtaccgcccttcagcacaccggggaaggagaagtccgtcttggcgcctttgaaagcatacatgtcgagaaaattataagcggcataataacccagcatcgaaagataaccgttcaacgggtcgttgatcagcttgtccagcccgccgttgtcgatattctcctgtgtggtatatcccatataccaataggcagcgtcgtctttcgggattaccgtcgccttgatattcttgtcggtgatctccgtgatattgaccgtgaaatcttcacccacggtttcgcctctgtagtcggcgtcggccaccacgtccatcatcacggcgtcggcctgaccgttggcgctgaagtaggtgatgcccaccgtaccccgcagatcggcgcactccttatgcgcttcggtcggggccgtgaccgtcagcttgccgtcggcataggtcaccttccactcgtcgggcttcgaaacaagggttttcgtcaccccggcggactcgacgtcccagaccttggtctcaccgaaaacgaaagtcgcgacttcgggggccttgcggatcaacatgtagaaattgctgcgtacgggcaccgtcacgatcgaaccgtcgctcagttcgaaatagacgttgttgtcgtcgtaattgacgctcttgaacagcgaaccgatgctgctgccctcggtcacggcggaaacgggatcgcccgcggcatcgagaatccgctcggaggtcttgccgccgtcgtagctgatcgtccagtagccctcgtcatcgaccgacatcacgggtttgacgctttcgcccgtcacgcgcagtttcgcgccgccggccatcagccactcggttttgccgtcggtcgtgatcgtccaatagtagacctcgtccgtatcctgcttgacgccgataacgggagcgtcggctccggcagtgccgttcttgatctcggccgtcgtgttgtccgaaaaatagatgacataaccgtcggcgctcttttcgaccttgacgacggtcaccgcatcgtccacgattttctggagggccgcaatctcggtgttcatctggccgatcttggtttcgagagcctcgatccggctcttcaggtcgttcacattctgccacagttccgagtcgtcatagtcgtcgcaacccgtcagcagggggggggaaacaaggagcagtgcgcccatgcaggcggccagtctccgcatcgtaaaaaatctcatagcaatttatttaagttaaacaaaagtagggtcggatacatgacggcgcaacaccaagtctctgccgacaatattatatgatcatatacggatagaaacagcttgcagaatcggtaaacccgttcaaagataagtattttcacggcaaaaagcaatcgatcggaaaaacagaggggacaatatttaacagccgtccgaaaaaacggcccgcaaacaggagtatctgcgcacggctgacggatggaaatctgcggataattccgccccggcagaccgataacggcagtgcgcaagtcccgctttcatttgcgcacccggtcgaaaaaaaatccaaaaaaaattaaaattacgaatcgtaattttcaggccccggttcgaaaaaaccctgcaaattccatccgcaggaaaagaaaaaaattataaaacaaaccgaatattacagttacaatccgttttcggacgacttccgcggagggcgaacggatattggaattttcggagaaaaccagtaaattcgtttcgcaattttttttattcatcaaaaatcttcaactcttttatcccacacgttatgaaaaaattattaccgtatctgctgcttttcattttggcagggggggggatttcctgctccgacgatgatccgaccgttccggaaccggaagccgtgatgccgccggccccggttgcatcggacatcacctccgacacctttgcaatctcatgggaagcggtcgaaggagccgtatcgtacacctataccctgctgcataagaatacccacggcgcaatcacggtgatcgttcccgaaaccaacaccgatgcgctctcggcagctttcaccgacctgaaagcatcgacagcctacactttccgcatcaaggcgctgggcgacggcgaaaagacgctcgactcggagtggtgcgaatgcccggtaacgaccgacgaaccggaatatctctccggtccgtgggtgacgttcgaagtcaactacgaagaacgcaccagctattactgccgcatcacggctacgtttacccccaacgacaagaccgtcgcctattacgccacgtgcgtatacggcagctatttcgacgacgacccggacgatcccgatttcgagcctaacaccgaagaggacatgatcgggtatctgagtgcccaaaaacccatctccaacaacacgctgaccgaatcgtcttggggatactccaccgagtacatcctcgccgtagtcggcgtcgatgccgacggcaatttcggcaagctcaactgggctaaactcaagactccggcacgctcgtcgtcgggcgatcagggccagagcgaggccgcactgcgcatccagcacgtggtggtcaactcctccgaactcgaaggcgcccccgaaaactgcttcgcaacggtgtaccgtttcgaaccgaccgccggcgcccgcgcattccgctacgaggacggctactacaagggcgatttcgccaaaaaggagacatcctactggcgccagtatttctcgtcgctcgccaatgcctacggcgaagactacgacggctactactccggctggaaaagcagcatggatctggaagtgagcgccgacggattctattactacgacgtcacgttctgggacgtttcgatggcaaacgaaaccttcgaagtgatctacatggcctacgatgccgacggcgttcccggcgtcccggcctgctacacggtgaccctgcccgcggagatacccgccgtaacaccccagcagacaccttcggcatataaggctgcggtcgcagcagccaaccgactcgcacatccgcaggcccttccccgccgccgctgatctgcggaacggttgaaaacgaaaagaggataccttcacgggtatcctctttttccatgccggatgccgccggtctcaatagcggtaatgctccgccttgtagggaccgtcgggactcacgccgatataatccgcctgtttttcggtcaggcgggtcagctccacgcccagattgtccagatgcaggcgcgccacctcttcgtcaagatgcttgggcaggcggtaaacgcccacttcgagcttctcctgccaaagttccatctgcgccagacactggttcgtgaaggagttcgacatcacgaacgagggatggcccgtagcgcagccgaggttcacgagacggccttcggccagcacgaaaatcgaatgtccgtctaggaaggtgaacttatcgacctgcggcttgatattggtcttcacggcgcccgacttttcgagccgcgccatctgtatctcgttgtcgaagtggccgatgttgcagacgatcgcctgatcgcgcatccgctccatatgctccagcgtgatgatgtcgcagttgcccgtgcaggtcacgaaaatattgccttcgtcgagagcgctttcgacggtcttcacctcgaagccctccatcgccgcctgcagggcgcaaatcgggtcgatctcggtcactataacgcgcgctccgtacgaacgcatcgacgcggcgcagcccttgcccacgtcgccgtagccgcacacgaccaccaccttgccggcgatcatcacgtcggtcgcacgcttgatgccgtcagccagcgactcgcggcagccgtagaggttgtcgaacttggacttggtgcaggagtcattgacgttgatggccggaacgagcagttcacccgcttcctgcatctggtagagccggtgtacgcccgtagtggtctcctcgctgacgcccttccattcggccaccgtgcggtgccatttatccttgtcctcggcaagcaccttcttcagcgtgtcgataatcacctcctcttcgtaggaggagggttcgtaatcgagcgtcgaagtgtcgtcctcggctttgaagcccttgtgaatcagaagcgtcgcatcgccgccgtcgtccacgatcagctgcgggcctttgccgcccggaaacgacagcgccatggccgtacaccaccagtattcgggcagcgtctcgcccttccatgcaaaaacgggaacgcccgtctcggcaatcgcggcggcggcatggtcctgcgtcgagaagatgttgcacgaacaccagcgcacgtcggcgcccagttccacgagggtctcaatcagcacggcggtctggatggtcatatgcagcgaacccatgacgcgcacgcctttcagcggcttctgcggaccatacttgcggcgcacggccatcagtccgggcatttcgtgctcggcgatctcgatctctttgcgtccccacccggccagcgacatgtcggctaccttgtagggcattgtcaagtctaaatacataactgtttattttaatttcaaaatatattccctgtctttttcgatctgcgcccgcagctcctccagcgtatcgaaccgccgctcgtcgcggatcttttcgagcagttccacgcgcagcatacggccgtacaatgcgccgctgaaaccgaaaatatgcgtttcgagacgccgcgccgtcccgccgaccgaaggattgcggccgaggttcgacatcgcgtcgtaaaccgctccgtccacctcggcgcgcgaacggtaaacgccgtcctccgcggcgacggaatcgggaacggccacgttcgccgtcggaaatccaagctcgcgtccgagccggcgtccgtgttccacaacgccctcgataatcaccttttccatcagattttttcggtcagtttacgcaccagactgaactgcgagaagaactccttggcgaagacgcgcagtacggtataggagggaatcgccagcagcatgccgaggattccggccagcgacccggcgatcagaatcacgagaaaaatctccagcggatgcgccttgacgcgcgacgaatagagcgtcggctgcagcacgaagtcgtcgagacccttgaggatcagcagcgaaccgatgatgacggcggccgtatgccccactgtcatgcccccgatcggggtcacgatccccacgaagaccgaaaccacgccgccgataagcggcccggcatagggcaccacgttcatcacgcccatcaccagcccgatgaacgccgcgtcggcggctttcatcccgaaggccatcatcgtcagcgacacggcgaccatcaacagcaggctttcggagaggattcccgtaaaatagcgcgccagcaggagggttacggagtcgagcgcacgggtgatgttctcgtgataacgttcggggaacatcgccgtaatcatagcatagaaaagcccctcgtcccgcaggaagaagaaggtgatgaaggtgatggagaaaatagcgatcacggaggagagcacgacattgacgatcgacgcaaagaccgtgttgagcgactcgatgtcgatcacctgcttgagcgccgacgcgagggcttccgagagcgagaaggtgctttcgggcatggcgaagaattcgtgcaggtagctttgggcgcgggctatcggctcttcgatgctcgccacgacggtggcgaaatcgacgttcgacaactggtagatcttattgaagaccagcggcacgaacagcgaacacaatgtcgccagcaccacccagatgacgatcagcgtcgccagcgccgccagccagcggggcactttccagcccttgacatgcaatgccgcgagccgtttgaccagcggattgcccatgacggccagcacggccgagatcagcacatagacgacgatcgaccggaagtaccagaccagaaagaggacggccgcagcaatcgccgcgcccgcaataaaccgcaggaaggtctggggtgtcgtcctcatacagcggatgaatcaggctttcggaagacgcgcgatcggggtctgcgaacccaccacgggatcgcctatctcgaccagcagttcgctgttcttcgggacgagcacgtcgacgcgcgacccgaatttgatgaagccgcagacgctgttctgctccacaggcgcccccactttcatataggagatgatacggcgcgcaatcagacctgcgatctgacggaagagaaccttctgtcccgaagccatcttcaccacggtcgtggtgcgttcgttttcggtcgaggacttggggtgccacgccaccagaaaacgccccggatggtatttgaaatattcgacggtaccgcccacgggaacccagttcatatggacgttggtgacggacatgaagatcgagatctggagcatctcctcattcagatactcgttctccttcactacttcggtcacgacgacacggccgtcgcagggtgaaaagacaaggtcggcatcgtggatgcgcacgcggcggggttcccggaaaaacgcgacgataaagaaccagaacagcagcaacagcacggcgctcacccacaacagcgaaatattcgcgtcgctgaccagcaggtgatagatcaaccaccacaaaaatacacaaacggcgccggaaatgccgataattttgtagccttctttatttattctcataacttaatttaggattgcagttacataacaaaaagcatatagacgaagacgaacggcgcagacaacagcagcgcgtcgaaacgatccagtacgccgccgtgaccgggaatcaggtttcccgaatccttgacgcccgcggcgcgtttgaacatcgactccaccagatcgcccagcacgcccgttgcggccgccaccagcgccagaccgagccacgcccatacatcggcatccaatacccgcgcggcgacatagcccatcgccacggcgccggccagcccgccgaaaaatccctcccacgactttttgggcgaaagacgctcgaacatgcggtgccgtccgagggacattcccaccagataggcgaagacatcgttggcccagatgatgaagatgtagaaaatcatcacccaaggagtccacacgtcgcttccgatgatcgggatatagcacatcagcgaaaggggcagcgcaatgtagcagacgcccatcagcgtcgtgccgattccggaagccggattctgctgtttgcggtaaagttcgcagatgaacatcgcgggtatcagcaggagcataaaggccattccgcaggcaaaagcctgactggcgccgcccagaatctcgatgtcgtccgatacgaacgcgaaattaagcgcgaaaagcacgatgcccgccgccgttcccaagatcctctgcggggcgttgccctgtttctcggccagtccgtaaaattcgagcatgccgccgacgagcatcgccagcagcagtgcgccgaaactccactgcgaccacataacggcacccagcaccaccactgcgaggactgcgccgctaagcgtacgcaccatgagattcttcattttttcactcatcagatatatcagcgggttaggttcgtcggttagttcagttcggatttttcggcgttcgcggctcccgaagcggcggttttcgttcccgacgcgcttccggcatcgccttcctgcgtcgttccggtcccggccggcggagcgtccgccggcgcagacgccgttccggacgcggcatcgtcatcggcgacgacgacaccctttttcggctcgtcattctcccgcggcacctgcgccgccgggccgagtatgcgttcgatatcctcggcatagatcgtctccttctccagcagcaggtccgccatccggttgatctgctcgctcttccgttcgatgatgccgcgcgccttggcatacgcctcttcgatgatgcggcgcacctccgtatcgatgtcgtgggccgtctgctcgctgaaaggcttggtaaacgtatcgcgcgtgcccgacgagtcgtaataactgatcggtccgatcttcttgctcatgccgtagtaggccaccatcgcataggccgtctcggtagcccgctccagatcgctcagcgcgcctgctcccagcgttccgtagctgacctcctcggcgatccggccgcccagcagtccggccagccgttcctgcagggcttcgttggtaacgtggatgcggcgttcgtcgggcacataccacgtcgcgcccagactccgcccgcgcggaaccaccgtgactttcagcacgggatcgcattggggcagcgaccacatgacggtagcgtgccccgcttcgtgaatcgccgtggcgcgccgctcggcggccgtcatcggcatattgggtttttcgagtccacccacgatgcggtcgatggccgcgaggaaatcctccttcgacacgaatttcttgttgtgccgcgcggcgatcagcgccgcttcgttgcagacgttggcgatgtcggcgcccgaaaaaccgggcgtctgacgcgccaagaactcacggtcgagctgcggatcgagtttcagcggacgcagatggacgttgaaaatcgcctcgcgctccttgacgtcgggcaggcccacctcgatctgacggtcgaaacgcccggcccgcatcagcgccttgtcgagaatgtcggcgcggttcgtcgccgcgaggacgataacgcccgtattggtctggaagccgtccatctccgtgaggagctggttcagcgtattttcgcgttcgtcgttgcccgaaaatccggcgttcttgccgcgggcgcggccgatggcgtcgatctcgtcgatgaagacgatgcagggagccttctgcttggcctgctcgaacaggtcgcggacacgcgatgcgcccacgcccacgaacatctccacgaaatcggaacccgaaatcgaaaggaacggcacgttggcttcgccggccacggctttggccagcagcgtcttgcccgttcccggagggcctaccagcagggcacccttgggaatcttggcgcccagctccttgtatttttccgacttcttgaggaaatcgacgatctccatgatctcgaccttggcttcctccagtccggccacgtccttgaacgtcacgcgcttggaagcatccttgtcgaagacctgcgccttggctttaccgacgttcataatgccgccgcccgcaccgccaccggcgccgcgcgacatagaacgcatgatgaaaatccagacgccgataatcagcacccacggcagcaggttgatcaatacgttggtccagtcgttggtcttgttctcatagactaccggcacggtctgtcccgactgctgctcggcgttcttcaaatcttcgcggaacgaatcgaccgatccgatcgtaaaggtgagctgcacgcccgtttcgggcagccgcttgaaacgggcgtccaccgtatccctgcggtactgttcggcggcctccttcttcagaaaaacctgcgcctgatcgcggttcacgacctgaattttctccacgtcgcccttttcgaccatctcccggaccgtcgtccagtcgctgggcagcggcgtgtcgttgacatcgccgaatacgtaccagccgatgatgaacgcgccgatcagaccgtagatccacagcatcgagggcctcggcatgttcatattcatcctattattgtttttgcgttgttgtgccatattaaaaaattactcttcgtattcgtatttggtcatgggtgcgtcggcccacaactcttcgagtttgtagaaactgcgcagttcggtctggaagatatgcaccacgacgtccacgtagtccatggcgacccatacgccgttctgctgaccttcgatgcgccagaccttctcgcccagcgtttcgagcaccttctcttcgatgcttgcggcgatggcgcatacctgcgtcgtggaatcggcgttgcacacgatgaaccgggagcatatggctccgtcgaaacctgagaggtccaacgatacaatatccttaccttttttatcttcaatcgcacttacgatagtttcgatcagtttatccataaatcttcaataggtgtctataaccttgcaaaggtacgaaaatagaatgagatttgaaaattaagagctacaaaaaagcggacgggcgacccgaccggaatcgccgcaacacagggaaaggccgcaagagacccgcagcaggggcagaatccccgtcagaccgtccgcggaattctacggcgggccgccatccgcaaaccggaacggcgacacgacgcagacagcggatgacaatgcgacgcaaatcggagcggcgacacggcacaaacggggacggcaaccgatgcagaccgaggatgacaacgcggcacaaaccggaacagcggcgcggcacaaggcgggacggataaaacagcatccgaaaaacaaaacgcgcccggcagaaaaaaccgccggacgcgtccatttcggaaaagcacgtcagttcccgacctccggggcattggccataatcgtatcggtcagggccttgatgatcgaactcttgacgtaggtgcggcgcacggcgaccgcgatcttgcgcgacgtggcgcctttggccagcatcttcagccggtcgcggtgatccgcggggatgtattcgacggccatttcgggaatgatcgtaagacacgacgtgcagtccacgatgcgcatgagcgtatcgagcgaacccgattcgaaggagtagtgcgacggcatgtcgcgcttggcctgacacagttcgatgatctgatcgcgcatacagtttcctgcgctcagaatcaccagatcgcgcaggtcgatgtcctcgatgcggatgttcgaccgctcgtaaagggcgttttcgggcgaaacgtatgcgaagaaacgatcgttgaagagttcctgctccagaatcccctcgccgcaggtgccgctggccaccagcgccgcgtcgatacggtcgcgcttgagggcctcgacgatgtcggaagtgatcatctcagagatctccagttcgactttgggataatcgcgcacgaaagcggggatgaatttgtgcagcaggtacggggcgatggtcgggatgacgcccagccggagtttgcccgacgtctcgcctttgagttcggccaccgattcgcggatgttgttataggcccgcagcgtctcgcgggcacgctccagcaccacgtcgcccgcttcggtcgggatcacgggcttcttcgaacggtcgagcagcaccacgcccagctcctcttcgagggctttgacctgcatgctcagcgagggctgggtcacgaaacaatgttcggcggccagcgaaaaactgccgcagttggctacggccaacaggtattcaagctgaattatagtcatagtaggcaattattccgacgagcaaaaatataaaaaaaatctataaacgacaactttattaggtcgcccgcgcgctttttcgtatgtttgtccacaaaataccgaaaaaacgagagccggcactgattttcaccgcagtttcagtgccgcggggaagccgaaactaccggcagaaagggagtttgggcaggattccggatgtggaaccggcatcgaggatgccgtaatgcgagcttggcgaattccgcatctctggagctgccccgaagccatagataacttaaattcgtcaagcggaggattaatcgttttatgggaaaaatcattcttaccggcgaccgtccgacgggccggcttcatctgggacactacgtaggttcgctgcgccgccgcgtcgaactgcaggagtcgggcgaattcgaacgcatcttcatcatgatcgccgacgcgcaggcgctgaccgacaacgccgacaaccccgaaaaggtgcgccagaacatcatcgaagtcgccctcgactacctttcggtcggtctcgacccgaacaaatcgacgcttttcatccagtcgcagattcccgaactgtgcgagctggcgttctactatatgaacctcgtcacggtacagcgcctgcagcgcaacccgaccgtgaaggccgaaatccagctgcgcggcttcgccgagaacaacacggagggcgacacccagcagcgtcagggtattcccgtcggattcttcacctacccgatcagtcaggcggcggacatcacggctttcaaagccacgaccgtacccgcgggcgaggatcaggagccgatgatcgagcagacgcgcgaaatcgtccacaaattcaacacggtatacggtcccgcgctggtcgaaccggagattctgctgcccgaaaacgcggtctgcatgcggctgccgggaaccgacggcaaagccaagatgtcgaagtcgctctgcaactgcatctacctgtcggacagcgccgatgaaatcaagaagaaagtcatgggcatgtataccgatcccgaccacctgcgcgtggaggatccgggcaaggtggagggcaacatggtattcacctacctcgacgccttcagccgtcccgaacacttcccgaaatacctgcccgactacccttcgctggaggagctgaaagcccactaccgccgcggaggcttgggcgacgtgaaggtcaagaagttcctgatcgcggtgttgaacgagatgctggagccgttccgcgagcgccgcaaatattacgagggacgcatcggcgaggtgtacgaaatcctccgcgcggggtcggaagcggcccgcgaagtcgccgccgaaacgctcgccgacgtgaaacgcgccatgaagatcgactacttcgacgacaaggagctgatcgcaagtcaggccgaacatttcgcacacaaagaataaaaaaccgcaacagcaataaaaccacgacggatttgaacttacgcgccgaccacatctaccgcacgttcctccgccttacgaggcggctgagcaacagccagatcatgatgcttctggccgtggtcgtcggcgtgctcgccggagtgggcacctatctgttcgagatgctgctatacggcatcaaatacggactgaccaactggtttccggtggacagcgcccacatcctgttcctgatctaccccgccgtcggcatcattctggcgacgctgttcgtcaaatacatcgtccgggacaatatttcggagggcgtcacgcgcgtactctacgccatgtcgagccgcaattcgcgcatcgcgggccacaactgctggacctcgatcgtcggcggcgccacgaccatcggattcggcggctcggtgggtcctgaggcccccatcgtgctgacgggagccgccatcggctcgaacgtcggacggatcgcgcggctcaactacaagcacaccacgctgctgctctgctgcggcgccggcgcggcgctggccgccattttcaaggctccgatcacgggcgtggtgttcgtgctggaaatcctgatgctcgacatcaccgcaggatcggtcattccgctgctcatcgcctcgatcacggccacgacgatggccttcatgctgcggggcttcgacccgattctggccgtgacgctggctcccgcagatgcgttcgagctttggcagataccgctcttcatcctgctgggcgtatgctgcggactgatgtcgtggtatttcacctcgacgaacctgcgcgtgagcacgcttttcaagaagatcgacaagcagtacaagaagtggatcgtcggcggcaccgtgctcggagtcctgatcttcattttcccgccgctctacggcgagggttacgaaggattcacctcgctgatgcacggacaggccgaaaaactcttcgacaattcgctcttctaccgtttcagcgacatcgactgggttgtcatactcttcgtcatcgccacgatgttcttcaaggtcatcgccatggcttcgaccaacgccgcgggcggcgtaggcggaacattcgccccgtcgctgttcgtcggcgcattcacgggcgcgtcgatagccctgctgtgcaacgccttcttcgactgggaggtgtcgatcgtctcgttcacgctggtcggcatggcgggcgtcatgtcgggcgtgatgaaggcgccgctgacctcgatcttcctgatcgccgaactctcgaacggttacgggctgttcatcccgctgatgatcaccgcctgcatctcgttcgccgtggactactacctcgatccggattcgatctacaccaagcagctgcgcctgcgcggggagctgctgacccacgacaaggaccagtcggtcttcgtcttcctgaaactcgacgaactgatggagaccgatttcctgcgcatcagggagaacttcacgctgggcgacatcgtacacatcatttcgacggcgcgccgcaacatcttccccgtgatcgacaacttcgggcatctgctcggcatcatccagctggacgacctgcgcgaagacatgttcaaacgcgagaaatacggacatccgatttcggactacatgattcagccgcccgacaagatactggaacacgaagccatccagagcgtcgtccagaagttcgaggacaaacatacgtggatgctgcccgtcgtagacaaacagaaccgctacatgggcttcatctccaaatcccgcatcctgaacgcctaccgcgaacagctggtcaagatccagcagtaacctgcggtccgcgcagatgcggcagcactctttccgcaagggcgatctcttcccaccgacacaaaacgaacagccatgacgacagaaaatccttttccttgggccgacggcatgaactgcgccgtcacggtctgcgacaccgaaggcgtgatcctttacatgaacgagaaagcccgcgcgacctatatccggcacggcaatctgatcggcagcaatcttttcggctgccacaacgaacgttcgcgcgaaatcatccgccgcctgacggccgagggcggctcgaacgcctacaccatcgagaaacagggagtccgcaagatgatctatcagacggcttggcggaccgggaacaaggtaggcggtctggtggagatttcgatggaaatacccgccgaaatgccgcattacatccggggctgagggcttcggggccgagagttcccgacgcttgcgccgctacatagcgggcatgaagctcaccgcctgcccgccgcccggagccatcgccacttcgagcgtatcggcggatgaaacctcgcgctccgaaatagtgtaggaggtgggattcgtcttccaatcggcatcgggaccgtcggcgtagatcgtcgcgcggtatttcgtgccgggtttcaggaagtcgagcggcagcgacagcgtgcggggctgttcgtcggtcgccgcacccagaaaataattctcccccgcgcggcgcaccacggcgacgaattcgcccggttcgcccgccagtgcgcgcgaccagtcgcagtccgcatcgaagtcgcggaagaaccggaaagcgggatgcccctcgtaattttcgatcaggtccgaagccatctgcacgggcgaatagatgatcacccactcggcgatctgcttggcaagggtcgtattcacgcgcatatcgacctcaggaccgcagttccagagtttgcggcgcggcgagttgcgcgtattttcatagagaatgtcgaacgtgccgggcgtgaagtccatcggcccggcgagcaggcgcgtaaaaggcagcgtcacttcgtgcgacggcggattgcccgcgctccaagcatcccactccttgccgcgcgcaccttcgcgcgacatcatgttgggccacgtgcggcggatgccgcagtctttgatcggttcgtgcgcattgaccgtcatccggtatttcgcggccgtctcgaccacgtgctggtaatggcgcaccatgtactgcccgtgatggttgttgccgccggagataccgccggcatagcccgttttgaggttgtgtattcccagatcggcgtaccatttgacggcgcgttccagctggcgttcgtaatcggggatgttgccgcccgtttcgtggtggccgatgatctcgatcccgcgttcgcgggcgtaacgcacgatctctgcaatgtcgaagtcggcatagggcttcgtgaagtcgaacgactggctgccgccccagttctcccagccttcgttccagccttcgaacagcaccccctgaatattgttggccgccgcgaagtcgatatggcgtttggcgttttcggtcgtcgcgccgtggcggtcgtccatcgcccacgtctcgacgccgaggtgcatgccccaccacacgccgacgtacttcatcgggcggatccagctcgtatccccgatcttcgaaggttcgttcagattgagaatcagcgacgaattgatcagccccacggcatcgggcgccagctgcacggtgcgccacgcggtcgtaaatttattgccgacatgcgctttcgtaccgtcgggcaggggcgcgagatccgatttgaacgcaagtccgtccgtcttgcgaagcgtcatttcgggaaagtcgtacaaggccgcttcgtggatgctgccgtagaggccgccgaccttgaacgtcgcgggggtattggcgtcggccagttcgctcagcggaagtttgcggtaaagcagttcataggtgtcgaagctggcgggaatggtccacgaatcgccgtcggcggcgaagcggaattcggtcagttcgtccgtcacgcggagcgaatccgccccgcacgcttcgtattcgtagcggaatcccagcccgtcatcgaatacccggaagcgcagcgtcagccgcacgccgccgccgttgcgcagccgcacggccatttcgttgtaacggctgcggttctccttgttctcgccccacggctgggtccacgtctcatcgacgctcgtgcgcgacacatgctcgacggcgaaaccaccgccgagatcggcctcggcggcttcgaatcccagtcgggagggttcgaacagccggacaccgccgtccgtaaccgaataggtcatgcgtccggcggagtctacggcgaacgccagacggatcgtgccgtcgggggaggtaaccccggtattttgcgaacaggcgccgcacaaggccagcgcggcaagggagaagaggaaggatttcatatcggtcgggttgagcaaacggttaaatcaaaggaaagcttcgaatccgggcaggcgtttgacgggcgagaattcgatgatctcgtaatcggcgacgccgtggatgcggaacgggtcctccgccgtcagggcctcgaccgccgcacggtccgcggcgcggcagagaatgacgccgcccgtccggggattctgcggccccgaacagagaaacgtccctgcggcatactggcggtcgaggtattcgcggtgcgccgcgaggtgccgttcgacctccgcaagcggcagtttgtaagtcagcagtacgatgaacacccgctacagttttatgtcgtaaatctggatcacgccctgcagtttgccggcttcgtcggtcacgagcagcgaggtgaccttgttgcgggtcatcatcttctcggcttcgatcagtttccggtcggcagagatcgtcttcggattcggcgtagcgatatcggcggccttgatgttgaaaaactcggcgcggcggcgctccatggcgcggcgcacgtcgccgtcggtcacgatgccctcgatacgttcgccgtcgcagatgatgatgagtcccagtccgcccttgctgatggcgtggatcatgtccgtcgccgagcaatcgggcgccacgaccggaagatcgtgcgaacgcatcacgttgccgacggtcatcagcaggcggcgtccgaggcttccgcccggatgcaggcgtgcgaaatcgacgctcgtaaagccccgcatctgcatcagcgacacggccagcgcgtcgcccatggcgatctgcgccgtggtcgaggtcgtcggcgcgaggtgcaggatgcaggcttcctcttcgacgcttacgtcgaggtgcacgtcggagttcttggccagcgcggattcgggattgccggtcatcgagatcagcttgttgccgttggagtggatgaaaggcacgattttcaggatttcgtcggtttcgcccgaataggagagcgccagcacgacatcctctttcgagatcatgcccagatcgccgtgaaaggcttcgccgggatgcaggaagaagctgggcgtaccggtcgaggcgagcgtcgcggcgatcttgcgccccaccagccccgacttgcccatgcccgtaacgatacatttgccctgacccgaaaggatcatttcgacggcgtcggcgaagttatcgcccaacgtttccttcatgcgcttgagcgccagcagttcggtgttgatcgccttgcgggccagatcgagaatctgggctttcgtggtatcggtcattatagcagagttttaatgaggttttccagttcgtcgagctgcagcatgttcgggccgtcgctcttggcatggtccgggtcgggatgcacttcgaagaagaagccgttggcgccgaaagctttggcggcctgcgccatggcgggtacgaattcgcggttgccccccgtcttgccgcctgcggcgccgggacgctgcaccgaatgggtgcagtccatcaccacggtcggggcgatgcgcagcatgtccgcaatattgcggaaatcgacgacgaggttgttgtagccgtaaatattgccgcgctcggtgagccatatctccgaagcgcccgcatcgcgggccttttcgtagggatagagcatgtcggcgcccgacaggaactgcgccttcttgatattcaccgtcctgcccgtcttcgcggcagcgaccagcaggtcggtctggcggcagaggaacgcgggaatctggatcacgtcgaccacttcgcccacgggcgcggcctgccacgattcatggatgtcggtcagcagcttcagcccccacttcgcacgcacgtcggcgagcatccgaagccccttttcgagtccgggtccgcggaacgacgagatcgaggtgcggttggccttgtcgaacgacgccttgaaaatgatgtccgcgccgagtctttcgttgatcgccacaagacgctgcgccacggtgtcgagcagttcggcagactcgatgacgcacggtccggcgataaatttgatcttcataagattcgattatgagttaagaacaaaggccggggaagccgccgcccgccaagcagccgggcttcgactcccgacttttcattttccatgcctgatcaggaaggcttcggccttctccagatcttcgggcgtgtcgatgccgatggtctcggcatcggtaacgcccacgccgatcttatagccgttctccagccagcggagctgttcgagcgactcggccttttcgagcgcagactgcggcagggccgtaaccgcgcgcaggacctccgtgcggaacgcatagagaccgatatgcttgtagaacgtatggcgcgccagccactccgaccgttcgacgccccgcaagtaggggatcaccgaacgcgagaagtagagggcgcgcgactgcgcgtcgagcaccactttcggggagttgggattttcgagggcttcgagaccgtccgtcgcggcgaaaggcctgaccagcgtggcgatgtcggtcgccggatcgtcgaagcagcgtttcacggcttccagctgcgaggcccggacaaaaggttcgtcgccctgcacgttgaccaccacgtcgtaggtcttgccctgtttgagataggcttcccagcaacggtcggtaccgcttttatggtccggcgaggtcatctcggcccggccgccgaaagcgagcacggcatcgtagatacgctcgtcgtcggtggcgaccacgacgtcgtccaacacgcccgccacctgctcgtagacgcgctgaatgacgggcctgccgcccagcatcgccagcggcttgcccggaaagcgcgtcgaggcgtaacgcgccggtatgattgcgataaatttcatcgtctcggttatttagccataaaaataaaaagtaaaaggtgaaaatcaaaacttttcaccttttacttgcatcttcgcttcagacgagcgccagtttcagcacttcgtcgttggtcttcacataatggaacgtcagcccttcgacgtattcgggtttgatctcggcgatgtccttgcggttctcctccgaaaggatcagttcggtgatgccggcgcgcttggccgccagaatcttctcccgaacgccgcccacgggcatcacgcggccgcgaagggtcgtttcgcccgtcatggcgatacgctcccggaccttgcgtccggtataggtcgagacgatcgaggtcaccatcgtaataccggccgacggcccgtccttcggaatcgccccctccggcacgtggatattgatgtcgttcttctcgaacgccgaagcgtcgattcccagttccgcgtggtgggccatcacccactcgtgggcgatcgtcgccgactccttcatcacctcgcccagattacccgtcaggctgactttgcccttgccgggggtcagcaccgattcgatgtagaggatgtcgccgccgacctcggtccacgcaaggcccgtcaccacgcccgtcatgccgcccacttcgtactcctcacggaggaacttgggcatgccgagaatcttctcgacgtccttggccgtgatttcgggcgcgaaggcttcgtcgaaagcgatctgcttggcgcgggcgcgggcgatcttggccagcagcttgtcgagcgagcgaacgcccgactcgcgggtgtagccggagatgatgccttcgacgatttggggcgtcatcacgagttcctgctccttgatgccatgggcctcgcgctgcttgggcagcaggtggtccaaggcgatgcggatcttctcctcgaccagatagcccggaatgttgatcatctccatacggtcgcgcagcgccggggcgatgttggccacgttgttggccgtggcgatgaagagcactttcgacaggtcgtactccatgtcgatatagttgtcgtggaaggtggtgttctgttccggatcgagcacttcgagcagtgcgctcgacgggtcgccgtggttcgaaacggtcaccttgtccacctcgtcgaggataatcacggggttcgacgaaccgcaccgcttgatggtctggatgatccggcccggcatggcgccgatgtaggtgcggcggtgtccgcgaatctcggactcgtcgtgcaggccgcccagcgaaatgcggccgaacttgcggcccagcgccgccgccaccgacttgcccagcgaggtcttgcccacacccggaggaccgtagaggcagaggatcggcgacttgaggtcgcccttgagcttgatgacggccagatgctccagaatacgctccttcacctcgtccagaccgaaatggtcgcggtcgagctgttcgcgggcgcacttgaggtcgagattgtccttggtcgtgtcgttccacggcagttcgagcagcagctgcagataggtcatctgcaccgaatactcggctacggcggggttcagccgctcgactttctgcagctccttctcgaaggtctcgccgacctccttgggccagttcttcttcttggcctcctcgcgcatcttctcgatgtcggcgtcggcgccgtcgcccagctcgtcctgaatcgtgcgcatctgctgctggaggtagtagtcgcgctgctgcttgtcgatttcctgcttcacgcgctcctgaatctggcttttcaactcggccagctgctgctcgcggatcagtatttcgagcagtttgcgggcgcgggccagcaggccgggggcttccagcagcgactggcggtcctcgtccgtcagctccatgttcgagcagatgaagttgatgatgccgcgcttggagtcgatgttcttaatggcgaacgccgcctccttgggcatcgacggcgagacgttgatgatattgagcgccacgtcgcggatcgagtccacgagggcttcgaactcgacgctcttcagatcgggcgtggtatcgcgcagggcggtgacacgggcccggaagtaaggctcggtggtgatgtattcgcggatctcgaccttctccaagccgttcaggatcaccgtgaggttgccgttgggcatttcgagaatcttgatgatgcgcgccgcggtgccgaccttgtacatgtcgtccggcgcggggtcttcgacgtcgctttcgcgctgcagcacggcgcccagaataccgccttcggcattcacggcgcgcaccagactgatgctcttgtcgcggcccaccgtaatgggggtgatggcgccgggaaagagcacggaactgcgcagcgtgagaatcggaatgatctcaggaacctccacctcttcgacgacttcgtcaccgcccgtcacgatggggatcacgcggtgattgccgtcgagcagatcgggaagcaggttcacgtcttcgacttcgattgtttcgaatttatcttttttactcatagcttacaaatatataatgtcgcaaaggtaacgattttttagtcatatttatttcatctttgacagaatgttaataactttgcaggtcaaataacgaagtaaaacaatttcatccctatgcaaatcgcagacaaatactcgccgcaggagatcgagtcgaaatggtacgactactggatcgaaaaacgcttgtttcactcggaacccgatcagcgcgaaccctatacgatcgtaattccgccccccaacgtaacgggcatgctccacatgggtcacatgctcaacaacacgctgcaggacgtgctggtgcgccgcgcccgcatgtcgggcaggaacgcctgctgggtgccgggcatggaccacgcgtcgatcgccaccgaggccaaggtcgtggcgatgctgcacgaaaagggcatcgaaaaatcgtcgctctcgcgcgaaaagttcctcgaatacgcttgggaatggaaggagaagtacggcggcatgatcctcaagcagctgcgcaagctgggcgcctcgtgcgactgggagcggacctgcttcacgatggacgggccgcgcaccgagagcgtcatcaaagtcttctgcgacctgttcgaaaagggcaggatttaccgcggcgtacgcatggtgaactgggaccccgcggcgaaaacggcgctttcggacgaagaggtggtcttcaaggagtcgcacggcaaactctactacctgcgctacaagatcgaaggcacggacaaggcgatcatcgtcgccacgacgcgccccgaaaccattctgggcgacacggcgctgtgcgtcaaccccaacgacccgcgctacgcctccctgccggccgatgcgcgcgtcatcgtgccgctggtgaaccgttcgatcccggtgatccgcgacgaatacgtcgatatcgaattcggcacgggcgcgctgaaggtcacaccggcgcacgacgtgaacgactacatgctgggcgagaaatacggtctcgaaacgatcgacatcttcaatgacgacggcacgatcaacgacaaggtcggcatgtacgtcggcatggaccgtttcgacgtccgcaaacagatcgagaaggacctcgccgcggcggacctgctcgaaaagaccgaggagtacaccaacaacgtgggatactcggagcgcacgggcgtggccatcgagccgaagctctcgatgcagtggttcctctcgatggaggagctggcccggcccgcgaccaaagccgtcatggaggatgcgatccgcttcgtgcccgaaaaatacaagaacacctaccgtcactggatggaaaacatcaaggactggtgcatctcgcgccagttgtggtggggacagcgcattccggcctactacctgcccaagggcgggtacgtcgtggccccgacggccgaagaggcgctcgcgaaggcacgtgcgaagaccggcgacgactcgctgcagccgagcgacctgcgtcaggacgaggacgtgctggacacttggttctcgtcgtggctctggccgatttcggtcttcgacggcatccgcaatccggacaatcaggaaataagctactactaccccaccaacgatctggtgacgggtcccgacatcatcttcttctgggtggcccgcatgatcatggcgggttacgaataccgcggcgaaaagcccttcggcaacgtatacttcacgggcatcgtccgcgacaagatcggccgcaagatgtccaagcagctgggcaactcgcccgatccgctggacctgatcgccaaatacggcgccgacggcatgcgcatggcgatgctgatttcgtcgtcggccggcaacgacgtgatgttcgacgaagcgctctgcgagcagggccgcaacttcggcaacaagatatggaacgcctacaggctggtgaacggctggtcggcggacgacaagaccgcgcaggacgacaacaaccggctggcggtcgaatggttccgccagacgctgggccgcgcactgcgccagatcgacgaggacttcaggtcgtaccgcatttcggaggcgttcatgacggcctacaagctcttctgggacgacttcagcggtctctacctcgaaatggtgaaacccgcctacggacagcccgtcgatgcggagacgttcgccgcgacgtgcggattcttcgacgaattgatgcgcgtgctgcaccccttcatgccgttcgtgacggaggagatctggcaggacctcgcgccccgcaaagagggcgagtcgatctgcacggcccccatgccgcagccggtcgaagccgacgagcgcctgctggcccggttcgagctggccaaggaggcgatctcctcggtgcgcaacatacgcaaccagaagaacctgccgcagaaggaagcgctgacgctcaaggtgatcgccgacgagaactaccccgccgaatacgctcccgtgatgcggaagatggccaacctgacggccgtcgaaaccgtgacggagaaagaccccgcggccgcggcgttcatcgtcaagacgacccagtatttcgtgccgatggcgggcaagatcgacgtcgaagccgaaatcgggaaactgacggagagtctcgcctactacgagggattcctcgcaagcgtcatgaagaagctctcgaacgagcgcttcgtgcagtcggcgcccgaaaaggtggtcatgaacgagcgcgccaagcaggcggacgcagaagcgaaaatcgcggccatcagggagcagctggcggcgctgaaataatccggcgtggcacaaatcaccatatacaccgacggctcggccttgggaaatcccggaccgggcggttacggcgcggtgctgctttcgggccgtcaccgcaaggagctttcgcagggattccgcctgacgaccaacaaccgcatggagctgacggccgtctgcgcggcgctcgaagcgctcaagttcgaggggtcggacgtcacggtctattccgactcgaaatacgtcgtggacgccgtgacgaaaggctgggtgttcggctgggagaagaaacggttcgccggcaagaagaatcccgacctgtggatgcgtttcctgcgcatataccggcgccacaacgtgcggttcgtatgggtcaaggggcatgccgatacggtcgagaacaaccgctgcgaccaactggccgtggccgccgccaacgacaaggcgcatttatcggaagacactggttatgaaccggaagagaggtgagcggcaacgcccgcctcttttcctttttcggcccttatttctcctaaacttcgcacttttgacccgcagggtccgattttatcattattattcctatctttgtcccgattatcacataacctgcaaataatccgcccgtaatgcttaaaatatacatgaggctcttgggtttcgcccgacccatccagaagtacgcaattccctatttcttctactcgctgctctacgcgctgttcaactcgctcacgttcctgctgatcatgccgatcctcaagacgatgttcgacgccgactacacgttcgtatatgtggagaaacttcccccgctggccttcaatcaggaatacctgacagccttgttcaactacacctactcgcatctgttcaacgaatacaaccccgaaaacgtactgctcatgctcgccgtggtgaccattttcgtgagcctgctgagcaacctgttccgctatctgggttcgtggacggtggagaacatgcgcacccgcacgctgcagcgcatgcgcaacgagatgttctcgaaggtggtggacatgcacgtcggctttttcagcgaccagcgcaagggcgacatcatttcgaaaatcacctccgacgtcggcgtggtgcagttctgcatcaccaacaccctgcaggtggctttccgcgagccgttcctcatcatcggctatacggtgatgatggtcgccatatcgtgggagctggccctcttctcggtgctgtttctgcccgtggtggccctcatcatcggcagcatcgtcaaacgcctgcgccacccggcccgcacgagccagcagcgcatgggcgagctggtatcgacgctcgacgagtccctttcgggcatcaaggtcatcaagagctacaacgccgtggattatatcaagcagaagttctacgacctgaacgccgatctggcccggctgaccctctcgatggcgcgccgccagcagctggcttcgccgatgagcgaattcctcggcatctcggccgtgggcgtcatcctcgtattcggcggttcgctcgtattcaaggggtcgctcagccccgaaggcttcatcgccttcgtcgccatgttctcgcagatcacgcgccccgtgcgcaccttcatcgaccagttcgccaacatcaatcagggcatcgcggccggagagcgcatcttctcgatcatcgacgcccagagcgaaattcaggacaagcccggcgcgctggagctgaacggcctgaaagacaagatcgaattccgcgacatacacttctcctacgacggcagccgcgaggtgatcgacggcatttcgttcgacatcaaacgcggggagaccgtggcgctcgtgggaccgtcgggcggcggcaaatcgacgctcagcgagcttgtcccgcgtttctacgacgttacggcgggcgacatcctcatcgacggcgtttcgatccgcgactacacgcaggagagcgtgcgcgcccacatgagcgtcgtatcgcaggacaccgtgcttttcaacgacaccatcgagggcaacatcgccatgggcaaggccggagcttcgcacgaggagattgtcgaggcggcccgaatcgccaatgccgactgcttcatcaccgaagcgcccgaaggctaccggaccaatatcggcgaccgcggcgtgaaactttcgggcggccagcggcagcgtctctccatcgcccgcgccgtattgaaaaaccccgacatcctgattctcgacgaagcgacttcggccctcgacaccgagagcgaaaaactcgtgcaggacgccctcaacaaattgctggagggccgcacttcggtagtcatcgcacaccggctgagcacgatccacaacgccgacaagatcatcgtcgtcgatcacggacgcatcgccgagcagggcacgcacgccgaactgatggcccgcggaggaatctacgccaaactgatcgaactgcagtcgttcgaataaaacgaatatcccgctcgtatgaaaagcgagaaagagaagatgctggcgggcgaatggttcgacccgcacgacgaggagctgacggccgaccgcgaccgcgccacgctgctgatgcaccgtctcaacgccgaatgtcccgcccacgacgcagcgtaccgcaccgctctgcgcaagctctgtcccgacgcggaaggattcatccgcgcacccttttactgcgactacggctacaacatctccatcggcgaaggctctttcgtcaatttcgactgcgtcttcctcgatctggccccgatccgtatcggacgcaatacgctgatcggccccaaagtgcaactgctcaccccgcaccacccgctggaccccgcccagcgtgcgactggccgcgaagccggcaaaccgatcaccatcggcgacaactgctggctgggcggcggcgtcatcgtctgtccgggcgtccggatcggagacggcgcgataattggagcgggttcggtagttacgcgcgacattcctgcgaattcggttgccgtcggcaatccggcccgcgtcacccgtacgctttcacatacttaaccgcgactccgttatgtttacctccggcaatcccgatctccaatcgttgatgcagctgctcgacgccgcccgcatggggtggtggaaggcggatttccgcacgggcgaactgctcttctccgactatgtcgtcaacctgctgggactcggcagcaaccgggccgcggtcggggaactgatgccgctgacgcgcgaggattaccggaaacggatacacaacgaattcctgtcgctcaaggtcggaaaccatttcgacgaaacgtttcccctcgtactgccggaaggcgaagtatggattcacgcccagctcgtccgcaaacaatcagactcgcagcagggcatcaaactcttcggctacctccagcgcgttccggtcgccgaccggaaagaggcggacatcctcacgctcgaaagcaactattacgcgacgctgagggagaacaagcacatggacgagctgctcgaccatctgccgatcggctacttccgcatccggctgctctacgacgacaacggccgggcgaccgactacctcttcctctcggtcaaccagacggcgcagcagattctgggcgtagacgccgccgactacctcgacaagacggcccgcgaaatagacctccccgtagaccagcatatcgacgagctggcggccatcgggctgggagattacaagatggaccagtggcatgccgccaagaccggccgctactgccgcagttttctctacaacacccccaacgacgcgacggaaatcgtcatcctgatcctcgacatcacggacgtcgtcacggcgcatcaggcgctcgacgaaaaggagaaactgctgcgcaacgtcattcagaacgccccgatcggcatcgagatatacgaccgcaccgggcatctggtggacatcaacgcccgcgatctggaaatgttcggcgtaaccgatccggccggtatccggggactcagcattttcgacaaccccaacttctcggccgagatcaaggactgcatccgcgaaggccggggtacggacttcaccacacgctacgatttttcgaaagcccgaagctattacgacaccagccggagcggctacatcgactggacggcccgcatccggtgtctctacaacgacacgggcgaaatcacccactacctgctcatcaacatcgacaacacggaactccgccagacgcaggaccggctcacggaattcgaagcgctgttccgtctcatctccgaatacgcgcaggtgggatacaccaactacaacctctgcaacaaaaagggttatgcgcagagcgtctggctgcgcaactacggcgaacccgatacggccgacatcggcgacgtcatcggcaaataccgccgcgtccaccccgacgaccgcacggaactgctgcaccggctggcgcagttcgagtccggggagatacagtcggcatcggtctcctgccgagtcctgcacgacgacggccggacgacatggatcaagagccacctcatctgccgcgactaccggccgcaggagcaggtgatcgacatgctgggaatcaattacgacatcacggcgctcaaacagaccgagcaggagctgatcgccgccaaggagcgggccgaggagtccaacaagctcaagacggcgttcctcgccaacatgagccacgaaatccgcacgccgctcaacgccatcgtaggtttctcgcggctgctgaccaccgaggaggaccccgaagtgcgcaaagagtacaacgacatcgtgtcgctgaacaacggactgctgctgcagatcatatccgacgtactggacctctcgcgcatcgaatcgggacgcagcgatccggtcaaaagccggttcgacctgcggacgctctgccgcgaagccgtcgaaacgttccgcctgcagactccggaggaagtcgtgctggacgtcgaaaagggactgccctcctgcaccgtctgccaatacaggcaggggctgatgcagatattggccaacttcatccgcaacgcactgaaattcacaccgaaaggattcgtcacggtgggattcgaacgcaaacgggaccggctgagtctctatgtccgcgacacgggcatcggcattccggccgaagagctggacaaaatcttcgaacggttttacaaggtggacaccttcacgcagggcaccggactcggactttcgatctgcaaaagcatcgcggagcagatgggcgcgcaaatcggcgtcgattccgccgtcggcgaaggctcctgtttccgggtcgaaatgccggtcgcagaataagccgcgggccgtttctccggcggcaggctaatcggcggaattttgcagattttcaaatcttttttatatctttgcaagttgtcggaaaacgagtgacatttccggcagttccggctttgctccgggtgcaggatccgaacgaaaacaaaacacatacaccatgaagttcaaagagtataaaggtctcgatctggcgcagacggccgccgacgtgctcggcgagtgggacgcccgcgatacattccataaaagcatcaccacgcgcgaaggacaccccgcgttcgtattctacgaaggccccccgtcggccaacggcacgccgggcatccaccacgtcatggcccgtacgatcaaggacgttttttgccgttacaagacgcagcagggctacctcgtgcaccgcaaggcggggtgggatacgcacggacttccggtcgaactgggcgtcgagaagaagctcggcatcaccaaggaggacatcggcaaaaagatcaccatcgaggagtacaaccgcacctgccgcgaagccgtcatggagtttacgggcatgtgggaggacctgacccgcaagatgggctactgggtcaatatggacgatccctacatcacctatgacaacaaatacatcgagacgctatggtggctcctcaagcagctcttcgacaaggggctgctctacaagggctacaccatccagccctattcgccggcggcgggaacgggtctctcgacccacgagctgaaccagcccggctgctaccgcgacgtgaaggacacgacctgcacggcgcagttcgaagtcatccgcgaccagaagagcgagaagcttttcgccggcgtcgaggggccgctctatttcttggcttggaccaccacgccgtggaccctgccctcgaacacggcgctggccgtaggtcccgcgatcgaatacgtcaagatcaagtgccgcaacccctataccgaccggccgcagacggtcatcctcgccaaagagctcgtgcccgcctacttcaccaagaagatggagggaacctatgagatcacgggcgaaagctggaggggtcccgaactggagggcatccgctacgagcagctcatcccgtgggtaaagccgatgggcgacgcattccgcgtgatcgtcggcgactacgtgaccacttcggacggtacgggcatcgtgcatatcgcgccgacgttcggcgccgacgacgaccgcgtaggccgcgccgcaggcatcgcgccgctgttcatggtggacaaggcgggcaaaaatcagccgatggtcgacaggcagggcaaattcttcctgttggaagacctcgatccggaattcgtgaaaaacaacgtagacgccgaaaaatacagggagtatgcaggccgttacgtcaaaaacgcgtacgatcccaatatcgcccccgacgccgagacgacgctcgacatcgacatcgcggtgatgctcaaagccgaaaacaaggctttcaagatcgagaaacacacccactcctacccccactgctggcgtacggacaaaccggtgctctactacccgctcgactcgtggttcatccgcaccacggccctgcgcgagcggatgatcgaactgaacaagacgatccgctggaaacccgaatcgaccggcacgggccgtttcggcaagtggctcgaaggattggtggactggaacctttcgcgttcgcgcttctggggaaccccgctgccggtatgggctacggaagactactcggagctgaagtgcatcggctcggtcgaagagctgatgggcgaaatcgagaagtcggtcgccgcaggcttcatgaaggagaatccctacaaaaatttcaaggtcggcgacatgtcggcggagaactattcgaccaaaaatatcgacctgcaccgtccttatgtggacggcatcgtgctggtctcgtcgaagggcgagccgatgaagcgcgaaagcgacctgatcgacgtgtggttcgattcgggcgccatgccctatgcgcagctgcactacccgttcgagaacggcggcgagcatttcaagacggtctatccggccgacttcatcgccgaaggcgtggaccagacgcgcggctggttcttcacgctgcacgccatcgcctcgatgctgttcgactcggtggctttcaagaacatcatttcgaacggtcttgtgctcgacaagaacggcaacaagatgtccaagcgactgggcaacggcgtcgatccgttcgaggtactggccacctacggagccgacgccacgcgctggtacatgatctccaactcgcagccgtgggacaacctcaagttcgatagggacggcgtggacgaagtgcgccgcaagttcttcggaacgctctacaatacctattcgttcttcgccctctacgccaacgtggacggatttacgggccgggagccggaggttcccgtggagaagcgtccggagatcgaccgctggatcatctcgctgctcaacacgctggtaagggacgtgacgcgttcgctcgaagattacgacccgacgcctgcggcgcgcgccattcaggagttcgtgggcgaaaacctctcgaactggtacgtacgcctcaaccgcaagcgtttctggggcggcggcatgaacgaggacaaactggcggcctatcagacgctttacacctgtctggagaccgtttcgatgctcgcggcgccgttcgcaccgttcatctcggaccgcattttctgtgacctgaacgccgtaagcggccgccatacggacgaatcggtacacctctcgaccttcccgaaggccgacggaaagctgatcgacgccgatctggaagagatgatgtcgctggcccagcgcgtatcgtcgatggtgctggccctgcgccgcaaagtctcgatcaaagtgcgccagccgctgaccaagatcctgatcccggtactcgacccggcaatggcgcagcatatcgccgccgtgaagacgctcatcatgaacgaggtgaatgtcaaggagatcgagctgatcgagaacacggcgggcatcatcaccaagcgcatcaagcccaacttcaagacgctgggaccgcgctacggcaaatacatgaagcagatcgccgccatgaccgcggagttcacgcaggagcggatcgccgaaatcgaagccgctccggagacgatcctcgacctcggcgccgagaagatcgccgtaacccccgccgatttcgagatcacctcggaggacatgccgggctggctcgtggcgtcggaaggcaagctgaccgtggcgctcgacatcaccgtaacggaggaactgcgcgcggaaggcgtggcacgcgagttgataaaccgcatccagaatatccgcaaggattcgggattcgaagtgacggacaagatccgggtcgagatcgagcagaaggagcttgtggccgacgcagtcgccaaatacgccggttacatcgcatcgcagacgctggccgtagaggtcaaggccgcggcacaacctgcgggcggagtgatcgtcgattcggatgtcgatgacgagccggtacggatcgccgtaacgcggatttagcccgtccggaacgtctccgagtccctttttcggtgaatttggaacggcaagcgtttcatgctgagcacgatgcgcgggtatgtccggacggaatcgtataatgagatgtaaaatttggtatttccgaaaaaaatagttaattttacataaaacctaattaaggagaagacgactatggcagacgaaagaacgagatacagcgacgccgaactcgaagagttcaagcagcttatcctgaagaagctggagaacgcgcgtgcggactacgagctgctgcgcgccactatcacccacacggcagacaacgacacggaagatacctcgccgacgttcaaggtcctcgaagagggcgcggcgactctctcgaaagaggagagcggacgcttggcagcgcaccagatgaagttcatacgcaatctggaaatggcgctcgtgcgtatcgagaataagacttacggcatctgtaaaaccacgggcaagctcattcccaaggagcgcctgatgaaagtgccccacgccaccgagtgtatcgaggccaaggagggacgcaggtagaaccggaagggcgcgcagacggactccgacgcggcgtcacggccccggtacgattccggaaggcggaaaaatcacagaccatgcccggagataacatccgcagagagtgtatattgaggaaaagacgaccgtcacggccgtcttttcccgtttcggggaagcgcttttttatacgttttgccgaaaaattacgttatctttgatgacatgtatcgccggatctgcatactcgtactaaccgtccacgcggcagtgagcgtttgtttcgcccgaacggccggtcccggcatgcgcggtcccgaaataacttcgcccaacataaactcgcccgacgggttcaagccagacagcctgaacaccgccacctccgagcgcaatcagagactgtatgacagtatccagtccaagaccaaccgccgcgccgtgccgcgcatgctctacagaatgcttttcgtaaagcccgtgctggacaccacattcagcggccgcgtactggacgaaagccgtctgctggaaccctatgcgggaaaaacggtgggcgacatcaccatcgaacgccggcatcccttcgattccgacggcaactggctcgaacgcacaggcaacaagatacacatgctgacacgcgaccgggtcatccgccgcgacctgctcttcaagccgggcgacaagatcgacccgcagctgatcgtgcgcaacaagcagctgctccgctcgcggccctacatctccgacgtcgatatcaccctgctgcccgactcgctggattcgacacgcgtcaatatggtcatatgcacccgtgacagctggacgatcagcgtcgacggcgccatccacggcgagggccgcacgatggtcggactgtcggacgccaacattttcggctggggcaacaccctgaagttcaacaccaacttcagccgcaaagacttctcatacggcggcaacatcgtcgaatacgaaatccccaacgttctgggaagtttctacacggcggatttttcggccggacgcgacttctacaactcggagctgaacatggggctgcgcaaggagttcatacgtccgacggactatgaaatcggccttacgtacagcgacgtcaagtcgaagcgctacatgatcgacctcgacacttcgctgctcatcaaggtccgcaatctggacgcatggggcggcaaatcacgctatatccgctccatcaattcgagcgtatatttcacgggacgctacagctacgcccgtttcagccggcggccgctggtcgcccccaaccacaaccccgcgctgcacgactacgacgccatgctcttcggggccggtctctaccgcgagaagttctattcggccaacatgatctacggattcggcacaagggagtacctcgcgacgggttacaaggccgagctggtcggcggatactcgtggggcgaattcaacgacgaaatgtatctgggcatgacctatacgaccggcggattccgctcggtgggctatgtcatgggaagtatcacgctgggaagctatatcgacctcgcaaccggcatgtggcgccatagtgcggtggacgtggacctgaagtggttctcgaacctgttcatgttcaaacgcagccgcatccgccagtttttggccttcaactatacgcagggctggaaccgcggcacgggcagcgacgaaataatccgcatgacccgcataaacggactgcaggcgctcaaggagcatgtcaccggcaccaaccgcatgatcctcaacacggagaccgtatttttcacgccctatcagcccctcggcttccgtatcgccctgttcggattcgccgacttcggactgatcggctattcacccaacatcttcaaaaacgacttcttcacctcgttcggtttcggcgtgcgtatcaaaaacgaacggctgattttcaacacggtccagatacggctgggactcgccttcggcaaacgcggactggtcgagagcgaatatgtccgcgtgtcgaaccagacccgcatcgaacaataccgctaccgcccgacccggcccgaaatcgtgggattcaaataagccggcggaccggacagcaaacaaaaaaacggaggttcgagccctccgtttttctattgtccttcgacgatctgccccttgtcgtcgatcgtcatcacccggtcgtactgtttcactttcgccgtaaagtcgtggaaatcttcggcttcctgatacttgcagggaacgagctcttcgcccttgcggttgatatagccgtaccccagccccttgacgaaaacgcgggccagaccgcagctgaaaggatatgcctcgtggtatttgaaaggcacgacgagctgcccgttcgtggcgatataaccccagcgggcgtcgtagaaatcctcggaattgacgccgaaacgcatcaccggggcgcgcatctcgctgaactcgccggcatcgtcccacttggcgggaagcacttcacgcccttcggtgtcgatatacccgcagcgcggctccatcccctgaaaattcatgccgtaaaggttggtattgaacggcgccagaccgtcgtggaactccccgatgcgtttatagcggaacgagctgacttcattgccgttgcggtccacaagtccgtaattgacattgttgtagctcaccacggcgacaccgcccgaaaagggcttcgccacggcgaaacggggcgaaatcgccacattgccctttacgtccacatagccgaaattgccgaactgttcgagcataaaggccgcaagtccttcgcccggcgtatcgaggtagtagtaccggcacggaatcgtctcgcggcccagcgtgtcgatcagtccccactgcccgccgtaaggctcgtcgcgcagcatcatgctgcctccgtagttggtccgggcatagccgtccttgaaatcggaaatgtaggtgaagaagcagggaagcacttcgcggccgtcggcgtccaagaagccgtgcttgccgccgctcgtcacgggaatcagcccgtatgcgttaggctcgccgatcaggttgtagtcgcacggcacgaccacttcgccgttttcgcgcagatagccccacttgccgtcgcgcagcacgcgcatccagccccgctcgtccggctcgccgatttcggagtacaggcagggaataaccatcttccccgacttatcgacgcggccccaaagctcgcccgcggcctgcacccacgccatgccgtcctcaaacggttcggcaagcacgaactgcggagcgatcacgagccgtcccacggtgtcgatatatccccaagctccttcggggacctgcaccgcggccagtccgtcggcaaatcggcgggcgtcggcatagcggcattcgatcgccagccgccccgttccatcgacatagccccagcggcctacgccctcgttgatatcgagcacggccacgcggttgtcgctcatctcccccacttcggcatatttggccgtacgtttttcgaacgaccggccgcacgagacgagcgttacgactgtaagaaaaaatagcaggcgtttcatagcttctgttttgtgtttcccatgcaaagatagcgcaagccgggcgcagaaccaaatttttcggtttcgcccggaacggttctccgcagggaaggcgtcgtcccggcaaaaccgacagcggccgagctgaaaattcaccgcgccgacgcccgccgagactgccgccaaccggaatttacgcaggcaaggacaacttgtcacgggcgatttccgcaagtttcgggcctgcattgcccgcacgccgaaaaaacccggaacggcagaaccgttccgggcgcgaactttttatgcttatggcggttgggtttcgtcgtatacaaccggacggcaacggattttatcgtctcaacccggcaatccgtccccctccggctgtctgcggttacctgcggctatctgcgcgtcgtaatcttgattacgccctcgctgccggcaccgtattccttggcggcctctttgccccgcaacacctccatacgcttgattttctggggtgcgagccgaagcacgtccgctttggacgcttgctcgccgttaatgaaaatcacgtagttatccggtatctccgaaggattgtgcagcgtgacgcggcccgtaaagaccgttttgcccgactccgttttcgaatgatccacgcgcgtcgtgccttcgccggtcgtaatgcgccaataagacggcgtttccgacgccgtcccgccggccgcacccgcgacgaccgccccgccgtcagcagtatcggcggaggagtcctgcatatcgactgcgatcgcctcggagaaggagatttccgactttgcctgcgcgcgggcttcgtccagctgcttctgcgccgcttcgagctgtttctgcgcccgcttccactcctcggccgacatataccgccgtgccgcatccagcccggcacgggcggcctgcatccccgcttcggcggctttcaggccggcgtccgcagcctgcatcgtctgtccggtcataatgcgaatcatcccctccgcagcagcggagtcttccccctgcacggcggcgtccttggtaatgcggatcgaccggacgtttccggacaactcttccaagtcgccggcatcgacgtcccgcccgtttattttccagaccatgtctccgccgagcgagtcgcgcctgccgtcgatcctgtaggtcatcgtacgcactctccccgcaagggaatcaggctccgtcccggcgccgcgcaccacgacggcagtcgaactgccgttgccgccgtacgtgaacgtctgcatttgcgagtcggcaccgtcctccttcgtcgtgacgataatcacgccgtcccggcccttttcgccgtacgaagctttcgacgcggaatccttgagcaccgagaccgaagcgatccggtcggcgggaagcgaatcgatcgatttcacttcgcagccgtccaccagaatcagcggattgccggattttccgtccgaagggtcgatttttgcgttccgaatgagaatcgtaacattttcttttttacctttgtcatcaggaaatacataggcggtgcgggcgaaggctccgagggcgagtcccgcaagcggcagcacgaaaagcactctggctacggcccaccgcgacgatcttttacgtaacatcatggtaatacggtttttaagtttactgtgattaaagctgttggcgactgagtaccacctcccgccggcagctttccttattaataatagttgataatgtttcgcatcgacgccgctgtcgaggacggcctcgtcggcttcgtattcgtgaatggcccgcagttctcggcgaagcagccacatcgcgggattgaaccactggaggcagcccgcgagatcggtgagcagcagatcgaccgaatggcgcaaacgcagatgggccttttcgtgcaggacgatcgcgtcgccgttttcggccaaatcattctctgacaatacgatataacgataccagctgaaaggcgtcaccgagcggccgatacgcaccagcaccgttccgtcgtccagccgttcacgacgtccccggcggatcatgcggatcacgccgaaaaccgatccgaacgtccagagcagcgtcgcccccgctccggtcagaaaaacaagggccgcggccttatcccacggaaacggttcgggctgcggttcggcaggcgcctcgaagagctgctccgcagccggcatctccggtgcggcaggcagttcacggtagatcgtaatgacgcagaacggcagtataaacgacagcaccatagccgccagcaccacgatacggttcaggcggtggaaggtctcgcggctcagcagcagtttgaaaaagaggtaaaacaccgccagacaggcgccgaccttcaggctgtagatcatcagggcgtacatggctaccggcggttttgattttcgatgcggtcgatcagctctcgaaggtcctcgaccgaaatcttctcctcctcgaccagcgcggaaaccgccccaagataggaattctcgaaatacttgctgatgacaccgccaagcgtgcggcgggaaaactcctcttcggtcaccaccggataatactgataggtgcttccgaaggtcttgtgaccgacatagcccttggcttcgagagcgcggaccatcgtcgagagcgtattgaaatggggtttaggctcagcggccagcgcgaccagttcccgcacgaacagcgggccgtgttcccagaaacagcgcatcagttcctcttcccttcgtgtcagtttttccatagcgtcggttgtttttaaaaccgggcaaacgagtatatcccggtgtccgccagcaaaggtaactaaaaaaaattcacatccaactattttacatagttttttaaactaaaaaatatagtttgcatctgacaaacagaaattcaatccccaaattcgtcgcaaacaatacccgacggaccgatccgacccgccgggaactgcacaaaaaatccccggcctttcgggccggaggtttgtaggtaagagaaaatgcaggaaagagtaaatatcttgttttcaagtatttaattctctcttctgcatgtgctccgagcaataaaaaagcaaaatcgggcaggtttaacggtgagttgtgttacttatccgttacctgcccgaaatgcattgatttgcatttaaggcagtcgttttcagtttattgcatcgaatttccgcataacaaataacttgacttaacgtttaacaaatcctcaaagttcaggttattatgcaacgcagcactttcaaagtccttttctatgtgaaaaggcagtccgagaaatcgggtcaggttcccgttatggggcgtattacgatcaacggcacgatgtcgcagttcagctgcaaactcaccgtccgttcttccctttgggatgccaaagcaaataaagctgccggcaaaagtctcgaagcccagcgcatcaacgagaaattggagaatatcaagatcaatatcggtaaacaatatcagcgtctctgcgaccgggattcatacgttacggctgaaaaggtccgcaacgcctttctgggaatgggtgatgattgccgtcttttgttacaaaccttcgacgaataccttacggggttcctcaaacgtgtcggtaaggaccgcgcttattccacctatgaggattactgtctgcgtcgcaggcgtcttgccgctttcctcgaatacgaataccacgtcaaggacattccgttcaaagagctgaagcgggagtttatcgaaaagttcgtcgtctacctctccacggtaaagggtcttgcttccgggacgatctgtgccggggtcaagaaactgcgtctgatgacctatacggcctataagaacagctggattgccgtcgatcctttcgccggattccatgtcaggcccaaatacgccgaacggcgctatttatccgcttcggaattgcaggccgtcatggacgtcgaacttcctaactaccgaacgggcattaaccgggatgccttcgtcttctgcgcttttacgggcctgagctattcggacgtagcaaagctgacccatgccgatattcatacagacgacaatggggattattggatcatcgacaagcggcaaaagacaggtacacagttccgtgtcaaactccttcccgttgctgaaatgatctacgaccgttataaaaatctgcatctggaaggtaataaggtctttccgatcaaacgctactataagacgatgaacatgtccttgcggcatgttgccagacatgctggattgtcattcaatccgacaatgcacatggctcggcataccttcgctacgacgattacgcttgcgcagggcgtaccgctggaaaccgtatcgaagatgctggggcataaacatatcaccacgacccaaatctacgctaaaatcaccaacgacaagatcggacaagatatgacggcattgagcgagaaattgaacggtatcttcaaggtcgcacagtaatccgagcgaatcgcccgcagccgatacagaaaattcagaaactcgaaataagaaggattgtaattgaatttacgtataatttaacttatgcaataccgacatacaatcgtattaacacaaaagactgtaatatggcgcgcaaattcgtaaaagcaggtttgcatgcggaaacattgcgattcggttgtttaagatgacccgatataaagacgcatgtaacaatttgtctatctgagtgtaagtttattgctgcaaattgattctgattattatctaatgaagtataaggtttatccaaatatctaaagttgtagaacttttttgatctcttgctccatattcagaagtttcatgtgtgttaaaaacatttgctcgtctatacgatttctaaattaacaaaagccgcgtatcacttacgcgatacgcggctccactaattgcgattaggaacaacttataacctttcggcagatcttcaggatatattgataaacagacagccatcaactattccattcgacaagttaatatccgttgccgaagagtccaaacgtcccgactactttccgagcagtttcttgacctcttcggctacggtcttgccgttgtaaccgaacttctcgtcgagaaccgtatagggagccgaa

SEQ ID NO: 12040 - DNA, 130961 bp, Unknown
  gut microbiota DNA sequence
tgatgatttgtttttcgtcgatggtcaatttgccttcgttgagtccagctctgattttcgcataggcattggtgcggtttttctctccgctctccataatgatacggtgcagctcttttctggtgtaactgctttggttaatgaaaaactgccgccagtaatcggtcttggcgattgtttttcggatcgaatttttgtgtgtttttattgcaatagcaatttccgatggcattccgtcctcttcgatcgtaaattccaatttgtcgtaaagtggcgcatcccggctcaccgtctgctctatggtgatcacattgtcctttttggtcacttggtactcttcggtgcatttgttgatgagttccgtcccaagatgtccccgcatattgctgtccgtcgaactcttgttttcgtgcaggatacagcagattgctgtgttattgtcttggctgagccgcgacagcaaatccaaaacgtcagtactttcggggttgtccataatgttgcgacacaggtctttgatcccgtccagtatcaccagatcgggcttgagcaatgcgatttcgccctccagtatctcccgccgttcgtcggtgttgtacccgcgcagagcgaccgcgctgaatcggggatgattttcattttccggccacccgcacaagcggtgtattttccgagcgttccttgccacgtttttcatgttctgctccgtgtccacgatcagaacacgatagtcctcgccggaggcctttaacgccccgaactttccgttcagtacggccgcgaccaatgccgtgatgaaaaatgttttgccttgcttcgccttgcctttcacggcttggatgtcgcctttggcgagcatcccgattccatcgacagttagcagatactctgcatcggcgtaatgctgtgtcaggtcgattcggtaatccctcttttgaatggctttgtccagatcgtatgcggggacggctttctcgatttggtcgaataatgaaaaatcaacggtgcggggctgtcggtcagtgcggttattttccataacgccctccttccttgcggttgcagaattcctcggcttgggcggtcagctcggcagcggatcgttttttgcccgatttgaggtgtgcagtgatctcggacagcgagaaatagagtcggttgccctgcttcatgcacggcagttcgcccctcgacaccttgctgtaaatggtggggacggtcagccgcagtaacgtggaggcctcacgaacggacaagagcttatcctcggtttggggtgattcctgcggcatggaatgccgggccaacatggaatagatcgaatttaccttgtcggtaagctgactcactgccataggcagatcgtcgaaagtgaatttctcagtcataatgcgacatattttggttaaacatgccgcaagagactaaggtgttttgggggcaaaaatgggggagtactccctatttcaacgcttcgtaatcgttttttaccgtttcggtgtgttgataggcggtgtatctctttttgttttccccgctgtagccactcagcgaagcgatattgcctttgaccaccctaccgtctatatccgaacagagcaatttagaaatcattctatatagttggtcttttgttttaaaataattgtcctgtagatgtttaatgaattctatgtagtcaaacattgcgacggcatacggaactttctgacccgcaattttctcaatcaatttcgcttgggacttttccgtgaggcaggccactttgggcaggtcgagaaatccgtattggctaacctctctgccgaatcgctcggccttggtttcgatctgtccgttcaaggtttcatatcgtctcagttgggattctttgtacgctcgctcccggacaaggccctgtacgatctcataggcagtaaatgtgtctatgatttgtctgaattttcctttgggatcgaccaacttcccgtttactatagaaaattcacaaatggcggagaatgtggttgccagattatttatgtagcttacattgtatttttcttcgtcgaattcttcatcttcatcaaatgcaatataggcctccctgtaaccgacaatgtgctgtgtaatttcatcgtcattgagcagtttcgccctgtatttttcaaacaccatttgccgggcttcttccgtggaatatcccctgagttcataccattgagtatcgctccactccgtaaggctgatatcttcgccgaggttggagagtgttttatagattttctctttttttagttgtgtgaattcgtccataatgggatctgaaattataaatccaacttgatccggtttgctgcctgccgtttggcttcgtccacgatcttagtgtatatctgggtggttttgatctcgcggtggccgagcatctttgaaacggtaaaaatatccgttccgaggaacatttgcagggtagcgaacgtgtgccggaagcaatggaacgtgatgtgcttcgttattcctgccgctttcagccagtcccgcaggtctttgctgtggtaggatgccgaacgcagtcctccgaatatccggctttccggcttctgctgctctccgaggaggctgaacgcctgttcggatataggcatcgtttcgatgcctttggtctttttctgctgaaaattaatggtgtagcctttcgactcgtcctgcccgatctcgccccaagtcagtttttcaatgtccgagaaacgcagtccggtcaatccggagaagagggcggcacgtttcagcagatcatccttgcaaggcgttttagccaatttattcaattcttccgaggtgaggtattccctgcgcgtttcggccgcttttatggaatccacacgcgcattcagatcggtttgtaaaattccctccttgtatgcctgcttcaaagtggccttgaccttgttgaaataggagagggcggagttttgcgacagcggctcctttttccgtttgctcttgacgctctgggtggtcagcagatattctttgaactcttccagatactgctcgctgaggtcggcgaatttcaccctgccgcctgtgaattgttccagataggttagtgcggacatccagttgttgtggttggagccggaacgtttgcctgccgtcctgcggaaatattcgacgaaatcgcggtcgcccagctcctttttccggagccgctccttttcgtattcgttgtatatctccggcttgttgtgagtgttctctttctgttgacgaatcgcctcggcgagtttcagctgttcggcgttgtattgcttctcgatggcgtttttcggcttctcgtggatatacaggccgaggaactccctgcgcgtctccttcccggttttgagactgatgattgcggggtagaaatcgaggtagagggttttgcgccctcccgaaatcttcttttgcagaagtttaactttgacagccatatgcgaatttagttaaaaatttcattcagtaactttttaggaatgtaaacgaacttgccccgctgaaacttcgggatgccgttccgctttaggatgtcacggagagtcttgtccgatataccgaatgttcgtagggcttcgccgacggtgtagcattctgaaatttcgtactctttctcttgcggggcgggttttgccgggagcgacaggaacgaatctacctctgagcgtctgatgcgcgtgagccgctggcccaagttggcactcttgatcgttcctgttgcggccaatctgtatgctgtgcgccgcgaacagccgactaatgccgccacttccgatacggtcagtacatcccgcgtttgaatttccccgatctccttggttttgatccgaatagtgtcggtcttaattttttctaccttgtcttttcgggtgcgatccttgtatgcccgactgctgcacgtatgggagcaaaaccgcgtgacagtcgttcgggcggtgaattccttgccgcattgttcgcagattttttgcaggtaaatgttggagcccatttaagtcgaaataggtagcgttaagtgcatttatgtagcaataagtgccttagttgtcccaaatatatggaaaatagcgtagatactgcgatgaggtacaaataaggtacaacttttttcaaggaaaatcggtacatttgcaaaacttcggataaaacaaaaacacgccttatacgggcgtgtatgcaggattattctatttctattcctcggtcggtttgcggctcttatttcccgatgcagaacttcgagaatatggttttgaggacctcttccgggacgatgtcctgcccggtgacgccgctcagatggcggatgacctgacggatctcttcgctcagcaggtcggtcggaaggttgtcgcgcaggccgtcgagggcggcactcagggcttcggacgccgacgtcagggcttcgtaatggcggctgttggagatgaccgtgccgccgtggtagagcgtttccgtatcgaccgcgtcgcgcagggtccggcgcaggtcgtcgatgccgtcgccgttgcgtgccgagatgccgacggcgccttcgggaagtgcgaatcggggcgttttgtcgattttgttgtataccgtcagcagcgtttggtcgggacggagcggaaagtccggactttgggtgtcggcggccgaatcggcgctcggaaccgcagggacggacttccggcccgtttgtccggatgaaaggtttccgccggataccgatacggcgggctgcgatgcgtcgatcaggcggatgatgatctgcgcccgttcgatgctcgacatggtgcgggcgattcccatctgttcgagggtgtcgttcgtgctgcggatgccggccgtgtcgaggaaacggaagacgacgccgtcgatattggcgcgctcttcgatgacgtcgcgcgtcgtgccggcgatgtccgagaccatggcccgttcctcgttgagcaggcggttgagcaaggtgctttttccgacgttcggcgctccgacgatggccacggcgactccctccttgatggcattgccgagcgaaaacgagctgcgcagggcgtctatccgctccttgatctgccgcatggtgtcgcgcagctgggtgcggtcggcgaattcgacctcctcttccgagaagtcgagttcgagttccagcagcgaggtgaggtgcagcagtttctcgcgcagggtgtcgaatgcttcggaataacccccgcgcatctggttggcggcgagcgcatgcgacgcccgcgaggacgaggcgatgatgtcggccacggcttcggcctgcgagaggtcgagtttgcccgcaagataggcccggatggtgaattcgcccggttgggccatgcgtgcgccggcggcggtcagcaggcgcagcgtttcggaaacgatgtactgcgaaccgtggcacgagatttcggcggcgtcctcgcccgtataggaacggggcgcccggaataccgtgaccagcacgtcgtcgagcgttcgcccgtcggccatgatatggccgtaatgaaccgtatagcccccggcatcggccagcggcgcgcttccccggaaaatgcggtcgcagattgtcagcgcgtcgctgccgcttacgcggatgacggcgagcgcccctcctgcggcggtggccggagctgcaatggtatcgtggtcgcagatcatcttaccttccttcgatgcggagccgttgtccgatgcggagtttgtgggcgctcttgatgttgttccagcgcatgagctgcgccgtggtcacccggtagcggcgggcgatggcgcccagcgtgtcgcccttcttgacggtatagactgttccggaacgttcctgacgctttttgtcgaggttcgccgggttgatgtattccttgaggtacagcgagtctttagccagaatagcaggctcgttggcgacgtactgcgtcaggctgcgctgcggaagcaccagcgtatagggtttggtcgtggccgggatgatgtcgagtttgtactgcgggttgagctggcgcagggtttcgatcggcacgtcgatcgtcgaggcgatctgctggagatgcatgatccggtcgatgcggacggtgtcggtggccagcggaatcggggcttcggtgagttcgatgccgtgctggcggtggtaggcgtaggcatacgacgcaccgatgaaggcggggacgtagccgcgcgtttcgcggggcaggtagtcgtagatgtcccagaaggtgcggctcttctcgcctgcgcgggccagcgccttattgacgttgcccggaccgcagttgtaggcggcgatggccagcgaccagtctttgtagatggcgtaaaggtctttgaggtaacggcaggcggcctgcgtcgaacggaccgggtcgcggcgttcgtcgaccagcgaattgacctcaagtccgtagcttttgcccgtcgagggcatgaactgccacagtcctacggcgcccatgggcgatacggccgtgacggagagcgccgattcgatgatcggcagggcccgcagctcgatgggaagcccctctttgagcagctcgtcctcgatcagcggaaaatagtactgcgacatgcccagaatccggctgatcgtgccgtagcgggagtcggtgtaacggttgatgtagccccggacgatgctgttgtaggggagctggatgggcgatgcgaggtcgcgcagacgccgggtatagaccgagtcgggaacagcgccggtctgtgtgctgtccaccagaatatagttgtcgaagaactccctgaacgagtcgcagcactgcctttcgcgccatacggcgaccagcgaatcggcctgcgcggccgtcagtcccagcgtcatgtcgttatccgggagcggtgcgggtgccggcgcggcaggttcggttttgcgctcggtgtgtgcgggctttgcggccggaggagcgggggccggtgcgggttcggcgacggcttcggttcgggcttttttcttctctttcttgcggggtttgcggtcgaggcccgatgcgggcgcagcgacggccatcagcagcactatggtcaggaggattctcatcggttagaatttgaaactcaggttgaacccgaataccgcacggttgccgccggcggagggaacgtaagtataatcgaccagcggttcgagattcatcgacaggtcgtcggagacgtcgtagtccttcagatgggcgtccacatgggcgtccacgatctgaaggacgtacagtccggccgagatgatgatgcagaggtcgcggttgcggcggtagttgttgcgcaggttgcggatgaagtccgccgagtagcggccgtggaattcgtcggtcgggccgtcggggtaggcgtccggattcttttcgtagtcgctcagcagccggtatgcctttttgaaacgctggtagccgcggttgttccagtcgatacagtagatcatcgcggcgaaaccgcccacgacgaagggcactttccaatagcttttgttgtaaatctgtcccgcgccggggaagatgcaggccagcgtggtggctttcttgacgtccgagacctcgttggtcgagtagttcacggcggcgtcgccgatgaaatagatgtacgaggccaccgtaaggcccagatagacctgccggcgggtgttgctgcggatcatcctactttgcagcgcgtccagttcgggcgtgcgcgagaggtttttgttcgtgtaggcttcgtattcgcgcttgaggggcttgtaggtcttgttttcgtggagatagagggccagacccgcacccaaggtgccgtagagaacgggcagtttccagtattgtttgttgtaaatctgtccgtaaccgggcagtacggtcgaaatccagcacaccttcgagagcgacatcgaatcgctcatcagccagccgcgtttatgcttggtggtgtccgattcgatctttatgccggccattttgagccggtagagcgagtcggctttgcttatgtcgtcggtgcgcagctccgcgacggcggccgagtcggccgcgaagagtcccgtcatcagcgaatccagttcgcggaccagcgagaggtcggccagcgagtcggttttcgaggcgagcgaatcccgctgcacgagcatgcccccgcgcacgatggtgcgcgccccgcggtggagctgcgcttgggcgggaagccacaacgtgagtgccgcgagtatcggcagcaggtgtctgaaccggattcttaccatattttatttgaggcggccggagaaccgttcgatgaattgttcgatgtccttgtcgtcgtcgaagccgatgacgatccgtccgccgccgtttttcgagcgtttgatgctgatttcctgcgagaagaacttttcgagctgttccaccagccgcgaatagctttcgggatactcttcgtcctccatgttttgtgccgcttcggcgggctgctcggtgagcgtgcgcaccagctcctcggcctgacggaccgaaaggctcttcttgaggatcttcttcagcgtgcggagctgcagctcctgcggggcgccggcgatggccttggcgtgtcccatcgaaatcagcccctccttgagggccagctgcacctcgtcgggcagcttcaagagacgcatgtagttcgagacggtcgaacgtttcttgccgaccttttcggagagcgcgtcctgcgtgaggttgcactcctcgatcagacgctgcatgcccagcgcgatttcgatcgcgttgaggtcctgccgctggatattctccacgagggccatggcgtgcaggttttcgtcgtccacctcgcggacataggccggaaggctcttcaggtcggcacgctgcgccgcccgccagcggcgttcgccgctgatgatgatatatttgccgtcgcccgatttcttgaccgtaatgggctggatgatgcccagctggcggatcgagtcggccagctcgtcgagggcttcttcgtcgaactgcgtacgcggctgcgtggggttgggaatgatttccgcaatgtcgatttcggtcatctggctcatcggcttgagcttggcgtctacggcgtcggtgccgaatatggcgtcgagtccgcgccctaatcccttcggttgtttcatagctgcgttctgttatttgcttcgtttacggttgcgtttgaggaactcccgcgccaaggtgaggtagttctccgaacccacggccccggcatcgtacagcatgacgggctttccgtgcgagggggcttctcccaaacggatattgcgctgaattattgtgtcgtaggccagctgaccgaaatgttcgcgcacctcgttcacgacttggttgttgagcctgttgcgcatatacatcgtcagcaggaagccctcgatgtccagtgcggggttcaggccgcttttgaccttgcggatggtgttgagcagtttcgaaagcccttcgagggcgaggtactcgcactgcacgggaataagcaccgtgtcggcggccgtgaggatattgacggtcgtatagcccagcgagggggagcagtcgatgaagatgtagtcgaagcggtcgcggacggagtctacgatgcgtttcatcacgtggtgcgcatcctccattttcggcagttcggtgtcggcggccaccagatcgatcgacgagggcagcacccatagattcttcacgtcggggctttggaggagcacctcttcgggctttttgagtcctgcgatacattcgtagacgccctccagattgatgtcgaagcccaagccggaggtggcgttggcctgcggatcggcgtcgagcagcagcaccttcttgcccagcagggccagcgaggccgccaagttgatggccgtcgtggtcttgcccacgccgcctttctgattcgctaatgcgataacctttgccatgtttcgatcgggtttataatcgggcaaatttaatgattttaaatggaaatccataaccgtaaccgaaaattgcttatctttgaactcggaacggattgatagttacacgctatatgacagaaaaaaaaacagaggctcccgtgcaggagccggcgccggctcctgaggccgtcggtaaaatctggaaactgcaggggaaatttcccgcactggccgattatctggtctttttcggcattttcctgctggcgcaggtcgtaggcgccgtaacggcgctgctggtgggttgcaagtggcccgatcaggcgctgctggcgagcgccgacgaaacggtgagcaccgccgaacaggtgctcgtaggacatttcaacaccgtatcctattttgtcgccatgacccttacgctcgtgggatttctcttttaccgcagccggcgccggggtccgaaaatcatcgcgcatttctcctcccgcggactgaatcccgtcctgctgctctggggcgtggttttcatactcgccacgtcggtggtgctcgaaccgctgctgagcctgctgcccgaagtgcccaacgcctacggacgcggcgcgtgggcgatcgttacggtcgtggtgatggcgccgttgttcgaagaggtgattttccgcggcgtgctgctcgaatcgacgcgcgcaaaatacggcgtgatggccgcatggctggtttcatcgaccgtattcggcatcgtgcacgtgcatccgaccgtcgcggtgaacgccttcgccatcggtctggtgctcggattcgtctacatgcggaccgactcgctctggtctacgatcatactccatgccgtcaataacggaatcgcctatctggcgctggtcaccgggcacggcaacgccatgctgatcgacttggtcggcagcaggacgctctatgtgctgatttatatcggtgcgctggctgtcttcgccgtttcgggttacatgatgctcctcgcgctgcggcgcctgaaagccgaggataaaaatcgggcggcggcgtaataatctgggccggggctgcgttagttacgagtaaaaactgtatctttgtcctccggattatgaatttgcgagcgaaaatagcagtcgtggcggcttcggtttttctggcgggctgccgggagatgccgggctatttcgccagcgataccacgctggcgcgcgccggcggcaagcagctgcagctgcgtgatgtggagtcggtggttcccaagggagtcacgggcgaagacagcgcggcgttcatgaaggtatacgtggaccggtgggtgcgcaagcagctcaagctcaaggaggccgagacgctgttttcggcttcgggcgacgatatcgacaagatggtcgaggagtaccgtcaggcgctgctgatccgcaagctgaaccagctgtatgtggaccggagcatcgacacgacgttcaccgacgacgagattacggcctattacaatgcgcacaaggccgatttccggctggaccgtacgttggtcaaggggcggatcgtgcagttcggcgaaggctatcgtcaggcccggaagctgaaggagctgatgggggccaaatccgccgcccagcagcaggatttccgggatatctgcgagaaaaacgacttcacggtgaccgatttccgggaacagtgggtcgattttccggagtttctgagtttcctgccgaccctcaggtcgcagaattacgattcggtgctgtcgtcgaacgccgtgcaggcgatgcgagacagccattcgtactattatttccagatcgacgccgtgcggcgcgagggcgagcctattcccctcgaacgcctgcggagtacgatccgccgcatcctcttcaaccagcggcagggcgagatcatccgcagccacgaggaggagctgtacaaccgcgccgtggagaacggggaggcgaagatttttgaaaatacaaacgataaagtataacgcaatgttgaaaaaaggtataatggcggcggctctcgccgtgctcgctgcgggggccttcgcccagaaacagcaggtgatgctcgacaaggtggtcgccgtcgtgggttcttcctcgattctctattccgaggtggcggatcacgcgcgccagctcacggcgcagcgccgcgcggaggggtacacctccgaccgcgatccgatgaacgaggcgctcgaagcgctgatgacccagaagctgctcttcaatcaggcgcagatcgactcggtgaagatcaatgccggcgacatcgcttcgcacgtcgaggagcaggtgcagaacatgatcgaggccgagggatcgattccccggctcgaagccaagcaccacatggccattttcaacatccgcgagaacatgcgtcagcgctacgaggagcagtcctacgccagctccatgcagaacgaggtcgtgagcaaggtcgcggtcattccgggcgaggtcgagcgtttctacaagtcgatcgacaaggacagcctgccgaccatcgccgagcagtatgtctatgcgcagatcacccgtttccccaagtcgatcacgcaggcgaagcagcgtacgcgcgagcgtctgctggacatgcgcgaacgcgtcatcacgggcaaggccaagttcgagaatctggcccgcatgtattcgcaggaccccggaacgatgatgcgcggcggcgaaatggaccctgcgccgctcgccagtctcgactcttcgttcgctgcggcgctcgaaaacatgaagcccggacagatttcggaggtcgtcgaatcgcagttcggattccacatcattcagatgctcgacaagcgggggagtctctaccatttccgccatatcctgctgcgtccggtctatacgatcgacgagcttacggagggcacgcattttctggacagcatcgccaatctgatccgcaaggattcgatcaccttcgagaaggccgcgctgctctattccgacgatgcgacgtcgaagatgaacggcggtatcgtctcgaaccacgacattctggagcgtttcagcgctttcgacgccaagctgaccgtgacgaagttcctgcgcgaggatttcgcccacttcaacgcgctcaacgattacaacgcgctggtgcggctgaagcccggcgaggtgtcggaagctttcctgaccgaggacatcatgggcaaccagctggccaaggtcgtcaagctggtggagattattccgacgcacgtggcgtcgctcaacgaggactacctccggctggaggagatggcgctcaacgccaagcaggaaaaggtcttcaaggactggctgtcgaagaagatcgacgccatgtatgtctatatcgatcccgaattccgcgacggagcgttcgagaacaaacattgggtgaagtaaaaccgtgcgcaggctcctttccatagcggtcgtcgcattggccgccgtcagtgtgattttcgcccgcggcgggatgcaggcgcctgaggcggagcagccggccgagaagaaactcatcgacctcaagtcggacaacatggggcccgtggctccgggcgattcggtgatctttctggtgggcaacttcgccgcgcagcacaacggcgccgtcattacgtgtgacagcgccgtccgctattcggacatgcgcatcgaattcttcggcaatgtcctgatcaacaagaatacgacctatatttacggcgaccgggccgaatacaacggcgaggtgaacgaagcccgcgtattttcggatatcgtcaaggtggtcgacgaggacgccacgctctacacctacgagttccttttcaacacgaaggagaacgtcggcgaattcggcgggggcggcgtgcttgtcaaccgtgacagccggctggagtcggtgcgcggttactactacgccaacagcaaggagctggtctgcgtcgaccgggtcgaaatgcgcaacgacgaatacgaactgaagggcgactcggtggtctacaacatggctaccgacaacgcctttttctttaaacacaccaatatctggaacaaggagggcgactatctgtatgccgaccgcggcgcctaccgcaaagccgactcgctttacaaggtgaccagcaacgggtacgtgctgaccgacaagcaggagatgtggagcgacagcatcgatttctaccgggccgaagaccatataattttatggcgcgacattcagatcgacgatacggagcacaaggtgctcgccttcggcgattacggcgaatactggaaggagccgggaaacgcgttcctcacgcgccgcccgtcgatcgtgagctacgatctctcgcagggcgattcgcttttcatgcgcgccgattcgatgttcctgtttacgatcaacgaaaacgccgaacgccgggccgcggaggctgccgccgccgattcgctcgcccgttcggccgactcgctggcgctgccgggggccgattcgccgacgcatgctgccggaggagctgacgttccggccgattcgctgggagcctcccgctccgaacgcagaccgcagggcggggatgccgccgattcgttgggaaccccggttcccgcgtccgactcgccggccgacggagacgcggattcgccgcatgccgcgtcgtcgcctctcgacgcgccggaccgacccgctcccgccgattctttgggcggcgcggcgcctgccgattcgctggccaatgccgcggatacgctgaccgtcgcccagcgcaaggcgttgctgaaagaggcggcgaagagagccaaggccgaggaaaaggcggccgccgccaaggaaaaaaagaagaagctggacgagatagcggcccggcgcaaggagaaaatgacggcccggctgctggagcagaaggagcgcgaggaagcccggctcacggcgcgccgcctgaaggcggaatcgaagctcaaggcccgtcaggcgcgtgcgacgcgcaaaggacggatgattcagatcgattcgacggccctgcgcgaactcgattcgctgatcgtgctcaacatggccgagcaggattcgctgctgaacctgttggtcgattcgctgctgacagacacggcggcaatggctgttccggccgattcgatcgactcgctggctgcgccccgcgacagcatataccgtttgctgaaagggttccggaacgtaaagatctaccgctcggatttccagaccgtgtgcgattcgatgacggcgatcagcaccgattcgacgatccacctctacatcgatcccgtgttgtggaacgagaacaaccagatcacctccgacgtgatggacattttcaccgagaaccagcagctcacgcgggccgagttcatcggcagtccgatgatggtcagccagctcgatacgacgcactacaatcaggtggcgggcaagaccatgacggcttacttcttcaacaaccagatttaccgcaacgacgtgaacggcaatgcccagaccatctattacatgcaggacggcgaacccgtcgagatcacgatgatgggcgtcatcgaaagcggcgaaatatcgttctttatcgaagacaagcaggtggtgcagatcacctaccgcggcgatccggtctataatttctacccgatggacaagattccgccgacgcaggatatccgtctcaagggattcaagtgggagggggcgcggcggccttcgcaggccgaggtcttcgaccgccggatacgtccttcggagcgcgagcggcgttcggagatgaaacatcccgatttccccatcatgcagcgcatcgatgagcacaggaagcgtctgatcgaacagcgccgctggaccgaccgcaacgatcaggtcgatgccgcgacggtcgagtggatgcactccctcggctacgaagtgggccagccgcgcaagacggaggcgcccgcggaatagcggcgcggagccggttcggttctgccggatcgttcggttggttgcggttctgcccgattgtttggcccgatcgttcagccggggcgtttgaccggcccgcttgacccgattgtttggccgggccgaccgggatgaccataaaaacaacagaatgcaaaggtgaaaggcgaataacttttcaccttttgtgttatttttgcagccgattacggttaatgtagttcctctatgaaaaagagtctgatagccttggcgttcggaacgcttgcgctcggaatgtcggagttcgtgatgatgggcattctgcccgatatcgcccgcagtctcggcgtctcgattccggaggcggggcaccttatttccgcctatgcgctgggcgtctgcttcggcgcgccgcttatggtgctcgtcgcccggaaacgtccgctgaaacagatactgctggcgcttacggcaatgatcgcggcgggtaatctctgcgcttcgctggctcccgattactggtcgctgctgggcttgcgtttcgtttcgggacttccccacggcgcattcttcggtgtggggtcgatcgtcgccgagcgggtcgccgacgccgggaagcgtacggaagccgtgtcgatcatgatcgtcggcatgaccgtcgccaatctgttcggcgtgccgctgggaacctatatcagcaacgtcctgacatggcgcgccacgttcggaatcgtggccgtgtggggtgtcgtggcgctgctgctggtgcggttgtgggtgccgcgcatggaaccgctgcccgatacggggctgaaaggccagttccgttttctgcgcagtctcgcgccgtggctcgtgctgttgtcggtgatgctgggcaacggcggcattttctgctggtacagttacgtcagcccgctgatgattcacgcttcgggattcacggcggacgacctgacgctgatcatcatgctcgccgggttcggcatgttcgcgggcaatatcatcggcggccatttttccgatcgttttacgcctgagaaggtcgtgcgtttcacgctggccacggccgcggcgacgctcctcgcgatttacttcggggcgcacgtccgttacctctccgtcgccctgatggtgctctgcacgggatgtctgttctgtgtttcgtcgccccagcagctgcttattctggagaattcgcgcggcggcgagatgctgggggcggctttggtgcaggtggcattcaatctgggcaatgcgctgggcgcctactgcggcggcctgccgatcgaccacgggctggggtatcgttatacggctctcgcgggcatgggattcgtcctgctcggtttgctgaccgtcgtgatttatatacgtaaatatccccgccatgagatgcgataacggttcggaactttttccggtggtcgatccctccggcgttgtcgtgggatcggctacgcgcggcgaatgccacggcgggtcgatgctgctgcatccggtggtgcacctgcatctgttcaattcccgcggcgagctttacctgcaaaagcggccggagtggaaagacattcagcccggacgctgggatacggccgtgggcggccatgtcgattacggcgagacggtggatgaagctctgcggcgcgaggtgcgcgaggagctgggggtgaccgagtttacgcccgaacgggtagcggtctacgtattccgctcggagcgggagcgcgaactggtctatgtccatcgtgcggtgtacgacgggccggtggcgccgagcgacgaactggacggcgggcggttctggagccgggccgaggtgctggataacctcggcaaaggggtgttcactccgaatttcgaaggcgaagcgaaactgatttttgaataaccgctttatttcgtatctttgtaaacggggaagcggctgtaaggcagcggcttaatgtggcggggccggttcgtgccgcgttttgccccgattgtaccgcattcgtgttgcatccgcgccgtgtccgcgccgccggggcgggccgatgccggcggaacgtatgccggataggtgcggcactgccgtatcgcacatctttttttgtaaaacgacgacttcggaattatttttcacgaacgggtctgataattgataggaatgccgtatgcagacactcctgaaacattgggccgacgccctgctcgaatggctgggactcgcgtccgcgcaggacagcggctgggaccgctgggtggcctttacgctggtactgctggcggtggcgctcttcgacttcgtgtgccgcacgatcctcgtgcgcggcatgcggcgcatcgtcaagcgcactaaagccacgtgggacgacgatctgttcaaccccgacgtgctgagccgtttgtgcaacgtcgtcagcgccgtcgtgctggggatcgttctgccggtggttttcgaagagcagtccgaagcccggacgatcgtgacgcggctggtcgaggtctatatcgttgtggcggtattccgctttatcaatgccgtgctctttgcggttttccaaatcgcttcggcgcgtcccgcatggcagaacaagccgatcaaggggcttaggcagaccgggcagggcattgcggcgctgatctgcggcatactgatcgtttcgatcctgattgacaagtcgcccgccagtctgttggccggtttgggagcgtcggcggcgatcatcatgctgattttccgcgacagcattctgggattcgtctccggcatccagctttcggccaacgacatgctcaaggtgggggactggatttcggttcccaaatacggggccgacggttcggtgatcgaggtgtcgctcacgacggtgaaagtccgcaatttcgacaatacgatcgttacgctgccgccctacctgctggtgagcgattcgttccaaaactggcgcggcatgcaggcgtcgggaggccgccgcgtgaagcgctcggtgagtatcgacatgaccagcgtgcggttctgtacgcctgagatgctgaataaataccgcagtatcgacctgatccgcgaatatatcgacgataccgaacgccgcgttgaggagtacaatgccgcgcacggcatcaaacccggcgaacgcaggatcaacggcctgcatcagaccaatctcggcgtcttccgggcctatctcgaacgttatctgcgcaacgaagtgcccgtgaacgcagggatgacgctgatggtgcgtcagctgcagcctaccgagacgggacttccgatggaactctacttctttaccgatacggtgatatgggtggattacgagcggatacagtccgatgttttcgaccacgtgctggccgtgattcccgaattcgacctgcgggtattccagaatccgtcgggcagcgatatcgcggcgctgcgttatctgaagccggagccgggaatggggcggaaaatggagcagagaagggggccggaccgggtgccggaaccgaagtcggagcaaaaaccggaaccgatgcctacgcaggaaccgatgccggagcaagagccggagtcggggcggaaaccggagccgacgccgtagccggtccgggcgcagtagccgaacccggagcgggccgcagggccgcaatctacaggaaaatcatcagcatcacctgaatgatgaccacccgcaaaaacatgcagaggggatagaccgtggcgtaggagaccgacggattgtcgccttcgatcgtgtcgttggcgtaagtcagcgccatcgggttggccatgctgccgcacagcatgcccgataccgaaccgaaatcgatgcgcaggacgcgcagcgcgaagacgcccagcaatacgacgggaacgaacgtcagcaggaatcccagcaggagccacaacgccccttcggggcgcatgaccgtctcgaagaagtgcgcgccggcttccagccccagacaggcgagatacatcgacagccccaatgcgcgcagcatcaggttggcgctgtaggtggtgtaggtaatcatgtgcaggcgcggaccgaacgtgccgatcaggatgccgatgacgatcgggccgcccgccagtcccagctttacgggcaggctgatgcccggaatgctgacggggatgctccccagcaccagtcccagaatcagtccgacgaagaccgccacgagattgggttcgtcgaggttcttgacggcgttgccgagaatcttctcgacgttctggatcgccgcggcttcgccgacgaccgtcaggcggtcgcccatctggagccgcaggtcgggcgttgcgagcagctgcacgcccgaacggtagacgcggctgatgttgatgccgtagttgttgcgcaggcgcagtgaggagagtttcctgccgttgatttcgggccgcgtgaccagaatgcgctgggagatcagctggctgtccacggcgttccagtctatgttttccgcgttccagtctttcagttcctgctcgccgaagatcagccgcaggccgtcggcttccgaaggggcggtgatgacgaggatgatgtcgtccttctgcagcgtcttgtccgaggtggggatcgacacccgcccgttgcgccagatacgcgaaatgacgaaatggtggtggctttgcgaggcgatctcgtggacgcttttgccgaagacggcggggttggtcaggtggtagctggcgatgaagacgttcttgcggtgttcggcgtccggttcgggcatgtccgaaggccggacgaagaccttgcggatgaagacgatggccagaatgacgcccaccacgcccagcggataggtcacggcgcagctcagggcggcgccgttggggtcgatgcccatttgctgcagcgtctgctgcgcggcgccgagcgccggggtgttggtcgtggctccgcagaggatgccggccgcgtcgggcatggagacgttcagcgtgaagctcatgcctatggcgagcgcggtgccgatcagcactacggcgacggccggcgacaacaggcgcaggccgtcggcgcgcagcgagttgaagaaacccggcccgacctgcagaccgagggcgtagacgaagacgacgagtccgaaactttcggcataggtcagcatctgcgggtcgatcgtgagtccgaaatgcccggccagaatgccggcgaagaagatgaacgccacgcccagcgatatgccgaaaaagcggattttaccgagtccgatgccgatcgtcgagatgagcgagatcaccacgacggcctgcagcgccgaatgttcgacgaataaactttttagccactccatctttaccgtttgtaattcagctgcaaaagtagggcaaatttttcagatagccatttctttgccgaacgttttgttggctgaaagtgactgtatgcaacattttcgtccactcgtgtgaatcatttcagccgtaagttatggcaaaaacgctcacggggtgtacagcttcggaatattttcatacctttgtttcatcctgcttcgcacaggggacgaagagggtattagtgacgcaaaagggcttctgcgccgggtcagagcctgaaagcctctcccggcagctgtcggaatacttgagggattggtattccggacagcaatagggcggtcgaatttcgaccgccctaatttgtttattcggtgcgagcttgtttacggctgtttgtcatagttcgagcggccggccgcgatagaagtcgaggatcttcgaccggaatacgaattcgtatttcgcctgcacgagttccgactcggccttttccatacgtgttttggcgtcgttgaagtcgaagaccgtcgaacggccagcgtcggctttctgctgttcgtaggcgaaggccacccgtgccgaggcgagggcggcgtccgccgaacggtatttgccgtaggcggcgtcggcgttgtaccacgcctgctcgatctccttgcgcagcgattgctcggcgtcggttacggccagctgttgtttgcgcatggctatccgggccgagaggatgctgttgtgcgtggcgcggcggttgaagatcggaacgctcatcgacacgccgacgaattcgctgctgttcttgcggaactgggtgccgaaggcggcctcctgcgtgctgtagatgcccgtgccgtagcctccgcgcagcgaaagcgaggggtagagcgcggacttggcgatccggacggcattttcggcgctttcgagccgcaggcgttccgccttgatgtgggggcggttttccgtcgcataggcatagacgtcgtcggccgtgccgagcacgtgcagcgatgcgagcgccacgctgtcgagctgcggcgccacgatgtcgaatcccgccgcgctctcgcggttgagggcctgactcaagttgagcagcgccagccgcaggtcgttgcgggcctgcgtcagattcagttcgtcgttggcctgcagggcttcgctttcgtagcgtgccgattcgggctgtttgcccgcggcgaccagctcgcggctgcggacggcctgctgggtgctcaggtcgagctggcgttcggcgatctgggtcagctccttgttgtagagaacctgcaggtacagcgtcatgacgttgattgacaggtcttcgcgtgcgcgttccaaatcctgcatggcggcggcgaggtcgagcttgccgcccttgatttcgcggttgatgcggaatccgtcgaagaggggcatgctggccccgacgtcgaacgagccgctctggatggttcccgtcttgcggatgttgtcgtcggaggtgccgcgcccgaaagtggcgttgtagcccaccgatgcgctcaggtcgggcagccggctgtatttggaggttgacagtttcacgtcggtctgctccacctgcagggcctgctgctgtacgccgacgttgttgtgcagggcatacccgatgcagtcgtcgagcgaccacggcgtgccgggcgccggcgcttcggcctgcggcgcggactgtaccgactgagccgcggcggcagccgtgcagagcgtcatggcagccgcgctgagggcggcgaatagggtgctggttttcatgctgcgatgcatttgtgattatttcttcttctcttcccgtgcgccgcggactttgctctcggcggtcacgccctcggtcagttcgatgttgatgccgtccgacagcccgatcttgacctcgtgcttgtcgaaggtctgctcctcggctccgtcggcgctggtgagcaggtagacgtaggttttgtcgccctcgaattcgacggtgctttccggcagggtcagcaccccttcgcggctctggatcacgatgctggcgttggcgctgtatccggcgcgcacgaagacgttttcgggaatcttcacggccgccttcacttcgaacatgatgacgccgttgtcttcggtcgctttgggtgaaacgtactccagcagggcgtccagctcgacgttctgcagggcgccgatggtcagcttgacgggcatcgtctcgtggagcttgcccacgtcggtctcgtcgacgttgccccggaagagcatgttcgacatgtcggcaaccgtggcgatggtcgtgccgtcgttgaaggtgttggactggatcaccgagtttccgaccttgaccgggacgtcgaggatcatgccgtcgatcgtcgaacggatctgggtgttgctcagctccttgtaacggctggtgatgccgttcttgacgatctccatgttctccttggcgttctgcagctcctcctgcgctttccgaagcgcggtgcggccctgctcgtactcctcgtccgacaccacgcccttcttgtgcagggcttccgtgcggtcgaattcgcggcgggtctggtccagcgatatttcggctaccgagacgcgcgattcggcgctcgacagctgacccatttcggggacgaccttcaccgtggcgatcacctcgcccttgcggaccatctgcccggcctccttatagacgtcggagacgatgcccgaaatctggggcttgatgagcacctcgtcgcgcggctcgaccttgcccgtggcgaccacgtactgtttgagcgtgtcgagtttgggctgcacgatcgtgtagacgacctttacggggcgggtcttctgccacaggaaccagaacgttccgagaagcagcgccgcaaagagcactcccagaaagattttcagaaattttttcatagccgtaatctgtttgtttaatcgtttattcttcgcgtattgcatccaccgccttgatgctcaaggcccggtatgcggggatgacgcccgccagcaggctgcctgcgatcaggatgaagagggccagcatgcccgttccgaaggagatctgccacgacacttcgaatccttcctgcgccacggtgaccgcctgatagtagaccgaatccacgaccgacagcacgccgacggcggccgtgagccccagtattccggcgatgaaggtgaggatgaagctctcggaaagtatctgcgagatgatggccgttggcggggcgcccagcgcgcggcggatgccgatctcctgcgtgcgctccttcacgagcaccagcatgatgttgctcacgccgacgatgccggccagcagcgtgcccagtcccacgatccacgtcagcaggccgatgccccagaacaggctcatcaccttgtcgaacatctctccggcggacatggtccaagcggccttttcgtcgtccggcgagatcatgtgccgggcgaagacggcttcgcgggccgctttctcgacctgtttgctcggaacgtccttgtagccggccagcgccagcaggtgtatcgtgcggccgtagccgaacatctgctgcgccagcgagatcgggacgacgaccgtgcgttcgacatcgctgaacgacatggccgacgattcgcggcgcatgacgccgatgatggtgaagtagcttcctccgaccttgatgactttgcccgtcgggtcgggttcgcccggaaagaggtctttctgcacctgcgtgccgatgacgcagaccttgcgcttgtgcaccatgtctacctcgttgatgtaacggcctgcgatgatcttctgcgggttgatcctctggtagtcgggcgtgtatcccatcatctgatagtcgcccttgcgctctttgtagctgcagtggagttcgttgccccagatgacgcctgaggtgtactccacctcttcgagtttgctgacggcttccagatcgtcgttgtccattctccaccagcgtcccgtgggcatgcccttgtaggggaccgacgtgcggctgctttgcagcagcaccgtgttggtggacatgccgcccagctgggcgcggaaaaggcgtcccagccccatgccggctcccagcagtacgatgagcatgaagataccccagaatacgcccagcgccgtcatgatgctgcgcttgcggttccggctgattgtctgccagatttcgttccagcggtccgtatcgaaaaatctcatggctccttatttattataacgcagggcgtcgatcgttttcagttgtgcggcccggtaggcggggacgtatcctgcgatcaggcccgcaatgaccagtacgaccgtggcgctgacggccacgcccagatcgagcgtcggattgaggaagatgctgccgccgaagtttccggtctgggccggcgtctggttgatgacatagttgaccgcctccatgacggcaacgcccagcaccatgccgatatagccgaacatggccgttatcatcaccgattcggtcaggatcaggcggatgatcgacacgggtttggcgccgagggccttgcggatgccgaattcggaggtgcgctccgtgacggtcaccagcatgatgttgctcacgccgacgatgcccgccagcagggttcccagaccgatgatccagacgaagaggttgatgccgccgaagacgatcatcatgctcttgtactgctccatcgtgttgcgtatccacagggcgctctggtcttcgggatcgtagtggtgttcggcggccagccgtttgcggatgcgctgttcgaacgcctccatctgcgcgtcggtgtcgagtccgtgtacggtgatgatcgcgttgtccacgaccggatcgttggccttgaagatcagctggccggtcgtcagcgggatgtagcccatcgaattgcgctgctgggcgtcgcctctgtagacgccggccacgcggtagatgttgttgtggattttgaccggcttgcccagcgggtcgtcgccgcggaagagtattctttcgagcgcctcgtcgatgacgatcaccttgcggtagttgtggatgtcggcctgattgatgaaacgtcccttgacgatctcgacgccttcgatctgctggatcttgggcagcgagccgcgcaggctgatgtcggcgaagcggtcgaggtaggtggccgtggagccgcggtaccacgctttggcggcgacgtcgtccacttcggggaattcattgaccagaatttcgaggtcccggtttttcaggtcgatgctgcgccatttgttgtagccggcgtaggccttcgaggtccagccgccggagatggtgatcgagttggtggcgtagttgccgaaattcgacagcacgccgttcttgagtccgttgcccgatcccagcaggatgacgagcatgaagatgccccacgcgaccgaaaatcccgtgaggaacgtgcgcagtttgttgcggcgcaccgaagtccatatctccagcagcagctctctcatcgcgttgccagtccggtttcggtgatactgctgatgacgccgtccgtcaggcggatgattttgtccgtctggtcggcgatcgactgttcgtgggtgacgcagatgatggtcatgcccatgtcgacgttcacgctgcgcagcaggttcatcacctcctgcgaggtgacgctgtccagtgcgcccgtgggttcgtcggcgaggatgatctgcggtttgttgatcagcgcccgcgcgatggccacgcgctgtttctgaccgcccgacatctcgttgggcatgtgttcggcccactccttcaggcccagcatgtcgaggtattcgagggcgagggcgttgcgcttgcggcgggagacgccctgatagtagagtggcagggcgacgttttcgacggcgttcttgtagttgatcaggttgaaggactggaaaatgtagccgatcatgttgttgcgggccgcggcggcctgcgtctcgctgagatccttgatcaggcggccggccagatagtagctgccgctgtcatagtcgtcgaggatgccgaggatgttgagcagtgtcgatttgcccgatccggatgcgcccatgatggagaccagttcgcccttttccaccgtgaggtcgatacccttgagcacatgcaggggcgacccgttgtcgtaggtcttgttgatgttttccagctttatcatattgtgtctgccgttgtaaagcggttttgtaaggttgcgtagttacgatctgtaagccgagggaaacggcgtcgggaacaaaggtattaaaatattcttgaaaaacaatttatttttatcgaaaatcaataaaaaattactaaacaccaataaaccgtcggttgataggcgcaaatataggtaaaatatttatactttgtacgacatagtactgtaaaaataagattaatatttcggacctatattaatggactgctccttcttgctgtaatgcagagatttccgtataggggtgtgcgtgagattgtgcgaaacggtcgttgccgggccggacggaatcgtatccccggctgtaaaaaattgttgaaatggttaaaaaaaacgcttgaaaatgcacaaaaaatattcattttagttatatttgttgcgttaggtcaatcatatgaggaaacttctgctactgttattcacgctaattccggccgtagtttgggcgcagcgttacgatttatcggggcgggtgctggtcaaggacaccgacaaaccgatcgctcaggctgtcgtcgagctgccgcaggccggactgtgggccgtggccgacggcgacggcaattttaccgtgaagggcgtgcccaaaggcgcgacccgtttcgtggtgtcgtgtctgggatatgcgaccacggaaaccgaactcgacgtccgcgccggcatggggcgtatcctgctctatgcgcctgaggacaatctgaaactggaaagcgtcgtcgtcacggccaaggaggcgcccaatgccatggccacctcgcggacgatcggcggcaacgccatcgaccacctgcaaatggtgaacgcttcggatatttcgtcgctgctgccgggcggcaagacgataaatcccgatctgaccaaagacaacgtcttttcgctgcgcagcggcggttccgcggccggaaacgcctcgttcggcacggccgtcgaggtggacggcgtgcgtatttcgaccaacgcttcgctgggcgagatgtcgggcgcgagcacccgcaacatcgcttcgacgaatatcgagtcggtcgaggtggtgacgggcgtgccttcggccgagtacggcgatatttcgtcgggcgtggtgaagatttcgacccgcaagggcaagacgccctatacgctggtgctttcgaccaatccccgcaccaaacaaatctccgcctcgaagggtttcgatctgggtacggaccggggcgtgctgaacagcagcgtggagtacacgcgggccatgaagaaccctacgtcgccctacagctcctattcgcgcacgggcattgcgctcaattaccagaacaccttcgccaaggtcctgcgtttcaacttcggcgtgacggccaacatcggcggcatgaataccgaagacgaccccgacgcgcaggtgggcgagtgggagaaggtgcgcgacaacgccctgcgggccaatacgtcgctcaaatggctgctcaacaaaccgtggatcacgtgcgtcgatttcgatgcttcgctcagctatgccgacaagctcgcacgcaggcacacctaccagtcgtcggccacggagaccccggccgtccatgccgaaagcgagggctattatatcgccgaaatgcttccggcgactttctataccacgcgcaatatcgactccaagcagctcgactatgcggcgaacctcaaggccacttgggtccgcagctggggcgacgtgcatagcaatgccaagatcggcgcgtcgtggcgcgccaacggcaacgtcggggagggagagtattatgcggcccccccccttgcacccgacgggtaccgcccccgcccctataccgatattccctacatgcacaacctcgcggcctacctcgaagagacgctgaccgtgccgctgggaacgacctcgctgcagctgatggcgggtgtgcgcgccgaaaagacctttatcaagaatacgcagtatgaaaatacgtcgagtctttcgccgcgcctgaacctgaagttccgcatcaacgaccatgtgaccgtccgcggcggctggggcatcaccgagaaactgccctcgttcaacgtcctctatccgctgcccgaataccgcgatacgcgggtgttcagcaatacctacagcccgaaccggagcgtgtacgtctatcacacgcagccttaccagatactctacaacgacaacctccgctggcagcgcaaccgcaacgccgaggtcggcgtcgatctgcgtatcggaggcacttcggtttcgctggtcggctatttcaaccgtaccaaatacccctatgaactgagcgcctcctacgagccgttctcctacaaggtgatgggactgccctcgaagatgcccgacggctcctcgttccagatgccttcgaatccgctcttcagggtggacagccagacgggtgagattttcgtccgcgacaaggacgatccctcggccggatggatcgccatggagacgacttccaccaagcgcaccttcgtcaggaacacctaccaagacaacggctcgcccgtggaccgcatgggtctggagttcgtcgtggatttcccgcagatcaaccccatccgcacgcagctgcggctggacggcgcctacggctataccaaatacgtcaataagggcgaggcgtcctattatccttcgaccacgacgggcggcgaattcttcccctacgtgggtatttacgccgacaacgggggcagctccgtcgtgacctacaacggccgcaagacccatgcgctggatgcgaacctcacggccacgacccatgtgcccgcgatccgcatgatcgtcaccctccggctcgaagcttcgctggtgaagcgttcgcagaacctttcggagtacgacggccgcgaatacgccttcaacgtggatgaggaccgcaatcccacgggcggcagcatatacgacggcaacagctatacggcgatctggcccgtggcctacctcgacctcgacggcaaccgccatccctttaccgacgcccagaaaaacgatccggccttctcctccctgctgcttcgttcgggcaacgcctactcgttcaacggcgacgggtacgatccatatttctcggccaacctgagcattaccaaggagatcggggatcatgtatccatctccttttatgccaataacttcaccaattcccggcctttcgtcgcgtcgtacgcttcgggagtcaaggtcgtctttacgcccgatttctattacggcctgacggtgcgtcttaaattctgaaaacgatgaaaaagctattttgcatattatcctgtctgctggccgccggctgcacgtcgttcgaaggcaatccctacggcgatacgctgcggtcgctcagcgtgcaggtcgtgtaccccgaagagtacgcctccttcctgcgggagggcgttccggtgaaactcaccgaccgcaattcgagcaacgtctacaccgcgctgaccgatgcgcgcggcgtggcggccttcgacgtggccgccgggcattaccggctttcggtgctcgaccgccccgatgcgtcgtcggtcttcaacggcgccgtcgaacaggtggacctcgccggcgcggaccggaatgtgagcgtagagttgaagtacgccaagccgggcacgatcctcatcaaggagatctattcgggcggctgtccgcaggacccgcctgcgaccggttcgtatgccgacgacaagtatatcgtcctgcacaacaacagtttcgatacctactacctcgacggcctttgtctgggtatggtcgcgccctacaactcgaacgccaacaatccgtggacgagtacggacccttcgggcaacatcgttttccgcgactacgccgccatgccggactgtatctggatgttccccggcacgggcacggatttcccgttggagccgggcgaagaggccgtcgtggcctattacggcgtggatcacacgcagacctactcccagtcggtgaatctcaaccggaaaggctacttcgtgctttacgacatggtgcattatcccggcaaccggctgcaccccacgcctactccgggcgatcagatcgacgagtcgcactatatgaaagtgctgaaaaaaaccggaacgaatacggccgtggtctatgtgatatcgcagaattcgcctgccgtgatccttttccgggcgcccggcgatttcgatctggacgcctatctggccaacgatctcgaatcggcgatcgccagcggcagcgtcgtctattcgaaaattccgtgggagtggatcgtagacggcgtcgaggtctgcaacctgtcggaagcgaccagaaacaagcgtctgcataccgatgtggacgccggatacgtcggattctcggccaaggcgcagggacacagcctctaccgcaggctggacgaagaggccactgcgagcgccggattcgaccgatatgtggataccaataattcgtcgaacgatttttacgagcgtgagacacaatctttgcgtgaatagcctatgagacggattttaacactgctgatgataattgccgtctcaggcgccgcggcacaggagcgtttcgattatgtttttcgccgcaatccgtggaacggcggcccgaatgccgcgggcatccggcaggacagcctgagccgctcctatgccgaaatctatttcaccaaggagaacggcgggatgaccggccattcgtcgtcggatgacagctggaacgccggcgcgcggaccgagtcggtgcgccatctgaaaaaagtctctttcgcgggcggcttcggatacgactatttcgacggccgcaacatgtgcggttcgatgttcaccgaaccgggctattatcccgtggatattctcgaatttacgccgggccgcaaaatccgcgaggactataccttcacgggcggcgtttcggccgtgctggggaggcgctggacgggcggcctgcgcgtggagttcgaagcgcagaactatgccaagcgcaaggacctgcgtcacaagaacacgcggctcgacttcgaattctcgcccggcgtgatgtaccatgcgggccgtttcgccgcgggcgcggtctatatcgtgggcacgaacagcgaaaaactcgaagccgaggagatcggctccacacccgaatcgtatcaggctttcttcgaccgcggtctgggttacggctcgctgcagctctgggagagcagcgacatgcacctcacgaccagcggcgtcacgggatttcccgtccgggagaatacgcagggcgcgggcgtgcagctgcagtacggaccggtctatgccgctgccgcatatcgcaaccggcagggcgagacgggcgagcgcggtatgatctggcatgagttcgggacgcatcaggtgacggcgaacgccgccctttcgctcggaaacctgcagcgcaggcacttcgtgcggctgaacctcgactggcggtcgctccagaccgacgagaacatcatcacgacggagaccgtcaacggtgtgacgaagccctacattcacggctcgacgcctatcttcgggcgcaagggactcgatctggggggcgagtacgaatttgcaaaccgccatacggacctgcgcgccggcgtggcctattcgcagctcaaccgcgaatcgacgctgatgtatccctatgtcaaggggcagaagctgcactttacgaaagtctatgccgagctgatccgcgccttcgggttctgggaactgaccctcgccgccgactaccgtcagggcggcttcgaggagtgcgaaaaacagttcgagacctccggcgagcagccgggcgagtatcccggacaactgaccggatactacaattatgaaaccgaatacctgacggccaaacggctgggtgccggactgggcgtacggcgcaacatcaagcggttctacgtcgaactgtacgcgcgctacgaacacgggttcgatctgcaatacgtcgcgcagcccaaccgggtgcgggcgacggtgagtgcgggatataatttttaacttaaacggatagagctatgaaaaagattttgatgatcgcggcagccgcggcagtgtgcttggccgcctgctcgaagagcgaagatggcgttccgggcgaccggacgctgcgtatcactccgacgatcggcaatccttcgctgactccggcggccatgactgccgcctctacgcgcgccacggataccgatttcgaactgggcgacaaggtcggcctgaaggttacgatgaccgccgacggcaaggacttcgtgtcgaacaagccgatgactttcgacggcaccgatttcaaagccgaggggttcctctggtacgaggacgtcaatgcgacctcgacgctcttcgcctattatccttggcaggagggcggggatattcccgcggaattctcggtcaaggccgatcagagcggcgacaactacacggcttcggacctgatcgtggccgtgaaggcgggcgtcaagccgacgctgtcgtccacgcagatgaccttcaagcacaagatgtcgcgcatcgttatcgacgtgacgaacgaatcgggtttcgatattacgaatatcgtcatcaagggcgccgtggggacgggcgtactcgatcccgcgacgggcaactttacggccaaagcggacgcggaggcttccgacctgatcgccaatacggcgactgcgaacaaagtctactatgcgcttctggtgccgcagaacggtgtcaaactgatggttaccgtcaccacggccgacggcaagaaacgtacgcagacgctcggtacggccgacttcaagtcgggtgagaaccgccgcatggagtgcaacgtgcagccggccgacatcgagttgaagttcagcggtccgattacgggctgggtggacggcgacgacctgctgccggacggcgaaggcgaggtcgagaccccgaccgtcgaatggggcggcgtgaagtacgagatcgtgaccctgaaggacggccgtacgtggatggccgaaaacctgcgctacgtgcccgaaggcaaaaccatatcgagcgacccgaaggatggcagcggcgtatggtatccgtgcaatctgtctaaagcggccgatccgtcgctcgtcgaaagcaacggtctgctgtatagctatccggtgatgctggggatgaccggcgacatgacgggtgacaatttcgaccagtatgaaggggcgcggggtatttgccccgaaggatggcatatcccgacgatggccgaatggctcaaactggcgggtgtcggcagcggcaacctcaccgatccgacgtcgccctatttcgaacagacgcagagcggcggttcgatcgttaagctcaataaagacgggtttaacatcgcaggctgcggttatgtcaatgcggcgaatgtcacggcgactccggcctatatggcgacagcctcggctgccgacgcctcggcgttcggcatggggtatttccccagttcgaccggctataaggttacctacaatacggccgacgacccggccagcggcattaagaacattcagtattatgccggcatgatcacctacaacaagagtttcaaccgtataacggtcgcataccaaggcggttactgcgccgctcccgtccgctgtatcaaggacagggaataacccgctccgcacacacaaacacaatacttaacgatacatgaaacgcaaacccaattacctgaagcacatcctgcagtggggcgtactggccgccattgcaggcacggtgctctgggccaacttcagcgaaaaacccgtcgatgtcgaggcttactgtcccttcggcggtctgcaggctttcggaacctatctggtgaacaactcgctggcctgctcgatgtctatgctccagatcatgatgggcctcgtgctcgccgtgggagtgatcctgttcagcaaacttttctgcggctacctctgtccgctgggcaccgtcggcgaatggatgggccgcgccggaaagaaactgcatctgcaggtcgaggttccgtcgggcagcatcgtagacaaactgctgcgcgtggtgaagtacgtgctgctcttcacgatcctctatttcacgctctcgtcgagcgagctgttctgcaagaaactcgatccgttctatgccgtggctacgggattcaagggcgagatcgtgctctggatgtcgctcacgagccttacgctgttgctgctgggcggcttcgtggtgaagatgttctggtgcaagtatatctgtccgctgggggcggccagcaacattttcaaatttacgctgctgttcgtcatcgcggctctcggcggctggattctcggcatgctgggcgttgcgaacgcatgggtctggaccatcggcggcgcatgtctggccgcatatgtcgtcgagatcgtcaagatgcgcagctgcgtcttcccgctgatgtacatcgagcgtgacatccgcacctgcaacaactgcggtctctgcgagaaaaagtgcccctatcagctgccgatccacgactacgtgaaggtgaagcacgtcgattgcacgctttgcggcaactgtatcggctcctgtacgaaggacgccctgcaggtcaacggccgccgttcgctgcgctgggtgccgggactgctggccgtcgtgctcttcttcatcgccgtgtggatgggttccacgatggagctgcccacgatcgacgagaaatggggcgattacgagcaggtcgagaatctgcagaccttcgagatggagggattgcagacgatcaagtgcttcggctcttcgaaggccttctcggccaagatgcagaccgtgccgggtgtttacggcgtgaagaccttcgtccgccgtcacggcgtcgaggtgctgttcgaccccgccaagaccgacacgctgaagattcaggccgcgattttcgctccgacgctgcgtaaatacgccatgccgggcgagaacgtgccgatgctcgacgtggtgaaactcggcgtcgagggactccacgaccggatggatatgatctacttcggcatggtgctgcagaagatcaagggcgtatacggcttcacctccgaattcgcctgccccgtggatgtgacggtctacgccgatcccgccgccggcattaccgaaaagatgttcgaggaggcgatcgacgccaaagagctggtgattccggccaaggagggcgaaaaggtgattccgatgcacaccgtgctcaagagctatgcggtcgccgggcaggtttcgcgcgaggagttcgcgcagatcatgttccgcgacgtggagaagcaggcgggcaggttcattgccaatatcgagaagtggggcgacgacggcgagttcccgaaggctgtctacgagatggcgttccccggtatcgagaagatgccgatccgcaatgcgttcccctatttcaagagcttcctttcgtgctcggagggcattgtctccgtagacttcgtgctgcgcgacctgacgcccgtcatgcgtattcactatgtgaagtcgatgtggaacgacgagaagctctggaaggagattttccaagccgagaagtggacgctccgcatggccgacgggaccttcaaggaggcggatccgcggctgaagttcaccaatccgggcaagaccgtaaccgaataaaatgaccgggaggggatcggctgacggtttcctcccgttttatgaagatgaaagatatgagaagatggatagcctgtctggccgtcgtgctgctctgcatgcagaccgctgtggccgacgaaggcatgtggctgatcaaccggctgggggagatttaccctcagatgaagtccaaggggttgaagataaaggacaaggagatttacaacgagcagacttcggcgctcgccgacgccgtagtcgccgtggacggcggcatgggaacgggaagcatgatctccgacgaagggctgatgataaccaaccaccacgtcgcgttcagcgacatctgcgccctttcgacgcccgaacacaactacctcgaaacgggtttttgggctcgtacgcgcggggaggagattcccgtggccggcaagaccgtgtggttcctgcgcaaggtggtagatgtgactgaggaggtcgaggcgatccgcagcggcatgatggccgaaggaaaatggggcataatgggcatgcgccgcgtgtataaggagatcgaggaccgttatgccgcgcagaccgaacacgaagtgtcgtgctactcgatgtggggcggcaaaatgtacctgatgttctattacgacgtctataaggacgtgcggctggtcggaactccgcctgtcacgctgggtgctttcggcggcgatcacgacaactggggctggccccagcacaagggcgactttacgctctaccgggtgtatgccgacgcggagggacgtcctgcggagtattccgccggcaacgtgccgctcaagccccgccgcgtactgcgtattgcgacgggcggcgtgcacgacggcgactttgcgatggtgatcggatttccgggccatacgaaccgttacgcttcgtcgtttgccgtggccgagaaacagcgtgtcaagaatcccgtcgtcgtggccaaccgccacgaccggatggatattcttaagcgccatatggagcgcgatccgaaggtgcgcatgaagtattccgactcctatttcgggctgagcaactatgccgattacgccaagtgggagaacaagtgtctttgccgtttcgacgtggagtcgatccgtaaggccgaagaggagcgtctgcagcgttggatcgaggccgattcggcgcgcagggccgaaaacggcgggctgcttgccgatcttgaacgcggttacgagggccgccgggccgccgaacgcagtctcaactatttccgcgaggcgtggctcggtccgagcgaggcgctgctggtggccaaccgcgtgtcgtcgtacctcggcaagctggaccgtctgaagctggattcgctgaagatcgactcgaaggatgcgcagagcgtggttgccggaagcggccgtctgcgccgcaactacgatgtcgagaccgaccgcgacctgctggcgaagatgatcgtgaacttcacgaagcatgtgccgcgcgagatgtggggcgaacagttgaccgagatgtacgatgcggcgggcggcgatgccgaccggatggcgcgcgaagcgttcgatgcgtcgttctgcagcgatcccgaccgttacgacgcctatttcgaacggaaccgctcggtcgccgagatgcgccgcgatccgctggtcagactcaccgagtcggtgcgggtgcagcggtttacgggcggggtggacaaggccgagagacgggttcgcgcgcaggtgggcaaggccgaaagccgttatgccggcctgctctacgacttccgcgcttcggaagggattgcgcagtatcccaacgccaattcgaccatgcgcctgacttacggcagtgtcgtgcccctgaatccgtcggacggcgtgcattacgattcgcgctcgacgattgcgggttatatggagaaatacaaccccgacgagtatgaattccgggtcgacgaccgcatgaaacggctgattgccgctgaggattggggccgctggggcgaaaagggtacgctctacgtcaatttcctgaccgacaacgacatcacgggcggtaattcgggcagtcccgtgctcgacggccgcggacggctgatcggactggccttcgacggcaaccgcgagtcgatggccggcgacgtgtggttccatcccgatctggcgcgtacggtctgtgtcgatatccgctacgtgatgtggattatcgacaaatatgccgaggcggactggctgctggacgaaatgaaatttgaaaaatagttcggaatcggatcggccccggctctgccggggactccgggttttcggatagatgaagacgcctgcggttgccgcgggcgtcttttggtgttgtaatggcggcaggtgggcgagggcggcgtcggacgtgtctgccgcgatgggggcggttacggtgtttgcgcgacggggagtttccccggttagaggtgtttgccgcggcgtatgccgcgcagggaatacgggggcggtgcgctatgcaagcagacgccgcagttccgggatgtcggctgcgaggtaaccgggactggccttttccagctcttcgcggctgccgtacccccacaatacgccgatcgactctacgcctgcggccgcggctccctcgatgtcgaagcggcggtcgccgatcatgacggcctgcgacggatcgtcgatgcgcagttgtgcgagggtctcgcggattacgcccgctttggtcgagcagggaccgtaggccgttccgccgcagatgagcgtgaaacggtcgcggaacccgaaatgccgggcgatccgttcggccagaaagtcgggtttggaggtggcgatggccagcgtcgcaccctgcgcctgcagggcggacagcagttcgggaattcccgcgtagagcttgttttcgaagattccctgacggctgaagtattcgccgtatttttcggacgcctcgtcggcttgggcggaggtcatgccgtaaaattcacggaacgaatcccgcagcggcggtccgataaagggacagagcgtcgtcaggtcctcgacttcgatcccgaagtgccgcagggcgtactgcaccgagcgggtgatgccctgcatcgggtcggtcagcgtgccgtcgaggtcgaaaaggaggtatttccagtgcatagattctcagtttttttgtgtggtaacgggcaaagttcgccttttattttgttttcgcccggttttccggcaggaaactgcatggcaggacaccgcagaacacaatacaggccgcagaggtaacgtgcggcctgtactgttgctgtcttcgtgcatttacttaatccgcaggaacgtgtagccgaagcgttcgcaggcggctttttccagctcttcgcgcaccgaggggtgggcgacggagatcagcgcacgggcgcgctcggcgaggttgcggcccctcaggtgcgccacgccgtattcggtgaccacgtgctggaccatgtggcgggtcgtgacgacgcccgcgccgggggtcagcagcgctttgatcttcgattcgcccttcggggtggtcgaggggatggcgatgaaggttttgccgccctccgagagcgcaccgccgtacatgaagtcgtgctggccgcccacgcctgagataatgcgttctccgaccgagtcggcgcacacctgtcctgtgagatccacctcgacggccgaattgatcgccatgacacggggattttcgcggatgcggaacggatcgttggtccacgccacgtctttcatcacgaggtctttgcggtaatccatataatcgtacagacggcgcgagccgagggccagcgacgcgacggtcgtgccgggcatgacctttttcagcgaattgtcgattacgccgctttccaagagcggcaggaccccgtcggtcatcgcttcggtgtgcaggccgaggtgcttgtggcccgtgagagccgccagaacggcgttgggaatgccgcccacgccgatctgaagcgtggcgccgtcgggaatcagctcggcgatgtagccgccgatcctgctttcgatttcgctgggcgtggccgagggaacttcgaccagcggatcgtcgacctcgacggccgccgccacgcgcgaaagatgaatcacggcgtcgccgtaagagaacggcatggccgtattgacctgtgcgatgacggttttggcgcactccacggccgaaacggccagatcggccgatacgccgaacgagcagtaaccctcctcgttggggcgcgaaaggttgaggatcgccacgtcgacgggcagcgtgccgtcgcggaaaagccccggaatctcacccagaaaagccgggatcgactggccgtaacctgcggccagccagcgtcggatgttgttagcgacgaaaaggctgtttacgaggaacgtgtctttgtattcgggtctgcaatagggggcatcggcccgtccgacggcgaatccggagtagatctttacgtcggtgagttcatcggcacggtcggtcatggcttggaccagcacttcgggaatcgaggtgctgccctgaatgtagacgctactgtgcgatcggatgagctttgcggcttcggcggctgtcgtgaattgcataggcttatcggtggttttgcccgaaggcggttagtctggcttccaagaggtcgaactgttcggggcggttgagctgcgagacgcagacgcggattcccggctggcggctgccggtcgtggtgagcgaaatggcgcagatgccgtagagcagcagttcgctcagcagctccgagctggtcagatcgccgtagccgaccgtgtagaagaatccgtcgcttaccgcctcgttctgatccttgtcgtagacgatgcggaaaccgtggcgcaggaacagctccttggtcagtcgtgcgcggcgtgcgtattccgacgtttcggccacgaaatccagccggccgtcggccgcggcgcggaacatggccgcgagggcgtactgggccgaatggctcgtgcccgacgatgccgcatagaggatcgtcagcacataggcgtcgcccagacgggccatgccgtaacgctcccggagcgcgggatactggcgggtgtagagcgcgtcggagatcgccgcgacggcgatgcgctgtccggcgtagctgaatatcttcgacccggagatcatcaggatataattctgcgtataacgggcgacgctggactgatagggcgcttcgaaaggccgtcccagcggtttgcggaagtccatgcagaggtaggccagatcctcgatgacgatggcgtcgtacctgctcgctagttcgccgacggtgcgcagctcctcttccgtgagacatatccatgccggattgttggggttggagtagacgatggccgccacgtcgccctgcgcgaggtagctttccagcttgggacccagcttttcggcgcggtactcgtagatgtcgaacgacgcgtgcgggatattgaggatatgcacctgattgcgctgtacggggaatccggggtcgatgaagaggattttgttctttttcgggtccagctgcgagcagagcaggaacagtgtgaaactgccctgcatcgagccgacggtcggaatgcagccttgcggtgcaatgccgatgtcgaggaacgcgcggatgaaacgcgaagcctgctccttcagttccggaatgccggacatgctggggtactgcgacgccacgccctgccggagggctttgcattcggcttcgacgccgacctgttcgggcgggagtcccggaacgcccatttcgaggtgcaggaattccgttcccgtttcgttttccagtatgcgggcgatgtcgcccgactggcggatggtcgcctgtgcgatgtcggcgatgtccatgcgctccagcgcggagtcgagcacggagcggtcgagtggaagccgttccattattcggtctgtttttgtgcgtattggtatcctgcgcggaacgccgcgaggttcatctctacgatctcttgacctttgcgggcgaagatggcgcggatgccggcttcgagcttctcggcgtcgatgcccagaaacggcgccgctgcgcccagcagtacgatgttggcggcgcggggcgatgccgcgctcttggcaatggcgtccacgtcgagcgccacgacgtgcggcagtgcgtcgagctcgcgccggagggcttccgtatcgggatagttcgggatattgatcagcggcgcggtgttggtgattacccacccctccttcgaaagccacggcaggtagcgcagggcctccatcggttcgagcgaaatgatgatgtcggcgacgccccgcgcaatgaggtccgaagcgatttcgcccgacgcgatgcgcaggttcgactgtacgtcgccgccgcgctggctcatgccgtggacctcggcctgcttgatgctgaggcccgcgtcgagggccgctttgccgatgacggtggcgatcgagaggatgccctgtcctcccacgcccgaaagtatgatgtcctttttcataagtgttccgttgtttgctggttggtgttcgttgccgcgttttttcctgttgcgtgtttgccgccgtcggtaccgtcggccctattgtttctgtttggcggcgttgtggcgtttggcggtctggatgcactcgcggcgggggatgacgaccgaaaccccgtcgtaggcgatctcctcgcggagtatggctttcatctcttcccggtttttgggaaggggcaccacgacgcggatatgggccggatcgacgccgatgccggcgcatatctgctccagacggcccgtgccggccgaatcctgtccgccggtcatgcccgttgtcaggttgtccgagatgatgaccgtgatgttgctgcgctcgtttacggcgtccagcagtcccgtcatgcccgaatgggtgaaggtcgagtcgccgatgacggcgatcgacggatatacgcccgcgtcggcggctcctttggccatcgtgatcgaagcacccatatcgacgcaggtgtcgatggcgtggaacggggccagccagcccagcgtataacagcctatgtcgctgaataccttggcgttttcgtattcgtccgcaatctccttcaaagccgtgtagacgtcccggtggccgcagccctgacaaagggccggcggacgcggcacgacgatttggctggccgcgtgcgtggcgtgcggcgcgagtcccagtgcggcgcgcacgctgtcgggcgtaagctctccggtgcggggcagctggcccgtcatgcggccgcgaatatcgagcggtgcgggcaggataccgcgcacggcctgctcgacgacgggttgtccctcttcgatgatgagcagcgaaccgcactccgacgccatgcggcgtacgagtgaggccggaagcggatactgcgaaattttcagcacgggatgcggacagccgccgggataattctccgcgaggtagttgtgggcgatgccgcaggcgatgatgccgaccgatttgtcgggggcgtccgtatagcggttgaagcggctctcggcggcttcggtctcgaaccgggcgtagtcgtcgagcagcgtgttgtaccttacgcgcgaattgcccggcatcagcacccactggcgcgtttgggcggggtaggagcgttcgttctcggcgcggacaccggcgacttcgaccacggcccgcgaatgggccatgcgggtcgtcagacgcatcagtacgggaatacggtacttctccgagaagtcgaaggccgcctgcaccatgtcgtaggcctcctgctggttcgaaggttcgaaggtcggcacaagggcgaactggccgtaaaagcgcgagtcctgctcgttctgcgacgagtgcatcgaagggtcgtcggccgcgaccacgaccagcccgccgttggcgccggtcatcgccgaattgacgaatgcgtcggcggcgacgttcatgcccacgtgcttcatgcagaccagcgcccgttttccggcgaatgacatgccgagggcctcctccatggcggtcttttcattggccgaccaagtgcagtgcacgccgcgctcggcggtgagcggatgaccctgaatgaattcggttatttcggtcgagggcgtgcccggataggcatagacgcccgacagtccggcgtggagcgcgcccagtgcgagggcttcgtctccgagtagtaattcccgttgtgccataagatcgtgctgttatccaatttctacaaatctaagaaaattttaattaaaataccagaattaataacaaaaagttgtaaaatgattgatatttattttaaaatattagcaagaggcgtgaaggcggtccttcgtgtcgcggatattgcgagcggtttgacagttaatcggttttccgtgcttgcaatctctttggaattttttatttttgtggattgattttagagactggacccgattggaccgtgtaagccgaaatagggctgtagctttgtatgtcaaacgaacccttttgctgttcgctttgttgtccgtgtggagcgtgtcggcgcagaacggcacgctgcacctgcgtctggtcgatcgcgttacgcgggaaccggtcgtcggggccgtggccgaactgcgctcgcaggccgataccgcccggactcctttttatgcggcttccgacatcgacggggcggcgctgttgcagcgtgtgccggccggggcgtggcggctgcgcgtgacttcgctcggatacgaggctttggagcgcgagctgcggacttcgggcgggaaaaccgatctcggaacgctggagatgtcgcccggcgccgaagcgatcgagagcgtggtgctggaggtgcctgcgctgagatcgtcgattcgcggcgatacgctgagctaccgggcctcggcctacaaagtcacgttcggagccgacgccggggcgctgatcggcaagatgccggggctggaggtggccgacggcgttatcgaagcgcagggccggaccgtgcagcgggtgttcgtggacggccgcgagtttttcggcaacgacgtgatgtcggcagtccgcaacattccggccgatatggtcgaaagcatcgacgtctacaattcgcagggcgaccagtcggaatttacgggcgtggacatcggcgacggctatacggccatcaatatcgtgacgcagtccgacaagcggcgcggcgctttcggccgcctgttcgccgggtatggaatccctgacaaatatatcggcggcggcaatgtcaatatcttcaaccgggcgcggcggctgtcggtcatcgcgctggtgaacaatgtcaatatgcagaatttctcgtccgaggatattctggggacgacggagcaggggcaggccaacgcccgcagcggcagcggcaacttcatggtgcggccgctcgacggcgtctcgacggtgcaggccgtgggggcgaactacagcgacgagtggggcgaaaaggccaagattacggccagctatttcttcaatcgggccgacaaccgcaacggaagcctgaccgaccggcagaccttcacctcttcggaaaagctggtgctgtatgacggcgcgaccgatgcgcggatcgaaaatgtcaaccaccgcttcaattcgcgtttcgactacaaattcaacaaccgccattcgctgatgatgcgcacggcgttcagcgtgcaggattacctgctcgacaacgagaccttcagccgtaccgacaacaaattcgcggacgacgacatccgcttcgtgaaccgccgccgcaacttcgcgcacaacgacaatttcgggtacaacgtctccaacaacctgatttaccgttaccggctgccgggcaggaagctgcgcagcctgactttcggcgtcggcggccgatacagcggcggggagcagttcagcctgccgcggcagtataccttccgcgacccggacgacatcggggccgatacggctgcttacgacgcccgcagtatttcgcgtacgaaccgtgaacagcccggctattacgtcagcggaaacgcggcctacacccatgcgttcggccggcgttcgcgcatgagcgccgattaccgcgtgacttacgccgccaaccgggtgaaccgccggacggtgcttttcgacaataaaaccgggatgttcggcccggaacccgatccgcgccagtctacggattacgattacgactacctgacccagcgtgcggggctttcctaccagtatctttttaagaagaccaaggtcgcggcgtcggtctattaccagcatgtcgattttgggggcgactacacgctgcccgtgccggacaggacttcggcgtcgttcgacaacataacctacagcgtggtgggcaacatccatttcgaccgcagcaacctgctcaagatcgacgcagcgtcgcgcacgcggaatccccgcgccgccgatctccagagcatcgtcaataccaccaaccggcagcatgtctttgccggaaatccggggttgaagcccgtctatacgcatgatctttcggcgcagtatatccgttcgaacgccgccaagggccgcaccttcacgcttgtcgtgcggttttcggccagccccaatacgattgccgattcgctggtgatcgacacgccgcacttcgtcatcgacggcgacggcacggagctgggggagggcaaccagttcgtgcggccggtcaatctgccgggatactggaacctgcgcacgacgctcagctacggctttccggtgcagtggctgcgcagcaacctcaacgtcagggccggagttacgaccgggcgtattccgagcgtcatcaacggaacgcgcaaccgcctgaacggggattcgtacgacgccgggctgacgctggggagcaacatctcggaaagcgtcgatttcaaaatcggctatacgggctgttacaacgtgagccgtaacagttcgcagatccggaccgtggacaacgtctatgtcagccaatacctcacggccgacctgaattttgtgctgtgccgacggatcgtgctgcgcggcagcgccgactacaactattacaagggaatcaccgacacgttccgcgaggagcggctgatctgcaacctgcaggtcggatgcaaactcttccgcaggcggctgggcgaggtgaccgtcggcgtcaatgatctcttcgaccagaacggcacgaccttccgccgcacggtgacgggcacctacatccgcaacgtctcgaacctcggtctgggccgctatttccttgcccagttctcgtacaacctgcgcctgttcccgcgtcagggagccgccgtgacccgcatcttgcagcagggggcggaataaacacgccgatcagagtttttcgaccgaaaaaccggacgtcggagtcgtatttccggatttttcgctatatttgttcatacattcaaacaaagtaaggacaaatgaggcagaatcatctctctccggccctcctctgcggagttgcggccgccgttcccgcggcatgcgccgcgcagcagggggcgggcggcagggaatccgggcggcccaatatcgtctatatcatgaccgacgaccatgcttatcagactgtcggcgcctacgggcatccgatttcgcggctggcgccgatgcccaatatcgaccggctggcacgcgaaggaatgcttttccgcgaggcgttcgtcgaaaactcgatctcggcgccttcgcgggcgaccctgctgaccggcgtgtatagccatcgtcacggccagaccacgctcagctacggcattatggacacgacgctggtgcatttccccgaactgctccgggccgaaggctaccggacggcgatcttcggcaaatggcacctgagcgtcgaacccaagggcttcgatcattacgacctgctgtgggatcagggagagtattacaatccggtgatgcgcacgcccgaaaccggcggcaggtacgtccgtcaggagggatatgccaccgacatcattaccgaccacgctttggcgtggctcgacgggcacagggacgacgacgcgcctttctgcctgatgatccaccacaaggccccgcaccggaattggatggccgacctgaagtacctcgatctgtacgaggatgtcgagttcccggagccggaaacccttttcgacgattacgccacgcgcggcgaccagatgcgccagcagcagctgacgatcgaccgccacatgggatatgccttcgatttcaaggtggaggagctgaaggacgagccgactctgcaatacattcacgacagctgggatatcgccatgagcacgctgacgcccgaacagcgccgcgtgtgggacgactcctacggtcgtaagaaccgggactttctggccgaccgtcccgaagggaaggagctgctgcgctggaagtaccagcgttacatacacgattactgccgcacgatccgttcggtggacgaccagatcggccgggtgctcgactatctggaggaaagcggcctgatggacaacacgctgatcgtttacacctccgatcagggatttctgctgggcgaacacggtctctacgacaagcgtttcatgtatgaggagtcgttccgcacgccgctgatcatggcgtggcgcgggcatatccgccccggtacggtctgccgggagctggtgcagaatatcgactatgccccgacgctgctcgacgccgccggcgtcgcggtcccggacggaatggacggcgtttcgctgcaacccctgttccgtagcggaaaggcgcgcggctggcggacgtcgctctattaccaatattacgattatcccgccgtcggcagcgtgcgtgcgcattacggcatccggaccgatcgttacaaactgatccattggttcggtccgggggcggacggcgaccccgacatcgacttctgggagctgtacgacctgcggaaagacccctgcgaggtgcataatgtttacgaggagcgcggatacctccctattcgccgggagctggcgcggctgttggccgaaaaacgcggcgagttgggaatcagatagttggtttgcatgtcggttgataaggacattcggaaaatcctttccggatgtcctgttctcatgtccggtcgtaaaacacgcttccatgcacctgccgtctgccgttccggtcgctgtatttatgtgagtacattgaaacgcttctattttgctattattccccgatttgcagccgtattgccgaatggacgccgccgaaaaatatcgcatgtgcatactatgtataatcaaataaatgtcgtatatttgtattacgataataaatagcgcaatgaaacttcgactcgacccgaactccacccagccgctgcatcagcaggcggaagacctgctgcgcacgatgattcagcaggaggagtataaaaaaggcaagctgctgcccaatgaggtggaactctccaaagaactgaacatatcccgcaatacgcttcggcaggccatcaaccggctggttttcgaaggactgcttatccgcaagaagggttacggcacgactgttgcgccgcagaacgtgatgagcaatgcccgcaattggatgagtttttcgcaggagatgcacgcgcagggaatggtggtgcagaatttcgaactgcatatcagccgcaaacacccttcgcaggaggcggctgcgtttctgaacgctcccgaagggacgaaactgctctgtctggagcgtttgcgcggacgtccgggactgccgttcgtctatttcatctcctatttcaatccggcgattccgatgacgggcgaggaggatatggctatgccgctgtatgagaacctgcagaagaattacggcatcgtcgtcaagacttcgcgcgagcagatctatgcccgtgcggcgagtcccgatctggccgacaagctcgatatcagcgaaggcgcgccgattctcgtgcgcaaacgcttcgtgctcgacataaacgacaaacccgtcgaatacaacatcggctattaccgggctgacagctttacctattcgatcgagttcaccaacgattgacggcgcggcggctgaatccggcggtggcaactgagacggcaggatgcgggtctgcggtgcgcggctgaaatggcggcgcggccgagactgcgggatcggtatcggatgcggccgaaacggcagtgtggctgcaacggcgggacggtgtccggtatggctgaatccggcggtgcagagacagaccgggcgccgggttggtctgtaagacgctccggagtgtcggactcggtctttgcggcggggcgttccgtagggaggtcatggaccgcggagcaggccaatagacaatacgaataaaggcggaacattgttccgcctttattcttgtccgtatctccggggttatttcagaccccagctcttgttgggttcgggtcccatttcgagaaccagctccccgccctgcagcagctccgaagccgggaagtggaacgtgtcgagctgtctgccgttcaggcgggcgctctgcacgtagatgtttctgcgcgaagcgttgtgggccttgatggtgaactttttgccgcggccgtaacgttcgccgaggtcgatcgtcacctcttcgaagatcgggcttgcgatttcgtaaaccggatccacgcggcatccgccgtcggtctggaacagaccgatcgaggtcatgatcgcccatgcgctcatctgtccctgatcctcgtcgccgaggtaggcgttggcgatgccgtaaccgtagtagcggtcgaggatcgagcggctccagcgttgggtgtgccacggcgtgtcggcgtagttgaacaggaatgcgaagtgcatcgactgctggttgccctgcacgacgggatgatcccaatactggtcgttcggggcgttgtaacgccacgcctcgtcctgattgaagccccagagcaggcggtcggtgaagcgctgcttgccgatcttctcgaccagcgccgggacgtcctgcggtacgaagaaggtgagctgccatgcgttgccttcgacgtagtgctggttggcgccgctgcggaagggatcgaagttttcgagccattggcccttgctgtcgcgcatgtggcagtatccctcgtcgctgatgacgttgcgccaccagtagccgcggtcgttgaacgtgcggtaggtcttttcgtcgccgagcgccttggccagctggcctacggtccagtcgtcgtaggagtattccatcgtattcgagaagcggcccttgtcgtaggggacgtagtggtgttccatgtaggcggtcaggtcgcggttgccggcgaagcccttgaataccttctgcgccggggtggtctgcatcttgaccgaagcttcgagcgccttcttggcgtcgaagtcgcggatgcccatctgccatgcgctgacgatcagcggaatttcgtgttcgccgaccatgacgggaatgtagttcatgcctgcggggcctttggccagccagccgttggcgtcgtacatcgccagctgcgagttgacccagcggctgctccattcgggcgtcacgaggttccagaactggttgaggttccagaacgtgttccagaatgcgtcgcagcccagcatgacgtcttccgagggatcggccacggtgtgtactttgccgtcggtcgaaacccactggccgtttacgtcgctccacgtgttgcggctgcagatcgcacggtacatgttgttgtagaaacggaccttttcgagccggtcgttggtctttacagtcaggcggctgaacaggtcgttccatgtgtccacctgattccggcgtacggcctcgaaatcccagccgaaaggttcggtgacttcggcggcgaggttctgcgcggcgttttcgacgctgacgagcgagatgcccgaacgtacctgcacgacgggattccgcacgggatcgaactccacgaacaggcctgcgtatttgcaggggccgctgctgagctcccggatgtcgttggcgacgacgtcgtctttccaactgcccacgcggaggatcggacggtcgaattcgacgacgaagtgcagtacgtagtcctgatcggcgtcgtggctccatacgcccggcgagaactggtggcacgaaccctcgatgcggcgctctccgacccgcttcaccgagacgtttttgagctggatgccgtactcggtttcgggatgcagctcgatcaggatacggcccgtgccgcggtctgcggggaaggtgaaacgctcgaagccgcagcgtgtcgtggccgtcacttcggccttgatgccgtagtcggtcaggtcggcgctgtaatagccgatgtcggcccgctcggtgcgcttgtcgatgcgcgagcggtagccttcgtcgggcttctgttcgtcgccgacgcgggttttcagctcgccgtttgcggccatgatgcccagtcctccgagcgtccactcgtggatgtggctgaaacagccgatattctcgaacgagggctggtagccggcctgccatcccgtattctggttgtcggggctcatcttgaccatgctgaacggcatccacggtcccggcgcgatcatccagcgcgagtgggccgtgccgatgcgcgtatctacgtaatcggccggcgtctggagcttttgcggcgtgcgtacgacgctgccccgtgctatttcacggccgtcgcaaagaatccggtaagcgctctttttggctttcttcacctgcggcatcggggcttcgagctggtagcggcccgtttcgatgcggtggttcagtatctctttgccgtcgagttcgacgctgagcgcgggtgcgccttcgagccattcgagatcgaccagcaggggctggacgcgtcgtttgccgtcggccagttcatagggagcggcctcgatgttgcggatgaagagctgctgcggctgttccacgttcgtgccggcagggccttcgaggctcacgcggtcgaaaagtatccacgagccttccagcacggtgatcgtcacctcgttgccgccggccttgagtacgccgggacggatcgggatttcgagccggcggggcgtcgctttggcgagattgcccgtgatcgacagcgtatcgacgatcttttccatctggttgggcttgcgttggtcggcgacgctgagtcccggagcgtcgagctggaacttggcgtcctgcgtattgaccgaaacctttaccagcggcaggaagtttttggcgtaatcgagcagatcgacgacgagcgtgcaggttccgtcggagggaatctctttcaggccgaagaggatattgacctgatgcgtgcgccagcccgacgtgggccatgtgccgccccacgtgtcggcaggtccgggcaggacgtaggggaaatcggcggcgggaacggagtgcccgacgaggaaatatttgtcttcatagccgaaatcgttggcgaggaagtcgcggaagcggtccggagccagtgcgaattcggacgccgaccggtcggcctgtcccaccgtccatataaccgaaggagattgctccgcagccgttgccgccgtggcgagaaggcatgctgcaattcccgaaaacaatgtttttctcatggtttgggtttgttggttgattaaatgttcatacaattttggcgtaaaataaacaaaattttcgtgtaaatgcaaatttcagctcttttttgctcggaaaagttgaatttgccgctgttttatggtttttattgtaggtacatatgtgcgctccctgccgcctgaaacaggcgtctgccggtgtttacctattattatatatggaaaaggcggttgctgtccgggcttcgctctcggaatgcggataattcgccgttggcggatatgttgtcgcagtacggctgttttgcgcgtgacggcggtcggcgttatggtttccgacatcggacatgcccgattgtccgtcggtgcaaaacccggtcgtctacaaggcgttaagcctcccgccggaatcttcggccgcagagggtgtggtatgtttctgctatgtattttattgtttgcacaataatcggtctgacatgtccggtcttttgggatagagcgtgcttgatacgtttgtttgtgtttaatatattgaaatacaatattttatgtttcttgttcgtctgcgtcatatggtgcgtttgaaaaattatttgaaattttttcgcttgaaacaaacagaatacggaaaatatttttacatttgcgatgtggtaatgtatggacatatgtgaaaacaacccgacatatgtctttccggcctgccggatacgtataacgactaacctgtagaaatgaagaagttactccttttatggctcctgacgctggcgacgaccgccgccgtgcatgcgcagcgtgtcgaagtctatcgccagttgccttccgaccaaattacggcgtcggccagttcgacgctcaggggctcgtccgccgcggctgcggtcgacggcgccggcatgcggggcgacctgcacgaagccaacaatctggggcatggcatgtgggtgtcgcaggcttcggccggaacggtgcgttacagcccctcgacgcgcgaaggggtagtgtggttcctctgtcaggtgggcgataagaattcccccccccgtcaaatcgaccagatccgcatatggaatcataaccagaacgaacacacccgccgcggactgaacaaagtatatgtcgagtattcggccgacggccaaacgtggcagctgctgcccgacggacggctcgactaccacgtcattccggagtcggtggggcgcaatcccgaaccggccgaccttatcctgaacacaccgggcctgaaagcccgctatatctgttttacggcagctgccggcggcgagggcaaccactacgaccgcaacgatccggtcgtcatgcgcgaagcggccgacatgcaccagaatcccgattattacgggctggccgaaatccgtttctatacgaaggagcgcaccgacgtacgcacgctggctcccgtttcggagctgtcgctcgcggcttcgcagggctatctgaaaacgcccgaagggccgtcgcgcgaattcaccctgcgcttcgacaatccgatatatgccggggccgacctcgcgttcgaatgcggcggccgtacgtggagcgccgaaatcgcaccttcgggcgtcggcgtcgtgcgttacgacggccttttcccggcgggatacatggaggagacggcgaagttcgacgtgcgtctgacgagccgtcagggaaccgtcgaaaagcgtttcgaggtgcctgccgcccgcaaatggaccgtcaatttcctctcccattcgcatcaggacatcggctacacgcaccgtcagatggacgtgatgaagcttcagtggcgcaatctggagcgtgcgatggacctcgccgagcggacgaaggattatcccgaaggcgcccgttactgctggaataccgaagcgacgtggtcgatcgccgggtatctcgaagcctatgccggaaccgacaaggccgcacggctgattcaggccgtacgcgacggcgtaatcaacatcgacgccccgctgggcagtatcctgacgggcatctgccgtcaggaggagttgatgcacatgttcgacgacgcgcaccggcttgcccgtgaaatcggcgtggaggtgaatacggcgatgatgagcgacgttcccggacaggtctggggacttgccaccgccatgtccaaaaacggcgtgaagtactactcgccgggtcccaattacgtgcctttctacggaaagatcggcaacgaccgcgccgcggccctgcacgtcgaatggggcgaccggcccttctactggcagtcgcagtcgggaaccgacaaggtgctggtgtggcaggccggacgcggctattcgtggtttcacggctggctggccggacgcctttcggtgtgcggggtggagccgatctggaactacctgcaggagctggagaccgacgaatttccctataacacctgttatctgcgctacacggtccacggcgacaacggacctcccgacgagctgatgcccgacgtgatccgcgcgtggaacgagcgttacgattcgccgcagttccgcatcacgacgaccaaggaattctttaaggcattcgaagagcagtacggcgaatacctgcccacctacgggggcgacatgaccccgacgtgggaggacggcgcctcctcgacggcccgcgaaacggcgatgaaccgcgagagcgccgcccgtctgacccgtaccgaaattctctggagcatgctttctcccgaaagcgactatcctgcccgtgaacttgccgaggcgtggaagaatgtgctgctcttttccgaacatacgtggggcgcatcggccagcggtcccgatccctactcgcagtttacgaaagacttgtgggccggcaagaagatgtacgccgacagcgccgacgtgcagtcgcgccgtctctgcgacgaggcgatggccggcataacggccggcgaggggtatgttcaggtgctcaatacgaacctctggccccgtacggacgtcgtgaccgtggcggccgacctgaccggcaagcggctgctcgctccttcgggagagccggtcgccgttcagcgcctgcacgacggcggctggatcttccttgccgaggaggtgcccgcgctttcgtcgtccgtttaccggatcgttcctgccgcgcctgccgcgaaggcgaagaagagtcctgcggctccggtttcgatgatcggcggcaacgtgctcgacaacgggctggtgcgtgtcgcggtcgatccggcgaagggtacgatccgctcgctgaaggctgcgggcgccgattacgaatatgccgcaggcgaaggactcaacgattatatctattcgggccgcattgccgccgatccgcggggcatcgaccgggtgacgcgcgtcgaagtgctcgacgacggccccgtcgctgcgaccctgcgcatcgtctccgaggctcccggctgcaatgccctctggcgtgacgtgacggtttacaggggactcggccgcgtcgatatccgcaatacggtcgacaagcaggatattttggagcacgaaagcgtgcgtttcgtcttcccgttcaacttcgcgcatcccgaaatcacgatggacctcgccatgagcgagatgcaccccgaacgcgaacagctcgcgggcgtcaacaagcactactattcgctgctgaacggcatggccgtcggcgatctggagcatgccgtatgcctgaccaccctcgacgcgccgttcgtcgagctgggcacgccttcgggcgaagattatcggctcaatccccgtcacggctacggctggtggccctcggcgcagatttcgcccgtggtctattcgtgggtgatgaacaatacgtggcggacgaactacaaggcgtcgcagggcggcgtggccagcttccgttattcgctgcagatatgcgacccgttcgatctgaaactcaaacagcgcggcgccgaacgcgaacagcccctgatcgccgtcgaaagcggcagggccgaacctgtcggccggctgttccggctcgaaggccgcaaccggatcgccgtgtcgggcatcgcgccctcggcggacgggacgggctatatcgtgcgtctgcagaacatgggcgatcaaagcgtgcattccgcattcgtctggggccggatgaaggcccgccgggtgagcgtctgcgactaccgcgaacagcccctcgcgccgttcgacgaccgctccttctggatgaaacccttcgagtacctgatgctcaaagtcgaaaccgaataactcaaactacctatgaatagactctttttatccctgatttccttggcggcctgcatgacctcctgcacgtcgcccgaaccgctgaccgactatgtcgatccccgtatcggaacggcccattcgcgctggttcttcttcacgcccgcggcggtgccgttcggcatggcgaaactggcgccgaccaccgacggccacctcggaaatcccggcggctggcaggccgtgggctacgatgcccgccatacttcgatcgaaggtttcgccaatttccacgaatttcaggtgggcggcgtggtgatcgccccgaccgtcggcgcgctgcagaccgttcccggtcccctcgacgatccggaggcgggttaccgttcgcgcttcgacaagaaagacgaggtggcccggccgggctattactccgtactgctgaaagactacggcgtgaaagccgaactgacggctaccgagcgcgtcggtttccaccgttataccttccccgcttcggaggaggccaacctgatcttcaacatcggcacgaagatgggcgaaagcggtcctgcgcgcgacgcttcggtgaccttcaccgaggacggccgtatcgagggctgggtggtgaccgaacccgtctatgtggacatttatcagaagggcgccgtcgtgaagatgtatttcagcgccctcgtggatgccgaacctgcgtcgtggggcgccttctgcggcgaggaggtttttgccggtgagcggagccgtacgggcgtgggcgccggcgtgtacctgcgtttcgatacccgtgcgcgtcgggacgtcggcgtgaagatcggcctgtcgtatacgtcggtcgagaacgcccgcctgaacatgcaggccgaagccgccgatctggatttcgacggggcgctcttggccgcaaacgaagcatgggaagaggcgctcggacgcatccgcgtcgagggcggcaaacgggaggaccgggtcaaattctatacgggtctgttccatgccgtgctgggacgcggtctggccagcgacgtgaacggggcctatcccgcgaacgacggaaccgtcgggcagattccgctcgaccccgccggcaatccgctgcataaccattataataccgatgccatctggggcggattctggaacctgacccagttgtggagcatcgcctatcccgaatattacgccgactggatttcgagccagctgctggtttacaaggacgccggctggctgggcgacggcatcgcatgcagcaagtatgtttcgggcgtgggcaccaactttacgggtctcgccatcgcggcggcctacaactgcggcatccgcaatttcgacgtggcgctcggctacgaagccgccctcaagaacgaactgggcagcgaaggccgtcccgcgggagccggcaagctggatgtggggcagttcgtcgagcgcggctattcgccctattcgacggagctgcacatgcagaccacgccccgcggttcgggtttctcggcttcgcatacgctcgaatattcgttcagcgcctatgccgtggcccagatggcccgccagctgggacatgaagccgattacgaacggctttcgaagctctccgaagggtggaaactgctcttcgatcccgaaaccaaactgatgcgtccgcgcgacgagcagggccggtttatcgccgacttcgatccctatgcgccgtgggtgggctttcaggagggcaacgccgtacagtacacctattatgttccccacgatatcgaccgtctggtggagatggtcggccgcgaggagttcaacaaccggcttgacagcacgttccttatttcgcgcgaaaatatcttcggcggcggcaagaccatcgacgccttcgcgggactgcacacctactacaaccacggcaaccagccgaacctccatatttcgggcctgttcaacttttcgggcaagccgtggctctcgcagaagtggatgcgcacgatctgcaacgaattctacggtacggaggagattcacggctacggctacggacaggacgaggatcagggacagctgggcgcatggtacgtcatggcttcgatgggactcttcgacgtgaagggcctgacggctcccgatccgtcgttccagctctgcagcccgctgttcgacaaggttacgatcagcctgaatcccgattattacgaaggccgcgaattcgtgatcgagaccgcgggcaacgctccggaaaactgctatatcggttctgcgcagctcgacggcaaacccctgacgggcgtacagctgcctttcgcggacgtggtgcgcggcggccgtctgaaaatcacgctcgcttcggaacccaatacgtcgcttacggaatagcaacgccaattagacctaattataaaccgcttatgttgaaaaaggaaatctgaattcccggctccggccggaccccgtgtcgggccggagttttttgaacccaaccacttaaaaacaaaacgtatgaaaattagtactaacttcttgaacctgctgaaggtttgtatgtgcgtggtgttggctttcgcggccctcgaaacccgcgcgcaaggggagtcctttacggtatcgggtaccgtcaaggatgcttccgggcagccggtgatcggagctacggtcttcgacaccacgacccaaaagggagatgtaacgagtacgacgggcagcttctcgctgcaggctgctcccggctcggtgctgagggtgagcttcgtcggatacgccgagcagtcggccaaagtcgtagccggaaagaccacctatgatttcgtgctggagagcgacgccctcgaaatcgaggagctggtcgtcgtaggttacggcacccagaagaaagcctcccttacgggagccatctcggccatcaacaacgaagagatcatcacgaccaagaacgagaacgtccagaacatgctgaccggtaaggtcgcgggactccgcgtgagacagaactccagcgaaccgggccagttcaatacctcgatggacatccgcggcttcggcgctccgcttatcgtgatcgacggtgtgccgcgcgacaacatggcgcggctcgatcccgaagatatcgagcaggtttcggtgctgaaggatgcgtcggcagccatctacggcgtgaagggcggtaacggcgtcgtgcttatcaccaccaagaaaggcgacaagggcagggtcaatatcaattattcgggcaacatatcgtggcagcgtccctcgaacttccccgacctcgtggatgcggccgactggatgacgctctacaacgagaaatacacgatgcactccgtagacaacatgtcgcctgttccgcagtacagtcaggaggatatcgccgcctaccgcaacggcgagaagaagtcctacaactggaaagatgccgtcttccgcaattcggcgccccagacgcagcatacggtgagcgccagcggcggcaacgacaaggtcaccttctataccagtctcggttaccagtatcaggagagcttcctgcagcacacgcctattacctatgacaagtacacgctgcgcgccaacatcaacgcgaagatcgccaagaacctgaccctcgacgtcaacctcgcaggtcatatggatgaaaagaagatgagcaacttctcctcttcggacatcgtgcgtagcacgtggctcttcaccccgctcgatccgttctactatgacgacgagcagaccatgtaccataccaaggacgacaacacgggcatcgtcaacccgctggccatgatcgacaaggacgccaacggataccagagcctgatcagccgttggttccagtctgccttctcgctgcgctgggacatgccgttcctgccgggactgtatgccaagggcttcttcagctacgactatatcatgaacgacaacaagttctacagaaaggcgttcaatacttatacctccaccggagccgcgaccagtttcctgaagggggacgcacacgattatttcgtgcagcgcaactattacggcaaggaacatcgccagtggcacgtgcaggtgggctatgaccgcaccttcggccgtcactccgtatcgggcatgctgctcttcgaggatcagcacaaggtgggcgacaacttctacggcagccgcgaagtggtgttgcctatggatcaggtgtttgtcggcgacggcgaaacgcagcagttcaaccagtcgtcaggcggcggttcgctttacgactatgcctaccagtcgctggccggccgtttcaactacgacttcggcggcaagtacctcgccgaattcgtcttccgctacgacgcatcgtcgcgcttcccgtcgggcgacctgcgctgggtattcttcccctcggtatccgtcggatggcgtatttcggaggaaaacttctggaaagagtcttcgctcgacttcatcgagaacctgaaaatccgtgcgtcgtacggtaagacgggtgacgacagcggcctatactacgagttcctgacgggcttcacttatccctccggaggagcgatcctcggcggcgattatatcaatggctccgtacccaaagacattgccaacaaaagaatcacttggtatactcttaaaacacttgacatcggtttggatttcagcgcatggaacggcaaactcggcctgaccttcgactatttccgccggcactgtgacggactctatgccagacgaaatctgagccttccgggcagcgtgggcgcgagtctgccgctggaaaacctcaacagcgaccgggataccggtttcgagcttgagttgagccaccgcaaccgcgtcggcgatttctcctatgcggtcaagggcaatgtttcgttcacgcgccgcaagacgctctactacgagcgtgccgagtcgggcaactcctacctgaactggcgtcagaacaacaacgaccgtttcaacagcatctggtggggttacggcgaaggcgggcgtatcaccagctgggatcagttgtactacaatcccgtctatatcggccgcggtagcgtgatgggagactatctctacgaggactggaacggcgacggctggatcaacgatctggacgtacacccgatcggctacacggatatggttccgatggtcaatttcggtctgacgatcagcgcatcgtggaaaggaatcgacttctcgatgctctggcagggttcgggcaaccgttacatcatcgcccgcgagtttctgcaggagccgctctggtcgcgtaccaacgccatcagcgaacacatggaccgctggcatccggccgatccgacggccaatccctacgatcccgccacgaagtgggtcgccggcgaatacggctatacaggctcgacggcaaatcccaactcggagcatgggttgcagaatgcccgctacctgcgtctgaagaacctcgaaatcggttattcgctgcccaagaagtggctgacgaaggtgggtatcgagaatgtccggatctacgccagcgcttacaacctgctgacgatcaccggtctggattatctcgacccggagttctacattcatccgtcggatggcggggccagcaatatgggatacttctatccgatcaacaagacctatactatcggactgaacgtcaaattctaaaaaagcaaaaaaatgaaacgtctgaaatattatctcctgattctttgtgcgggcgcattcgccgcgtgcaccgatttggatataccgccgaaaaatatttttaacgaacaggatatcttcggcaacgtcgagggtgcgacgagttacctcgcacgcttgtacggcgtcttgcccatggaggatttccggtatagtttcgaacacggcttcggctattcgggcgccatgtaccgccagatgtgctgcgccacgggcgaagccgtaggacgcgacacgcagggattcttcgccgaacccggcagcaacatgtgggacgccgcttacaaaatgatccgcgaaatcaacctgcttatcgaggggcttccgaaatacaaaagcggattttcggacagcgattacaatacggtcttaggcgaggcctatttcatccgcgcctatgtgtacttcgcaatggtcaagcggctgggcggtgttccgaagatcgattacgtgatcgattatccggccaacgcgacgctggaggatacgtggactccccgtgcctccgaagaggagtgctgggactttatcggacaggatctcgatgcggccatcgccagcctgcccgacaagaacgcttccggccgtgctacccgctatgccgcggcagctctcaagtcgcgcgccatgctctatgccggttcgatcgccaagtacaataccgtcaacgaagaacacctcggcaagcgtatctgcggcattcccgccgaacgggccgccggttatttcgaagcggcttacaaagcctcgaaaatcgtggacgagggcggttattcgctctacaaggccaagtgggctgccggtaaccgcgacgctcaggccgagaacttcgctgcactgttcctcgacgaaagcagcgccaacaccgagaccatcttcgcccgctattacaaggagaaattcctgacgcacgactacgacaactcggtgcagccgcgctcgacctcgacgggcggcaacgactcggaggtaagccccacggtcgatttcatcgagatgttcgacggcgtcgagctggatgccgacggcaagttcgggttcctcgacgaaaacggctattacaagctctacgacaacccgatggacgccttcgccaacgccgagccgcgcctgctgggtacggtcatcctccccatgtcgaagttcaaggatcagtatatcgaaatccgccgcggtctctacaccggcaaggtggaagagggcaaaggtatctcgcgtctgatcaaggagggcgagaccgcggcctacgaaacgctgggactcaaagacgtgcagctgaccggaaacttcaacggcggtcctgccgtccagctcaagacgccctatactccctatccgggggctacgcccgtcacgtcgatgctcatcacgggtctcaacggtccggtgaacggctggaacttcggcaacatcggcggcacctacctgcgcaagtacctcgatcccgatctggagaataattcgggcggcaaatccacgcagcactggatcgacatccgctatgccgaggtgctgctcaaccgtgccgaagccgcctacgagctgactcagctcggcaagacgacctccgaagagggtgacagctaccgcgacgaggctttccgctgcatcaacctcatccgcgaacgggcgggcgccgatctgctggcatcggccgccgacctcaattcggtcgatatcgtacgccgcgaacgccgcaaggagctggccttcgagaaccagacctattgggacctccgccgctggcgcatcttctacgacgagcagaataccacgcgctatcgtatcctgatgcccttcttcgcaacggacgtcaacaagtacttcttcgacgtacgttttaccgagccacgatccgggcatagctacatcttcacctacgacacccgctactattaccagccgctgccgtcgggcgaactgaccaagaaccccaacctcaagaataaccccggtttctaatccggacagcataaaaaccgatcgatatgaaaaagtatatatatcttttgctcttttcgctgccgctgcttgcagcttcgtgcagcaaggacaattacgacgagccgcaggagactttccgcggaaagttcatcgacaagcagacgggcgagccgttccagacggccatcggcaatacgggtatccgtatccgcatgatggagtacagctggagcgacaacccccagccctatgacatgaacgtcaagatggacggtacgttcaacaacaccaaggttttcaagggcgagtacggcatcaccccttcgggcgcgttcgtgccgctggaagaggagcggatcaagatttcgggcactgtcgagaagacttgggaagtcgaacccctgctgcgtgtggagtgggtcggagagccggtggtgaatgccgacggaactgtggacgtgaaggtgaaggtttcccgcggtacggacaatcccgactatcaggaggcgctggccgaagcatggctgttcgtgagcgagaacatgtatgtcggggatttcagctacagccccaactattcgacccgtatctccggtgcggctatcggcatggtgcagttcgatcaggtctataccatccgtacgggacagccgggaggttataatcccgccggcacctatacgccgttcccggccttttcgcggaagtatttcctgcggttcggcgcgcggacgacgcggcagttcgacggtaccaaccgttacaattacacgactgtcaaggagattaccacgattgcccgttagttaggttcaggatgccgggttccggaggcgtattgtctccggaactgcggcgcccgataaggaaaatttttacggatacgatgatatcgaacgacatggaacgttacgccgtcggcgctgacataggcggcagtcatatttgttcggccgtggtcgatctgacgacgggtgaaatctgcggagagcctctctccggcaaggtcgattgcgacgccggcgccggggagatactcggcgcatgggcggacaatatccggcagagtatcgcggcttccggcctgaaggccgtgcgccgggtgggattcgccttccccggcccgttcgactacgaacacggcgtttcgctgattcggggcgtcaataaattcgagcggatctacggactcgacatttcggagtcgctttttccgctgctgcggcggtccggagccgaagagttccgctatgtcaacgacgcttcggcctttgcgctgggcgagtgtctcggcggcgcggcgtgcgatgcccggcgcgtggtggcgctcacgctcggaacaggcgtcgggtcgggtttcgtatccgaccgtaaactggtgacttcgggcgatgaggtgcctgccgacggctgggtctactgcctgccgttcggcggcggaatcgtggatgaagccttctcgacgcgcggaattatccgccgttacgaagagctgaccggcgagaccctgaccggtgcgcgggatgtcgccgcccggtacgacgccgatccggctgcgcgccgtcttttcgacgtctacggcgaagagctggcgcagttcgcgggtccggtccttacccgtttcaacgcggacgtattggtgctcggcggaaatatttcgcgggcttatccgcttttcggacccgccttggagcggcgtttcgccgcggacggaatccgtgtcgcggtccgcacttcggccctgctcgaccatgcggccatgattggtgctgcttcgttatttttataattttagatatgactcttttaagaaaaaccacacagtttgtacttcccgtcgagaagccggaaacaggcgtaaaccaatacgacatctatccggcgcacgatctgggcgaggagaaaatcttttgcgattatatgtcgctggcgcgtcggatcgccggatcgaaacgggtgattatcgacggttacgtcggcgtccgtttcgatattttcagccgtgaactgaacaaggccctcgaaacgctcggcatccggcccgtctggtggaacacgggtgcggccatgaaggagcctgccgagatcgaccgtctgatcgaaccctatctgggcggcgacgatccgatcttcggattccggactccgctccggctcgaagagttcttcgaccgggagaagctggaccggatacgtcccgacgacgctgcccggatgaacatcctgatcggtatcggcgcttcgcttgccggctgggacggcctgctgctctatatcgacattccgaagaacgagattcagttccgctcgcgtgcgggcagcatcacgaatctgggagccgctgcggccgatgcgccgaagaagatgtacaagcgtttctacttcgtggactgggtggtgctcaaccgtcataagaaggcgttgctgccgaaaatcgacgtgatgatcgacggccagcgcgagacggagattacgtggaccgaaggagccgatctgcgccgcggtctggaccgtctcgccggcaacggattccgtgtgcgtccgtggttcgagcccggagcgtggggaggacagtggatccgcaaccacatcgaggcgctgccgcacgacgtgcccaactacgcatggtcgttcgagctgatcgtgcccgaaaacggcctgatcttccgcagcagcgggcggatgctcgaagtctcgttcgatacggtgatgtttcaggccggcgagcgggtcgtgggaaaggagtgctacggtctctacggcgacgaatttccgatccgtatggactacctcgataacttcgacggcggcaacctctcgatccagtgtcatccgcagcgcgagtatatccgcaagaatttcggcgaggtgctgacgcaggaggagacctattacatcctcgacacgacgccggattcggtcgtgtacctcggtttcaaggaggatatcgtaccggagaagttcgaacaggccctgaccgaaagtttcgagaaggggacggagcttgacgtgaacaagtacgtcaatgcggaaccgtcggccaaacacgatcttttcctgatgcctccgggaacgcttcacagttcgggccgcaacaacctcgtgctggagatcagcaccacgccctacatcttcacgttcaagatgtacgactggctggcgctggacctcgacggcaaaccccgtccgctgaacatccgccgtgcgatggagaacctctgcttcgaccgcaagggcgaaacggtgaagcgcgaactgatcgcgcatcccgaactgctcgaaaagggcgccgactgggaactctggcacctgccgacgcaccgcaaccactcctacgacgtgcatcgctacaagctcgacacctcggtgaaggtgcagaccgaaggaaaatgccatgtgctgaatctggtcgaaggcgagagcgcccgcatcgagaccgcaggcggcgacagcttcccgatcagctatgccgagacgttcgtggtgtcggccgcggccggctcctaccggatcgtcaatacttcgggccgtgagatcatggtcgtgaaggcttttatgaaatagaacctttgcgctgtaaaatatcccgccatttcggcgggatattttctatttttttaaattggcgaacggacgcatcccattatatcgtcccttaaaagttcggatcaaatttgtttcgacatcggtagggtcatctgaaaataatggcatccaacagaataagagatcagcagcatctttcaattgccaaatataacgccctcctcgatggcctactgcctttccttgcccaaattgtagatattgtttcagccgacttcgaagtgttgttgaagaggaagcacctccggcttttccaatatagataacacaagcatcatttacccaatttgcacgtaatatgtcgagcggcacattggggcttttatcttgaaaatacccgcccgtgccttgttcgagaaactcaggtgcgacagtcgtggtacgcacgaccatatatacacccttgattctcggaatagctgaacaatccctccataaatgtgcaattggaataaagccggtgaatccggcttgttgcaaattttcaatcgttttaaaattgatagttgctattgtgtcagaattcgacacttgtgtttgagacttatttttctgttgtatcgtcttcgatggaacagttatatgcgatgcaatttcagatgcgacaactttaattagcccgcttttaattaatgcatcaaaatcatcaactgtacactttgggagattataatcacttatataaaatccgatttttcggagactatctcgaattcctttctgttgggtttttgagacattccgaagtcttttcaataactcgcgtatagtaactagctccgctgttgtaaataaatttttaccgttcatatattaatactctttaatcgtgaaaatattcatatatctcttcgtagtaatcttcgtataggttttgagggacgccatatattcgctcatccttggaccattcgaattcccgtaattgtcgccggggttcctcatcacggtaaataatcagacgacggttgtagtcgagttcttttatatcggttactgggcgtgacgagtcattatttatccatggattttcttgcacgaccggagtagaccgattgtaataatatacgatcaaacacataatgcaaaaaaataaaaatccacctaccaacaatcctagacatcctaccaaccgctttctcggcagttctataccaaaatcatcatccttcattttcgccatacttatcagtcttttttacgaaaataagaaatatatgacaatgcagaaatatatgttacgcaaaatagcgaatttcgcacattctccaaatcgttaccgtgacctctgaaaatcctcttaaagtctgtttgtcagattggtattcttatcaactgatttattaaaataagcaaccccgtccggattccggacggggttgtcgtttgatgcgtcagttacttttgaagcagggcggtaatgggatcgggcgtttcgatctttccgcagtcgatcgatgccagcagctgccgccctcggtcggtcagcgagaaatacatctggcgtttgtctgcagttcccagctcccgccttacgaattccttttcttcgaccgagcggagtactttcgacatgttcgaaggggtcagccccagcaggtcgctcaactctccgcaggagagccttccggccttcgagagactgcacagggtcatgccttcgttcaggcagattccgtacaaccgctccagattcgcttcgaactggtgtacggcccgctgcaggtcgcgtattctacacagtttgtccatactccggctttttgtgaacggcctgcctgccgcagtgcctgatacattttccgcattcgatacacttctgcgggtcgattgccggaagcccgtctcccagttgtgaaatcgctccgacggggcagaccggaatcagcggacagcggtggtcctgcggacagcggagttcgtcgatcgtaagcgccatagcccgcttatttattgaggagcaccttgtcgatcgcctctttcagcgaagccttgggcagggcgccctgcgccatctggggtttgccgtctttggggatgaacagcagcgtcggaatcgagcggatgccgaatgcggccgccagttcctgctcctcttcggtgttgatcttatagatgtagatgctgtccccgtattccgccgcaagttcctccagcacgggtgcgagggctttgcaggggccgcaccacgaagcgtagaaatcgacgagggcgggtttgtcgccgaggtatttccactcggtgggattggtttcgtaattggcgactttcgtcagaaagtcagctttggtcaatgcgatcgttttcatggtattcgtttgttttgtgttgtcattcttgttgtcggtttggccgtcggccccggctgcgaacgtcaggatgcaggcggctgtcactaatagtttcttcatggtccgtatggtattttatcttttcttatcttgataacgatacaaagatatgatatattttccaataaaacaaatttccaatggaaaataaatcaaggggagtaaaaatacgtttgtttcccgtggctatgcaaaaatgaaaccggaaatcgcctccagctccggattgcggctgaatctatcatccggtcggttcgtatagagtgcatgcctgcgcctgtctgtcttatgagacggcccctgtcttggggtgcatgaatgcatacgggggcggtggagcggggatgaccgatttcggtttacacttcggtttaaacaaatgtccgatttcgatacggaaatcgctctaaaccgagactcgaagaagtccgccgcatttttcatcggctctttaaatgcaagaaagagagccttttggactctctttccttgtgacaccgacaggactcaaacctgtaaccttctgatccgtagtcagatgctctattcaattaagctacggtgccgaattgcgagtgcaaatatagggcgaaaatccgaaactcgcaaattattgggcgtaattttgtgaaaaaagatgccctgaaaaatcgcatgccggcgcatcggaccgattgtcaggggtttgtccgctgacgatcaacgcattgcttcctccagccgggccttgatattttcgccgcgcaggtctctggcgacgataatcccctccggcgagatcaggaaattcgcgggaatcgacgaaatgccgtacatggcggctgcatcgcttcgcttgtctgcactcacgcccagcacattgatccatggcatgtcgttgtccgccacgaacgttttccatttggcggcgtcgttgtcgagcgaaacgccgtaaatttccaatcccttgcttttgcaggcggcgtatgcctcgcgcagatgcgggatttcccggcagcaggggccgcaccacgtcgcccagaagtcgagcaggacccagcggccgttgccgacgatccccgaaagcgtcgtcggttcgcctgcggcatcgggcaacgtgaggtccatgtagggtttgccgatctctgtgttttcggccgccgcgactttttcggcgatccgtttcagcgtcggatgcgcctgcatggcgggtgtgaagcattccagacgggccttggctgcggcgatgtcgttgccgtcgaattcgtagacggagaagaggtatgccccgaaaaggttgtccggattggctccgatgctttccggaaccagcttggtatatgctgcatagagcgagtcggccggtgcgtcggggggaagttcgcggaatttgcggtcgaagtcggccattcgttcgtcgaactcgcgttttttgtcgttcagcggcgtgccggataccgcgtaaacccgtctgtcgtccgtcggaaccgtgcggatgtcgcccggttcgaggaagatgacggcggtgccgacggggatgcgctcctgattggccagccgggcgatctccggttcggcgacacggccctgcagccggatcgtgctgtcggcgcatacgacgccggcggccagttccgtacggccgctgccgatcaggaataccgagtcgcccggttcgagtcctgcgttgcccgtgatggagtaattcggaccgccgcatccgcagaggaggacggccgtcgaagccgtgagaaggattttcttcatatgtcgttcggttgatgtcgaaaattagggtttgcggtgcggttacttgatctcccggtccgggtgctccctgaggaatttctcccagctttgggagccgcctttcgatgcggccttcttgccgccgcccaatcctttgacgcgctcgtcgcccatcgcggcattgagcggattggagatcgtgaagtggtggcagagcgccacggccatgccgtcggtggcgtcgagccgcttgggcggctgttccagcgaaaggatgcggcagacgatggcggcgacctgctccttggcggccgatccgcgtcccgtgatgctctgcttgatgcgcatcggggcatattccgaaacgggcaggccgcggctcagcgccgctgccatggccacgccctgcgcccggcccagtttgagcatcgactgcacgttctcgccgaagaacggcgattcgagcgccacttcgcgcggagcgtactggtcgatcagcgccccgacccgttcgaagatatagcgcagtttgacatagggatccgaaagcttgtgcaggtcgatgtcgcccaagacgaccgagcgcacgctgcgcccgtcgatctccagcacgccgtaacccatgtagttggtgccggggtcgatgcccatgatgcggtatttttccgttggggtcatatcgttcgaaaaagcccctccggacggcgtgtcgcagttcggaggggcaggttgtacggcggtggttatttgccgagcagctcctcgacttttttgtagaggtcttcgccgcgcaggttcttggcgacgatgttgcccgaagcgtcgatcaggaagttcgagggaatgccctgaacggcgtaatccttcgctgcgggattgtcgaaaccgttcaggtcgctgacctgaatccacttcatgccgttgtccttgacggcggcgagccacttgtcgcggttgttgtcgaacgacacgccgtagatttcgaagcccttcttgtggaacttgtcgtaggtctctttcaggtggggaacttcgcccatgcagggaccgcaccacgaagcccagaagtccacgagcgtgtatttgttggccggattctcgatcaccgaagtcagggtgacgatctgcccctcggcgtcgctctgcaggatgttgatgtagggctggcccacgtcggtgcgctttttctgctcggcggtggccttcagctccgtcagctctttggtctgctgcatttcgggcgagaatttggcgatctggtcgagaatctcctgccccgaaagctcgtaggccatgttcggcatcagcatgacgccgaagaagttgtcgcggttggcctctaccgaggtgcgggtcagctgctcgaactcctcttcgatcgcttcgcggcgctggtcggtggtcgcagcgtcgcggtactcggtgatcagcgcgcggctggcggccgtgtaggcttcggcggcgtcgttggccggggtgccggtggtgtggcgcacctgcggatcgtcggcgtcgctcttgatcgagatcgtacccggttcgaggatgagctgcatggcgaacgcctgcggctgtccgtcgcgcgagtcgagcaggtagtgcatcgcgggcgctccggcggggccgctgaaacggaatttacccgatttcacgacggccgagtcgatcaggctgtcctgctggaacaggtagacggtgccttcaagcccggcgatgtcgccttcgacgacgtatttgggctgcgtgctgcaactgcacagcacggctgcggaagctgcgaagagaaatgcttttttcattgtgcaagaatattggtttattttttgagttctgccagctgtttttccagattgtgcaccagtttttccagttcgggcagccgcttgaagaccgccgccgaacggtggtactgcatgccgggcagcgccggatagccgaagcgcacttcgccgtcgggcacgtccttgtccagtccgctcttcgaaccgatcttcacgaagtcgccgacgttcacgtggtcggcgataccgacctgtccggcgaggaagcagttgcggcccacccgcgaggtgccggcgatgccggtctgggccgaggatacggtgttttcgccgatctggacgttgtgtccgatctggatcaggttgtcgagcttgacgccccggcggatcaccgtcgaatcggtcttggcgcggtcgatgcaggtgttggccccgatctcgacgtcgtcttcgatcaccacgttgcccagctgcggaatcttgtcgaaaccgcccgcggcgttgggcatgaagccgaagccgtcggcgccgaccacggctcccgcgtgcaggatgcagttgcggccgatccggcagccttcgtataccttgactccggggtagaggatcgtgccttcgcccaccgtaacccccgctccgaggtaaacctgcggatagatctggcagtttttgccgattttcacgcctgcttcgattaccgtgaaatccccgatgtagcagtcggcgtccacctcggccttttcagcgaccgaagccagtttgctgatgccgctgcggcggggcttggcggcgttgtacatttcgagcagtttgagcacgcaggcggcggcgtcgtccaccttgatgagcgtggccgagacctgctgcgaaggttcgaacgaacggtttaccagcacgatcgatgcgcccgtgctgtagaggaacgtttcgtatttggggttggtgaggtaggtcagcgagcccgccttgccctcctcgatcgaagatacggtgtgtactttcgcctctttgtcgccgacgatgtcgccgcctaaaaatccggcgatcatttcggccgtgaattccatcataacgattctgtttataagtatttgtttatgtcgattcctttgggcatgaactcctccaccgaacggccgaacgaaagcacctcgcgcacggtcgacgaggatatgtcggccacgggcgagggggtgaagagcattacggtcgtgatgtcggggtagatgcggtggttggtcgcctccatcgtgcgctcgtactcgaagtcggtggtgttcctcacgccgcggatgatggcgcaggcgccggccttctcggcaaactcgcccgtaagtcccgtgtagatatgggcttcgacgcgcggattgccggcgtagaggtcgtcgatcagccgcttgcggttggcgacggtcagcagccccgttttcgcggtgttgttgccgatgccgatgaccacgcggtcgaagagattgagcgcttcgtctaccagcgcggcatggccgcgggtgaacgggtcgaacgatccggggaagattgcagtcctttccatatcggacaaaggtaataatatttaggaatcgggagttatcttttcccgatattttgtcctaccgttcgatttttacgtactccgaatagacgatccgcgtgtgcggattcgacgggacgatctcctgccgcagggctttcgtgccccagcggatgaagagaaaacgccgcggaatgcggtgtacgacctgccgcagggtgtcggtgctctccacgcggcataggaccgagtcggcggtgacggcgccttcgacacgcacccacgcgtcgcgccagcggaacagccgcagggtgtcgcggacgacgagcgtgtcgcgcagccgcacgacgaccgtatcgcgcaccggggtgcgtatctcgaccttcgtggccgtggctgtccgggccgcggcttccagacggcggagtttgattccgagccggcggatttcggcggcgtctgcggcccgcagctcttcgaattcggcgcagcgcagacgcagggcctgcaccgatgccgcctcctgccccagacacgtgcggtagcgttcgatgccggccgcaagggcgtgttggttctgggtcaggcggcggttttcgcggcggtagcggccgtagccgtataccagcagagccgtcacggcgacggcgtaaagaaacaggtattttttcatggtgaaacgggttttccggcgaagataacgccggctgctcccgttcggtttctacattttcggaaacagcccgccgagcgattgggcgacccgttccgcgagaatcgccatgcagggatgtccgtcgcagtgggcgagggcggtgacgccccggtgatcgacgtagaagagttcgtcgaagccgggcagttcaccgcgcattaccggacgctcttccagttcgagtcccgccgcctcgacggcccgtaggcccaattcccgttcgacgcaagcttccgccggggagacgaacgccgttttgccccgcacggcgaacagcggggcgtcgtcggccgtgcggacgatgccgtcgccgtcgcagcgcacggcgaccgatgcgccgtgcagacgggcctgctggcgggccagtccggcggcggcttcgcgcgccgaagtcggagcttcgggaaacggcatgtcgtattgcagcgtcgcggcatcgggcatcagactgcgcaggtcgtatccccggtagagcgatatgcctgcggattcgagccggaaggcgggatcgcccgatgccggaacgacgatccgcacgaactgcgagaggtcgcagtccgcaggcgccgtctgcgccgcgagcgcttcgatctgccgggtgagggactgctggcggaagcctgccggccggccgaaaagttcgcgcgaccagcggtcgagcacggccagatgcgccgtcaggtggagagacctgccgccgaggatgtgaacggtctggtataggtagacctcctgcatcagagtaggaagattttgagcagcagttcgcgcagcagctccccgtccgacgctccgccggcgttcatgcccttgctcttggcgtcgtattcgcgcagcaggccgaggatgttgaataccctgcggttgtcccagttggcggcgttctgcttgatctcgcccagtacgtagacgttgtttttcttgaggatgcgcatcagctcggcgtcggagggaaagggcatgcccttgtggcgcgccgtccagcgcaggtagttcacgacgaacagctccttgaactggccgaacagcgccagcacggtgaccagcagcgggttgtccttggggttgcgggcgaagtgctcggcgatcatcagcgcgcgcgccatgtctctggtcactacggccttgcatagctcgaagttgttgaaatccttcgagatgccgatgttggcctcgatgtcggcgtcggtgatgcgcttggtcccttcgggcagcgaaacgaccagcttgcccaactcgttcgagattttcgaaatgtcggttccgaggtggtcggtgagcatcgagagcgccttggcgtcgatggcgagtcccttttttgcgatgaactgctggagccacgaggcgatttcgtagtcgcgcgggcgcaccgattcgagtaccgctccgttggcggcgcaacccttgtagaatgccgagcgtttgtcggcgttcttctctttgtggcagatcacgaggatcgtcgtgggcgagggtttctgcgtgtagagcgagagtttgtccagtccgcgcagctgctgcgcctccttgaggatgacgacctgatacgaacccatcatcggcatctggcggcagaggttgatgacctgccccgcctcggagtccttgccgtagacggtgatctggttgaaagcccgttcggcttcgccgagcaccgtcgtcgcgagccgctcggcgatggcgtcgataaagtagctctcctcgcccatgagcaggtacacgggggcgaaccgccgtgcggcgatctcctgcgccagcttttcgtatgcggcgacggaatctttgaatttcagtgcgcttttggccatatctcagtcattggtccggccgagccggatgcggggcggggcgtttccgccatccccgcggcggaaggggctgaatcgccgctcccggtcgtgttatacaatctctttggtgatgcgcagcacgttttccgtgtcgggcgtcaggcggtagcggtcgtcgatgcggcggccgacgagccatacgatctcgtcgcccgacagcagtacgaactgccgctctttttcgggcatcgagaccttggcgtcgatcaggaagtcgctcaccttcttgcggcccgccatgccgaagggaatgaaccagtcaccctcgcgccagcggcgcagcgtgagcggaaatttcagcaggtcggcatcgacctgcgcgatgtgctccggcacgccgaagttcttgatcgcgtcgatgtcgcagtattcgaaatagagcgccgaattgccgcagtaactgcgcggcacgccccgttcgacggtcaccagacatgcgtcgccgggggcgatcggggccacgacgatcgtgccgcggtccacgtaggcgacccgctcgcgcgagtagaagcggcggcccgtcatgccgtgcctgagcgaatggcagagcgagtcgatgacgtcgcccttgaatccgtaggccgagttgagcagctcgtagatgacgaactcctgcgggaacgccgggtcgatgcggtcgaggtgtatcgtgtccagtccgttctcggtggtcaccgcttcgccgcgtatgcgttcgatgccgtggttgatgaagagctgggcgtcggtcagccgtgcgatgttgcggcgcatgagactcgtgaacttggggttgatctcccggatgcggggaatcaggcccagccgtatcttgttgcgcaggtacttggtcgagcggttcgacgaatcctcccggaaggggatgcggttggcgacggcgtactccagaatctccttgcgcgaggcgaacatcagcggccggacgaccttgccgacctgcgtcgaaatgcccgtcagcccgcgcaggcccgtgccgcgcagcaggttgatgaagaacgtctcgatcgagtcgtcggcatggtgggcgatcgccaccaccgtgtagccgtgttcgcggctcagggcgtcgaaccatgcgtagcgcagccgccgggcggccatctccatcgactcgcccgtgcgctccatctcggccgccgtttcgaagcgtttgttgtagaactcgacgccgtatttccgcgcctcttcctccaccagcacctcgtcctcgtcgctctccgcgccccgcagctggaaattgcagtgcgccacgccgacccggtagccgctgcgcgtgaagagcgacagcatgaccatcgagtccacgccgcccgaaacggtcagcagaatgcggtcgtcgtgcgttgccagatcgttgtcggcgatgtatttgcggaaagcctctaaaagtgccatacgattaaaatatattgacctcggtgtctatttctatgccgaatttttcgtgaacgcgcatctgcaccgtgtgggcgaagtcaatcacttcgccgcccgtcgcgccgcccagattcaccagcacgagcgcctgccgttcgtggacgccgactcttccgcgtttgtagcctttcagcccggccttgtcgatgagccagccggccgccagcttcaccctgccggcgcatcccgccgccgggtaaaccggcatgtcgggccactgggcctgcagctgccgcgccacgcactcgtccacgaccgggtttttgaagaagctgcctgcgttgcccgtcaccttcggatcgggaagtttggcgcggcggatcgcgcagatcgcttcgcggatgttgcgcagcgtgacaccgccgcgggcttcgacctcgcgctccacgtcgccgtagcccagccgcggccgcggcgtgcgcgaaagccggatgtccacggccgtgatgatgacgcgcccccgcagttcgtgcttgaagatgctttcgcggtagccgaagcagcagtgtccggcgtcgatgaccattgccgagcggttgtcggtgcagaacatgtgcacccgctcgatcacgtctttggcttcgcagccgtaggcgccgatgttctgcaccggggccgcgcccgccttgccgggtatgagcgaaaggttttcgatgccccacaggccgcgttctacggcccattccacgaggtcgtcccactcgacgcccgcatcggcccgcacgcggaccgtgtcgccctcttcgccgaggggcgtgatctgccgggcgacgggcgtaagcagcagtccgtcgtagtcgcgcgtgaagaggatgttgttgccgccgctcagcaccgcccagcgttcgggcacgccgccgctgaagatcgttcgcaggtcctcttcggtctcgaattcggcgagacgcgccgcctgctgtccgacgccgaagctgttgcgtccgctcaggtcgatttggtggaattctcggatcatgccgtctgtctctgtttgtttgtcgttcgcccggttgtgtcggcgggcgtcgggcgcataatgttctccgtgcgcccgtcccggattccggcgagcggtccttacggcgctccgggcgggatgtctgtccctccccggctccttgtactgcgtcgtccggtgcggtcgcgggtacggaaaatgtgcaatcttgcgcaaagttagaaataatttagtaattttggtgagatgtttccacgaaccgtaaaaaacaaaatacctgaatacctatgtttactcaacaagatttacagcagatcgaaaaacacggactgacccccgaagcggtcgagttgcagctggagaatttccgccgcggatttccttttctcaacgtcgtgcgcgccgcctcacccggcgacggcgtgctgacgctgagcgacgccgaggccgctgccgccgccgaacgttacgagcgggccgccgccggactgtccgttgtgaagttcgtgcccgcgtcgggcgccgcgacgcgtatgttcaaggagcttttcgagttcgtgaacgacggcaagcgcggcaaggggatcgacaccctgctcgaaaacatcggaaagttcgccttctggcccgaattgaaggccctgcttccggccggcgcagacgaccggacgatcgtcagcgccatcgtgaacgagggactcggctacggccgcaaacccaaaggactcgtcaccttccacgcctatcccgaaggtgcgcgcaaggcggtcgaggaacatctggtcgaaggggcggtctatgcggccgcgaacggcgtggcgaagattcatttcacggtttctcccgaacatatcgaaggatttcaggagctgctggctgcgaaggtgcccgtttacgaaaagcgtttcggcatccgttacgacatctcgttctcggtgcagaaaccctcgaccgacaccatcgccgtcaatcccgacaatacgcccttccggcaggacgacggtacgctgctgttccgccctgcgggccacggcgcgctgatcgaaaacctgaacgagatcgacgccgacgtggtgttcatcaagaacatcgacaacgtcaccaccgacgcgcagcgcggcgatacgatccgttacaaaaaggtgctggcaggcatcctgctcgaccttcaggagcgtgcgttcgaatacctcaaggcgctcgaagtcggcggcgccgagctggagccgatcgtcgaattcatcgagaagcggctctgcgtgaagctgcccggcagttacgattcggccatgctccgcgccgtgctcgaccgtccgatccgtgtctgcggcatggtccgcaacgagggcgaacccggcggcggtcctttctgggtcggaaaccccgacggcacgcagtcgctccagatcgccgaatcgagccagatcggccccgacgacctgccgctgatgcggtcggccacgcacttcaatcccgtcgatctggtctgcggcatgaagaattcgaaaggcgtccgcttcgacctgcgcaggtacaccgatccttcgacgggcttcatttcgtcgaagtcgagcggcggccgcgatctgcgcgcgcaggaacttcccggcctgtggaacggcgccatggccaagtggaatacggtcttcgtggacgtgcccattacgaccttctcgcctgtcaaagtggtgcaggacctgctgcgtccccagcatcagtaatcttggggtgtatgacaaggccggatgccgcatcatgcggcatccggttttttgtcgggctttttcgggattgttaggcgtgtgttgcttttttggggtgttaagggtgctcggctttttccggggtgttcggtgtttttcccggtttcccggttttcccgcggcgtcctgccgcgggccgcatgcggcggtgggggagacgcttctcggacgggacgtcgttcgtaaacgaattgtctgcgaatcggcgttatcgtaagatttgttattatgaatcgggcgaaattgtctttttgtcgtattttattgtctttttggtcggtgcttggggtgcgtgttgcgggcggcttttgaaaaaaaatgggttatgacctgcgtgcgaagctattttcttttgtatcgggtttgccgggtcgtgatttattgctacctttacacaattaatattgaaatcacacaaaaagatacggtatgaccagttcgtttttaaaacaggcgacggaaggcaataaaaacgcgattctcaaacagcagatcatttgccagtatatcttctgcggggattcgagcattacggatctgagcaaggccgtgaatctgagcgtgccgaccgtaaccaaactgatcggggagctgatcgacgaaggtttcgtccacaacttcggcgagcaggggacggccggcggacgacggccgaatatctacggcctgaatccctatgccgggtatttcgtcggcgtcgatctgcgcaaggattcggtcatgatggccgtcatcaatttcaagggacagctgatcgatgaaacgacggtcgattttctgatggacaacgatccccgttcgctggaccgtctttgcgacgtgattcagaatttcatccgtgcgcgcaagatcgcccgcgacaaggtgctggccgtcggggtgaatatttcgggccgcgtcaattcgcagaccggatacagttacagctatttcttcgtcgaggaacagccgctgacgatgctgctcgaagagcgtctcggcacgacggtctacatcgagaacgacacccgtgccgccacttacggcgaatatatgtacggcgacgcccactccgagaagacgatgctctacatcaacgccagctggggactggggttggggatgatcatcgacggcaagatattttacggcaagtcgggcttttcgggcgaattcggccattttccgctgctcgacaacgagatcatctgccgctgcggcaaacgcggctgtcttgagacgggggcttccggttcggccatgcaccggatttttctggagaaactcaaggagggacgcgtgtcgatgctttccgagaaatacaaaaaaggcgaggagatcacgctgaacgatattctggccgcgctgctgaaggaggatgtgctggccatcgagattctggagtcggtggggcacacgctcggcaaggccatcgcggggcttatcaacatgttcaatccggaggtgatcgttatcggcggtacgctttcggtggccaaggagtacctgatgctgcccgtgcgtaacgccatcaacaaatactcgctgatgctggtcaacaaggatacgcagatcaagctttcgtcgctcggagaacgcgccggcgtgatgggtgcttgcctgctggcccgaagcaagtcgctcggcctgttctgacgcctctgttcgctctcgtgcacgcccccggaaacccgctgtttccgggggcgtgcggcgttatccgcagcggtgcgtcgccgggcagtgcgctctgcggcgttccgcggcggaagagacggggaccggccggaagcagccccttccggaagggtgcgatttcggtatgcgaattgcgcggagagggggttcggagcttgaattccaaggggttctgcggtgcgtgtttcttccttttgttctctattcttgtcaaaaaaggacaaattgtcgcggtgcgccgctgtttgtattataaacttttatatatttgtatcgctaaaatgaaaaacaataattaaaactaaataacgctatggaaaacaaacttcaacagttgactcagaagctctacgacgaggggctggagaaaggacgcgccgaagccgaccgtctggtcgccgaggctaagaaagaggcggcgaagatcgtcgccgaagcccgtgctcaggccgaggatatcgtcaggaaggcgcaggacaaggccgaggacgtcgagaagaacacgatgaccgaaatctcgctcgccggcaagcaggccgccgcgaagatcaagtcggagatcgccgcgatgatcgtcgccaagagcacggccgcaggcgtcagggaggccgtcatggatcccgccttcatcaaggagatgctgttgtccgtggccaagaactggaacggcgccgacgccggtaaggtggagctgaaggcgctgctgcccgaagccgaccgcgccaagctcgacgaggcgttcggcaagagcgctcaggagctgctctccgccggtatcgaagtgggttattccaaggaggtgaagacgggcttcaaggtcggcgccaaggagggcggttactacatctcgttctccgacgccgatttcgacgccctgctgggcgaatacctgcgcgagaaggtttcggacatgctttttaaggcgtgacgcgtatgttcgcaacggaatattattgtctggtagccggactgaaggagtactccctcgacgccgataccaagggtttcgacgccaaagccatcgtcggggagattctcgacggcgtttcggcttcggatgcggctcaggtgcgtctgctgtacggctactacgattgtgagaatatcgcttcgctgcgcgcggggcgctcggcgcacaatccgctgggcaacttcacgcgcgaggagctggaagaggaggtgaaggctcccaagcgtttacccgccgccgtgggccgcgtgctgcgtgcctatgccgatcccgaaggggaggacgccgaggaggtcgatacggcgcagcgtttcgaaaccgcgctgttcgacgcctattacgccacctgcagccgtgccaagagccgctttctgcgcgagtggtcggagttcgaccgcaccctgcgcaacgtgacggccgccgtgacggcccgtgccgcgggccgtccggtcgaggaggtgaccgtgggcgggggcgacgtggtcgaacagctggagcgtagttcggccgccgatttcggtctgcggggcgaactgccctacatcgacgccgtgatcgccgccgtgaacgacgaggcgaatctggtcgagaaggagcacaagatcgacctgatccgctggaacgaggccaccgagctggcgacgttcgactatttcgacatcaataccattctgtcctatctggcgcgcgtcaatatcgtggcccgctggacgcagctggacgccgtgcgcggtcgtgaaatgttcgaccgcctgatggccgagctggacggcagggagctggtgaacaggatatagccgccgcgcggcatatgcgggcggcgcgccgccggaccgggaccggtctctccggcaggagggatgcggagcggccgggaagtgcggaaatgcggtccgcgaccggaaaaatgaaaataagaaactaaacgaatattcatgaaaactacaggacgtgtaaatggtatcatctccaacatcgtcatcgtcaaggccgacggagcagtaggccagaacgagatctgctatgtctatgcgggagataccaagatgatggccgaggtcatcaaggtcgtaggcgacagcgcctatgtccaagtttttgacagcacccgcggactcaagatcggcgacaaggtcgagttcgaggggcatatgctcgaagtgacgctcgcgccgggacttttgtcgcgcaactacgacggtctgcagaacgacctcgaaaagatggacgggctgtttatcgagcgcggttcgatcaccgatccgatcgacttcgacgccgagtgggaattcgctccgctggccaaggcgggcgacaaggtgaccgccgcgtcgtggctgggcgaagtcaaggagcagtgggtgagccataagatcatggtgcccttcaccatggccgacaactatacggtcaagagcgtggcggcggccgggaaatacaaggtgacggacacgatcgccgtcctgaccgacgaggagggccgcgaacatgcggtcacgatggttcagaaatggcccgtgaagcaggccgtgcgctgctacgtcgagaagccgcgtccgtcgcgcatgatggagacgggcgttcgcgccatcgacaccttcaacccgatggccgaaggcggtacgggcttcatccccggacctttcggcgccggcaagaccgtgctccagcacgccatttccaagcaggccgacgccgacatcatcatcatggtggcctgcggcgagcgcgccaacgaggtggtcgaaatcttcaaggagttccccgaactggtcgatccccatacgggccgcaagctcatggagcgtacgatcatcatctgcaatacgtcgaacatgcccgttgcggcgcgcgaggcgtcggtctatacgggcatggccatcggcgaatactaccgctcgatgggactcaaggtgctggtgatggccgactcgacttcgcgctgggcgcaggcgctgcgcgagatgtcgaaccgtctggaggagctgcccggtcaggacgccttcccgatggacctttcggcgatcatctccaacttctattcgcgcgccggtctggtcaaactgaacaacggccagacgggttcagtgaccttcctcggcacggtgtcgcccgcgggcggcaacctcaaggagccggtgaccgaatcgaccaagaaggccgcacgctgcttctatgcgctttcgcagggccgcgccgactcgaagcgttacccggccatcgatccgctggaatcctattcgaaatacctcgaatatcccgaaatccgcgaatacctcgacgagcatatcgaaaaggactgggtggacctcgtctacgccggcaagaccctcgtgcagcgcggcaaggaggccaacgaccagatcaacattctcggcgacgacggcgttccggtcgagtatcacgaacgtttctggaagtcggagctgctcgacttcgtgatcctgcagcaggacgctttcgacgacatcgacgccaactgtccgctcgaacgtcagaagatgatgtataaaatggtgctcgacatctgccggaaggatttcgctttcgccgatttcgaggagtgctcgcagttcttcaagggccttatcaacctcttccgtcagatgaactactcggagtggcagtcggagaagttcgaaggctaccgcaagcagatcgaggagtatgtgagtgaaaaaatcaaataagctttagaccatgacaacacgagcttttcagaagatatataccaagattgacaacatcaccaaggcgaccgtgacgctccgggcgctgggcgtcggcaacgacgaactggctaccgtgggcggcaagctggcgcaggtggtgaagattatgggcgagaacgtgacgctgcaggtgttctccggaaccgagggcatcgctaccgattcggaggtcgtcttccacggcgaacccccgaaactgcgcgtgtcggacaacctcgcgggccgcttcttcaacgcctacggcgagccgctcgaaggcggtgagatcgtcgagggcgagccgcgcgagatcggcggcccgacggtgaaccccttcaagcgtatccagccttcggagctgatcgccacgggtatcgccggcatcgacctcaacaatacgatcgtcacgggccagaagattcccttcttcgccgaccccgaccagccctataacgccgtgatggccaacgtggccctgcgcgccaaggccgacaagatcattctgggcggcatgggactcaccaacgacgacttcctctacttcaagtccgtcttcgagaacgccggtgcgctggaccgcatcgtgtcgttcgtcaatacgaccgagaacccgcccgtggagcgcctgctcgttcccgacatggcgctgaccgccgccgaatacttcgccgtggacaagggcgagaaggtgctggtgctgctgaccgacatgacgctctatgccgatgcgctggctatcgtgtcgaaccgcatggaccagattccgtcgaaggactcgatgcccggttcgctctattcggacttggcgaagatctacgagaaggccgtgcagctgcccaacggcggttcgatcaccatcatcgccgtgacgaccctttcgggcggcgatatcacgcacgccattcccgacaatacgggttacatcaccgagggtcagctgttcctgcgcaacgactccgatacgggcaaggtcatcgtggacccgttccgttcgctgtcgcgtctcaagcagctggttatcggcaagaagacccgcgaggaccatccgcaggtaatgaacgcctgcgtgcgtctgtatgccgacgccgccaacgccaagaccaagctcgaaaacggtttcgacctctcggattacgacgaacgtacgctgaaattcgcgttcgactattcggagaaactgctctcgatcgacgtcaatatcggcatcacggagatgctcgacacggcgtggggactctttgcgaagtacttctccaaggaggaggtcgctatcaaggaggaactcatcaaaaagtactggaaagaagcgtaacgtacgatggcaatcaaatttcaatataacaagacctcgctcggcgacctcggcaagcagctgaaaatgcggcagaaggcgctccctacgatcaaaagtaaggagtcggccctgcgctccgaggtgaagaaggcgaaggactccgcaggcgattaccgccgtcggctcgaccggctcaaggccgagtacgactacatggtgtcgctatggggagagtttgattgtgacctcctgcgtattgccgatgtggaactttcggtacagaaaatcgcaggtgtgcgtacgccggtcctgcaggacgtgaaattcgaggtgaaaccctacgatcttttctcgtcgcccgtctggttcgccgacggagtcgatattctgaagcgcatggcgcagctgggtatcgagttcgaggtctacaaccgcaagatggagctgctggactatgcacgccgtaaaaccactcagaaggtgaacttgtatgaaaaggtgcagatacccggatacgaggacgccatacgtaagatcaaacgcttcatggaggacgaggagaacctctccaagtcggcccagaagatcgtgaaaaccaaacagcagcaggccggggagggcgcgacgttatgatagcgaaaatggcgaaatacgactttgtgctctatgcggcgcaaagcgaggattttatcgaaaagctgcgcgaactcggcttggtggacatcaccactacgggctgggaaccctccgaggaggaccgccagctgctgctcgacatcgaaggacacgccaaggcgttcgaattcctgcgcaacttccgcacggaagaggggcgctgcaaggccggagccgagcctttcgcaacgggcgccgaggcctacgaacactatgccgcggcgcatcagcaggcgacggcgctccacgccgagatcggccgtctcgaaaaaacggccgacgaactgcgtccgtggggtgaattctcgcctgagagaacccgctcgctcgccgagcagggtatcgtgctgcgatatttcttcacgccgaagagcaattacgacaagttcgaggcccagtgggcggagcgctataccatcgcgccgatcaaccgcaccgaatcgacggtctatttcgtcgtcgtggcggctcccggcgaggaggtgacgctcgatgcgcaggagatgaaaaccccgtcgatggacattcgcgaagcggaacgccgcatcgccgaagcccggaaggagctgagcgccctcgacgccgaattctcgcgtgtcgcagcttcggagaagctgctcgcggcgcatgccgcctcgctgaaggaacagctgcagggcgtgcgcgtgaaggccacggcgcagcaggcggccgacggaacgctggtcgtcatggagggctgggccgaaaaggagacttcggacaaggtcgatgcccttctggagcagtatcccaacgtcgtgtatctcaagggcgatccgactcctgaggacgatacgcccgtgaaactgaaaaacaactggttcgcccgcattttcgagttggtgggcgacatgtacgcccgcccgaagtacggcacgatggacctgacgcctttcttcgcgccgttctacatgcttttcttcggcatctgcctgaacgacgccggttacggcgccattctggccctgctgggggcgtggatgctggccaagaaccggcaacccggcatgatgcgtcaggccgcgtggttcgccacgttgtgcggcttgacgacggtcgtcgtggggctggcctgcggttcggtgttcggcgtgaatctcaaggagtatttcccttcgattccgttcttcgacttccaaggcagcttcttctcgatcgccttggcgatcggcgtggtgcagatcgtgttcggcatgatgctgaaggtcgtcatgatctcggctaccgtcggatttcgctattcgctcggtacgctgggctggctgctggtgatcctcggcggaagcatcgccggcggtctgccgctgctcaatcccgaatgggtgattccgttctacaccacctcgtcgcccgcgttctatgcgacgctcggcgtgggtgcggtgctgatgctgttcttcaattcgccgggcaagaatccgctgctgaacttcggtctgggattgtgggatacctataataatctgacgggcatcctctccgacgtgctgtcgtacatccgtctgttcgccatcggactctctggcggcatcctcgccacggtgttcaacgcgctggccgacggcttcgtgcccgaaggttcgggcatcgtcgtgcggctgctgatcatgattccgattctgctcgtcggtcacggcatcaacctcttcatgtccaccatttcgtcgttcgtgcacccgatgcgtctgacgttcgtcgaattctataaaaatgcaggtttcgagatgtcgatgcgttcgttcgatcccctgcgcaaaatcgaaaattcggaaaacaaataacaactaaaacaaattacaattatggaatcaacaactgcaattattttgggctatctcggcgtagcgctgatggtgggcctttcgggcgtagcgagctgtatcggtacttcgatcgccggcatggcgtcggtgggcgccatgaagaaaaacggcggcgctttcggtagctacatgatcctctcggccattcccggttcgcagggtctctacggtttcgtgggctacttcatcatcaagggcttcctgaccgattcgatgacgctgctgcagggtgccgccatcttcggcgccggtctgctgacgggtcttgtctgcctcgcttcgtcgtacttccagtcgaaggtctgcgccaacggtatcgccgctatcggcaacggccacgacgtgatgggtaagacgcttattctggccgccttccctgagttgtacgccattcttacggttgccgccgtgttcctgatcgcgggcgctatctgatctgccgcgcggaatttctcacgggcggaacgtcggttgcgatgttccgcctctttttttgaatttgcagcccgaaacgaccggccgatcgtaaaataatacatttattgcataaaatagtacttgtactctcggctgttttacgtaattttgtgaaaactcaaaatcttttaaaccctgacagatatgaaaccgaaccgatttatgctggccttggccgcgttgtgctttgccgcaggcggcgcttcggcgcagcagaccgacggcaagtccgtggcgcccaagacctacaaggcctacatggtcagcgacgcccatctcgacacccagtggaactgggacgtacagacgaccatccgcgagtacatcccccgcacgctgttccagaacctctacctcatggaacgcttccccgactaccgcttcagtttcgaaggcggcgtcgtctattcgtggatgaaggagtactatcccatgcattacgagcggatgaagaaatacatcgcttcgggccagtggcatatcgccggcgcgtcgtgggacgccaacgaccccaacatgccttcggccgagtcgttcttccgcaacatcctgctcggacaggagttctataaaaaggagttcggcgtgcgttcgaccgatattttcctgcccgactgcttcggcttcggctatacgctgccgacgatcgcggcccacagcggcctgatcggcatgtccacgcagaagctcagctggcgcaaccacgacttttacgacgctccctaccacaagaagaatcccttctcgtggggcgtgtggtacggcatcgacggcagttcggtgatcgcagccttcgatacgggcggctataactcggaacttccagagaatgtgcagtataatgaacgcctgatggagcgcgccgcccatggttacgacaacacctgcttccgctactatgccggcggcggcgaaggggtcggcgacaagggcaacagcggtacggtgaccacctgccgccgtctgaccaaggcgatcaacgacccgaacgccccgatcgagatcatcagcgccacgagcgacgacctgttcaaggcctacctcggccgcaaagccgagctgccctctttcgacggcgaattgctgatggacgtgcacgctacgggctgctatacttcgcagaccgccatgaaatactacaaccgccgcaacgaggagctgaccggcgccgccgagcgcgcttcggtcgccgccgactggctcggtgcgctggcttacgaccagcggaaactcaccgagatctggcagcgtttcatctggcaccagttccatgacgacctgacgggtacgagtatccctgaggcctatacgtggtcgtggaacgacgagctgatcgccctgcggcagggcggcgacgtgatgaacacggcggtcggcgcgctgagctattcgctcgatacgcgcgtcaagggtacgcccgtggtggtctacaacgccgtgacctatcccgtcaaagccgttgtcgaggccgagattccgctcgccgccaaagccaagggcgtggccgtatacggtcccgacggccgccgcgtggccgcgcagattctcagccgcgagggcgacaaggccgtgatcgcattcgccgccgacgtaaagtcggtggggtatgccgtctacgacgtccgtccggcatcgcccgccagatcgtcggcgctgaaagtgaacggtaatacgatcgagaacgccgtttacaagttgacgctcgacaggaacggcgacatcgcgtcgctcgtggacaagcgttacggccgtgaactggtcgagcagggcaaggccttccggctggcgattttcgaaggcaatccgtcgaacgagtggcccgcatgggaggtgctgaaggaggtcgtggacaagactccgcgcgccgttaccgacaatgtttcggtgtccgtcggcgaagaggggcccgtgcgtgcttcgctcaaggtggagcgcacgtacggagattcgaagttcacgcagtacattacgctgaccgacggtgcgcaggacgaccgcatcgacatccgtacgacggtggactggaacagccgcaatacgctgctcaaagccgagttcccgatgtccgtgagcaacgcgaaagccgcttacgacctcggcatcggttttatcgagcgcggcaacaacacggccacggcatacgaagtgcccgccctgaagtgggccgacctgaccgacgccgacggttcgtacggcatctcggtgctcaacgactgcaaatacggctgggacaaacccgccgacaatacgatccgtctgacgctgatccacactccttcgaccgaaaaacgctatccgcaccagcgcgatctcgatctgggtgtcaatcacttcacctattcgatcgtaggacataagggaaccgaccgcagcggcgttgtggccgcatcggagcagctcaacctgccgctcgtggcttacgtggctcccaaacatgcgggatcgctgggccgcaccttctcgatgctggagtcctcgactccgcagatcggcgtgcgtgcgctgaagaaggccgaggacggcgacggatatatcgtgcgctgctacgagctgaccggcaagcccgtcgagaacgcccgcatcaccttcccggctcagattctctcggccgaggagtgcaacggcatcgaggagaagatcggtgcagccgagaccgagggccgttcgctgatcgtttcggccggcaaattcgctcccaaaacctaccgcgtgcggctggccgctcctgcgcagaagtccgcgttcgaggtgaagagcgcgcccgtgacgctgccttacaacacggtggccttcacgaccgacgagttctatacctactaccgtttcgacaaccagcgcggcagcttcgccgccgagctgattcctgccgagctgacctgcaacggcgtacggttcgtgatgggcgaggagaatgtcaaggacgccgtgacgtgccgcagtcaggagatcgaactgcccgaaggcggttacaggaagctctacatgctggtggccgcttcggacaaggagtgcgaggcccttttcaaggtgggcgactccgagcaggccgtctatgtgccgctttggaaaggcttctacggacagtggggctggcgcggacacagcgaagcgttcctcaaggatgcgacgatcgcgcatatcggcacgcaccgccatcagggcgacgtgggcaacctgccttacgacttctcctacatgtatatggtttctctcgatattcccgaaggtgcgcggacggtgacgctgcccgaaaacaagaacgtggcggtattcgccatgacggtttcggacaacggcatcgacgacgtgcttccggtgagcggcactttcatccgtccggatgtgaagtaacaagtttttaagtggtataattaggcgctccggcccggctgtaaagccgggccggagtttttgtgtcaggacggcgttgtgacgcggtttgtatggttttgtgcccgaattgtcataaaacggcgtgaaaaccgccgatcgggggtgcgggacggtgccgggagtacgtttgtgttccggatcggaaaatacaattttgtgacaaaatagtaccggatcatgtacggcggagaaatttgccgtccgtatatttttcggtccgcatcttatttctcaactttgttttcacgaaaaaccaaccgtttaacctaaaacttaaaaccagattagcctatggaaaaaaactcctgtctgatcctttccgtcgatttttttgcggaatcccgtaatttatcctgttattttcccgttttctgaatccatgaaccgcatccgcgtcaccgggtgcggggagtatattttaactaaaccaaaaaacaatatctatgaccaattttgggcacaaaatcatgctgacggttttggtgctgctgattacccccccccttgggtttgcagccgcaaccgttaatgccagccccctgacccagacatccaaggtcaccgtcaagggcgttgtgaaggacgccgcaggagcgccgctgctcggcgttaccgtcattgtcaagggtacttcggtcggaacctcgaccagtatcgacggtgaataccagatccagtgcgccgccgatgccgaactcgacttctcgttcatcggctacgagacgcagacgcttccggtggccaaccgcacgctgctgaacgtgacgctgaaggaagacgcgcagctgatggacgaagtgatcgtcatcggctacggcaccaccacccgccgccgtgcggtgggcgccgtggaccagatcaagtccgaagccatcaccgaacgttccgtcgctaacctgacgcaggcactgcagggcacttcgcccagcctcgtcatccagcagcgaagcagtgacccggccgacaaccagctcaacatcaacatccgcggtatcggtacgatgaacaacaacgaaccgctgatcgtcatcgacggtctggtgtcggacaacgccagcttcaacaagctcaatccctcggacatcgagaacgtctcggtgctgaaggatgccggtacggctgccatttacggttcgcgcgccgccaacggcgtcctgctggtcaccaccaagaagggcaagctgaatcaggctccgaccgtcgaactcacggctatggtcggctggcagcagcccgaagtgctctacacgcccgttcaaggctggcagaacgccacgctgctcaacatttccaaagccaattcggggctggctcccgcctttaccgccgaacagatccgcgacctcaaggcgcacggcaacggcacgttctacatggacgagattctgcggacggccatgcagcagaactacaacgtcagcgtatcgggcggcggcgccaatacgacctatatgatttcggcaggctattacgatcaggagagcaacttcgaaggtcccgattacggccgccagcgttacaatttccgtacgaacatcaccaccgaatacaaacgcgtgaaggtaacggccctgctctcctattcgcacgagaacagcaagacgacgaccgacggttcgaccatcgccaacgcgatgcgtattcccacctattactattaccgtcagtacgatcccgtgacgggcaaatacctgctcaacgacaaactgaccgaccgcaactcgctgggcctgctcgaagagggcggttacaacaagtaccgcaacgactatgtgaacgccaacctgtcggctgaggtgaagatcatcgacgggctgaaactgcgcggcgtgctgggtgccgatatcttcgccgaccaccgctatacgcggacgcacgaagtgatgttctacaataccgacgctgcgggcaatccggtcggcgaaggccgttcggccaacaacgacaacaagtcggaggactggaacaaacgcgcctacctgatcaattctcagctgatgctcgacttcgaccgtacgttcggcaagcaccatgtggccgccctgttaggcgcctcgaacgagtcctacacctccgaagcgaaccagatctccttcaaatgggccgaccccgatctgggtatcaacggcgacggcaccgaggccgtcatttcgggcgacggccggtcttcggtgacgcccgaaaacacgacccgcaccagcctcacctccgttttcggccgcgccgcctatgactacgacaaccgttactacgccgagttctcgttccgttacgacggctcctcgaaattccgttccgacctgcgctggggcttcttcccctccgtgtcgctgggttggcgtctctcgcaggaggctttcatggagagctaccgcgacaacgtcggcgacctgaagatccgcggttcctacggtacgctgggcaaccagtcggtgggcgactaccagtacttcaccacctacaacgtctattcgaacacctatgccttcaataacgtgggcgtcggcggcgccggcttccagctcggtaccgacaacctgcagtgggaggtgtccaagaccttcaacgtcggtttcgacgcctcgttcttccggggcaagctcaacctcggcttcgactacttcaacaaacatacgaccgacattctggtcaagccccagaccccgctgattctgggcaccgagctgcagaactacaacgccggcgagatgcgcacgcagggctgggagctgacgctcagctatgcgctcaagaaacgcgactggtcgcacttcttccagttcaacatcggcgactcgtggaacaaggtgctcaaatacgagggcttcgaggatatttccggacaggaggagttctggcgcatcacccgcgaggggctgccgttcaactcctactacggttacaagaccgacggcttcttccagagctatgacgaaatcgcccattcggccgtgccgacgggcaagagcgtcaagccgggcgacgtgaaattcaaggaccgcaacggtgacggcaccatcgacgagaacgaccgctactatctgggcaacgccttcccgcgctacacgctgggcttcacctacaacgtcgcatggaaaggcatcgacctctcgatcttcctgcagggcgttctcaagcgcgacatgatggtccgcggcgagctgatcgagccgttccactccaactacggttacacgatgtacgaacaccagctcgacttctggaccccgaccaacaccgacgcccgctggccgcgtctgaccgatatttcggacccctcgaaccagaacaactaccgcatgggttcggacctctacatgttcgacggcagttacctgcgcctgaagaacatccagctgggttatacgcttcccgaacggatttcgatgaaattcggcgtcaagcgtttcaagatctacttcaacgcccagaacctgcttacgttcagcaactgttcgttcatcgaccccgaatcttcggagttcggctcgaacatgaattcgggcggtgccaactcaggccgcaactacccgaacctgcgttacttcggcgccggtctgaacatcacattttaaataaaggcgaaaactatgaaaacgacgattttaaaatatatcaccgtgacgttcgccgccggagcgatgctgctcgcaggctgcaacgatctggatcaggagcctaccaacaagtttaccgacaaggctttctggacttcgcccgaacgtgcgaacatggtgctcaacatggcctacaaccagatgttcggccacgacaggatctggcaggacgaagccctgagcgacaacttgtacgaacagcgcggcaatcccgacacgcgcacgatccgcatggggcaggcgacgcccaacacgggactgttccgcagcgagtggaaatgggtgttcgagggtgtcaagacctgcaatgtctttatgaatttcgtggacgaggtgccgggcatggaccccgaacggctcgccgggatgaaggcgcagatccgctttatccgtgcattcctctatttccgtctggccaatttctacggcgacattcccttcttcctgcaggatatttcgctcgaagagtcgcgccgcgtctcccgcactccctatccggaggtgatgagtgcgctgcaccgcgaactcgacgagatcgtcggcgacctgcccacccgcgacgaactgaaagccgacgacaacggccgcatcaccaaagccgccgccatggtgctcaaggcgcgtatgtatatgtacgagaacgtgcagcgcaccggcaattcggtttcggacaacatgcgcaaggccgccgatatctgcgacaagctcatccacgagcagggcacctacggcacctacagcctgctgacccaagggtccggcgacggcattccggcctatgaatacctctttacctcggccgccgaatacaacagcgaggtgatcctcgactatgccgccgtcgagctgaacaaacagtggtccacgctctattcgatggttcccctgacgatgggcgccaacctctgccagaaggctccgacgcgcgcgctggtggacagctacctcaatgccgacggctcggttcccgcggacaagaccgtctatgcgaaccgcgatccgcgtctgaccgctacggtcgtctacaacggctatgtgtggaaagaccgcaacgataagggcgaatacgtgaccaaaggcacgatcaacgtgacttcgggcaacgacaaggccggtacggacaacggttcgcccacgggcttctacacccgcaagtatttcgatacgacccatggcaagaacctcgaaatgtggaccaatatcatcatgatgcgttatgccgacgtgctgctgatgtacgccgaggcgaaggcgtacctgaacgagatggacgccgcggtgtggaacgagacgatcaagccgatccgccagcgtgcggggctgagcggcaccgacttcccctcgtcgggcgattacacccagatcgtacgcgacgaacgccgtgtcgagctggcgctcgaaggactgcgctacttcgacctgatccgctggatcaattacaaggactccaagtcgcagggcgtcatcgaccttttgaacggtgcggtctacggcgccaaggagctgaacggaggccgtcagatcgacgaattcaagttcaattccagccgggacatcctctggtcgcttccgctctccgaaacgcagctcgtgccgacgctgctgcccaacaattcgggttattaatcgtcaatcaaaaaagtatcgaaaacaatgaaaaagatattgaacatactgatggcggccctcgtccttacgggcatctcctgctcggaagacttggagtacaagcccggaggcgtcactccggtgcagacgctgctgctgccggccgacaactattacgtggagctgcagagcgcttcgacggcgacgctccgtttttcgtgggagccggcgctggctgccgacggacagcttccccattacgaggtggtcttcttcggcaagcccggcggcgagatcatttaccgttgtgacgccggttcgtcgaccagcgtggatattgtccataaggaaatcaaccgcatcgccaatgccgcgggcatcgacgtcggggccgacggtgccgtctattggtcggtcgtgtcgagccggggcgtggataccgcgcctgtggttgcgacgccccgccggttggaactgacgcgtctgctgggcttcaatgtgattccggaccagttgttcctcacgggcgaagctaccgagggcggcagcgatcttgagaatgcctgtgtcggccgcaggaccggcgacggcgagtttaccttctatcagcagctcgaagccgacaagggctttacgttcgtcagctcgaaaggcgacgaccgcacgacctatacggtcgtcaacggcgtgctggacgaccagagcgccgaacccgccacgatcgaccgatcgggtgtttaccgcatcaagctcgacctcaatgtccgcggaatcaccttcgagcatatagaccgcgtggaattcaatttcgcaccgcgcaccgaagacaacggcaatatggagtatatcggcaacggctgctggaaattctccgattacaacgtcaaattcagggaagagagctggggactcgaccagcgttacaacttccatccggttttcgacggggttacgtatgtatgggccggtacgaaaggcaacgacagcagccccagcgcgctgagcggcgcggagtattacattctgaccgagaatctgtttaccggggatgcctatggtcccgaaaagtttaagttccacagcgattttaacggtaagaaagtcgatatcaccctgattatgtccggtgacgtggagaattgtacgcatgtaatcgagatcgtcggctaaaaaataattgaacctatgaaaaacatactgaataaactggttgttctgctgctcgcgggttttgcactggcggcctgtaccgagcatacggaatatgacgataccggcttcagcgcggtcgaaaaactgctctatccgtcggacggctacgccctcgatctgatcgaacaggccgatgccaacctttatttcgagtgggaggtttccaaggtcggaactcccgtctacaccgtggttttcctcgatgcggccaaaaaggagatcggccgttatctggccgacaacaacggtcagaagtcctcgctgaaaatgctccacagtcagctcaatgcgattgccggcgacgccggcatcgagcctgacgctgcgggcgacctctattggacggtcagcgccggactgggcggagccgaacagctttcgccggccgagccgcacaaactcaccgtcaagcgctatgcttcgatcgacgcgccctaccacctctacgtgacgggcgaaggctccgagttcggcacggatcccgccgcggctaaacagatgcgcgagctgggcgacggcaagttcgagatttacacccgattcaccggctcgttcagcttcatcaaccgcaatgcggcgggcagcaagcgtacgttcggcgtcgccgaaggccgcctgaccgagggcgccgacgccgcaggcacgggcgacggcgtttaccgcgtactggtcgatttcaaggccggtaccgtgaagatgggaaagatcgaaagcgtgaaataccactggtgctggacgcccgatcccgatgccgtgatggaatatgccggcaacggcgtctggaagcgtcagatcacttgggacggcgacaaccgctaccgtttcgatgcggtgatcgacggcacggattacatctggggctactcgtcgagcgatatgagcgattcggacatgccttccggcctgaccgggccgcagtacaggctgtcaatgcgcgaaacgggcaatatcaatcagtgggactactccttcaagcatatcgccgtgctgaggaacgtcacctgcacgatcgtcgtggactgctcgcccgaagccgaagcgtactaccaccgttacgaattcgacttcgcgcccgaagctactcccgtgacgctgatctcgcccgatgacaacgcctccgtcgtgctgaatgcgcaggcgggcgccaagcagaccttcgcgtggaacaagcttcccgattcggaccctgcgggcaagctgacgagctatacgctggtcttctattcggacgctgcgctggaaaaggccgtcggccgcaaggaggcgcagtataacggctccgtggacgtctccttctccgagctggagtcgatcgccgatgccgcgggcattgccgccgaaggcacgggcgacctgtactgggccgtggagagcaaactgctttcgtggacggcgctctcctccggccgcaaactcacggttacccgcatgaagggtattccgaccgccgcctacatcacgggcgccgcttcggagttcggttccggctatcaggccctcaaggcgctgggcgctggcaagttcgagattttcaccaagctgacgactgatgccgcagggtacaacttcaccgacggcgatacggccgatgcgcgcaagttcgtcgtcgaaggcggtgcgatccgggagagcgacgcaagcgtcgtttcgtccgaagaggccatctattacatcctgctcgacttcggcgcaggcacagcgaagctccagaagatcgagaacatgcgttacctctcgccgaacgtcaagacccagcataccgagaagcagatcaagctgccttatcagggcaacggcatctggtatgccgcaggcgtggtgccctacctgagggactgggacgacgaccgctacttcttctgggccgaggtggacggcgtgaagaccaagttcggcgccaatcccggcatgacgggcgacctgaattccaagcctgccgagaacgattcgcgcttccgcgtattctggccgatcgccgatgtgaacggcgacgatgccggcgcgttcaagatgctccacgcctaccgcggcaacgactccaagcgggtgaacatcaagctcaacatgagtcccgatacggagcactactacaactatatcgagtatctggattaaccaactctccgggggaggcgcgctccgcaaggcgtgcccccccccggtaaaaaacgacagacttatgaaaaaatacattttagcgcttaccgccgcggcgaccctgctgggagcctgcgaggtggacgacaaatactacggcaaagaggtggtggatccggccgagaagctcgaacccgcttacggggaggactggaccgcccatgccgacaagatcgacgagaagctgatcgagaatttcatgaataccgaccgcggcaccttctggtataccgatcaggaccgcacgaacgaatcgacctactgctactggccgcaggcgcatgcgatggacgtgctcatcgacgcttacctgcgtattcccgaaggcgacgcccgacggagcacctatgccggctacatgtccaaatggtacgacaacaagggcaacaactacggcaacagctattggggaacttacggtttcggcaatgcctacaccgacgactcggagtggatcatcctgacactgatccgcatgtacgaggctaccggagtacagaaatacctcgccgccgctcgcaagacctacgaggagacagtgatcgcccgctggaccgaagacgagaacggcggcggcatccgctggagcttcgacgccgagaacagcaagaacgcctgctcgaacggtccgggcgccctctgcgccatgcgcctgtgggccaacagccccgaaggagccgagagggatcagtatctggccgatgcgaagaagatttacaactggctcagctcgacgctctacaatccgctgacgggcgccgtatccgacaacatgaagaacggcgtgatcaacggcggcgcgctgacctataatcagggtacgttcatgggcgccgcgcacgagctttacaaggccacgggtgacgccaaatacatgaccgacgccgcgcgcgccgcgcgttacaccatgaagtcgatggtgaccaacggggtgctgaacaacgaaggttcgggcgacaacgcgcttttcaaggggattttcgtccgctatgcgatgaacgtctggaaggacgcttcggtcgataaggccgatgcggggctgcgccgggagatcgaggagttcctgatctacaacgggctggtctgctggcgcgacggcgtggacaagtcggagggatcgaagtggttcttcggcggattctggggcgagccgggatcttcgtgggacggccgtctgaacgagcaggtcagcgcttcgacgatgatcgaggccatggcgctgctgatcgagtagggacatggtcctcaggacaggcaaagagaaagagcgggtttcggcccgctctttcttcgtttgatctgctccgccggatgttatgccggatgccgtgtcgtggctgtggcggctgttatgccggagcctcgccggatgtgatgtcgtgactgttgcggctgtcatgccggaacttcgctgggggctatgccggactccgccggacgttacgccgaccggtctgcggcatcttcgctctcttcgcccacttcctgacggatctgcgagagtttctccttgcggtagactttgggcgtgcagccgtatttggcggagaagcatttgaagaaggtgccccggtttacgaagcccgccttgtagatgatctcgtcgatcgagagcttcgtggtcgtgagcagctgttcggccttggccagccggtactccttgatgatgttggtcggcgtctggttgaggatgccctccagccgtcggtagaggttgcggatgctcacgcccagttcgtcggcgatgaatttggtcgagatctccgtgttggagatgttgtcgttgatgatcttcagcatccggtcgatgaactccttgtcgtcctgatggagcatgcgcccgtcggaaagctcgaaggcgctgatcgaggacttgtagtagtccttgagcgaccggttgcggcggagcagctgctcggccacggctttgaggtattcgacgttgaacggaagcgtcaggcagatgtccgcgcccgactccacgcccttgatgcgctcgtcgatctgctgggccgtcgagagcaggatgaccgggatgtgcgaggtcagcttgccctgcttgatgaactggatgagtgacaggcagtcggactgctcggagagggcgtcgcagatgacgatgtcggggtgcatctgcttgagcagctcgatcatctcggttttgcccgacggcatcttgatgttgtagtccgcggcgaaaagctcggccacgaaattcatgatctccgaattgtcgttgacgatgaacaccgtcctgcggtttttgtcgaacgggaattcgcgccgcgtcacggtcggcaggggcagtccgtattctttggacgcgggcacgatgttgtctgcggtcggggcgttttcggccgtgactttcagctgcggcagcagtacggtgaaggtcgtctgcgcgttgggagtgctttcgaccttgatttcgccctgcatgcggaccacgatgctgtggcagatcgccagacgcaggtcgccctgaaacgagaggccgcgctcgctcttgcgttcgaaatagtcgagtacgcggtagcggtcgaaaatcgcttcgatgtcttcgagattgacgcccacgctgtcgttggaggccgagatgaggagcttgccgctgtcgctgcggatcgtgagacttacggcgccgttgtagggcgtatgcttgaaggcattggacagcagtgtgttgaggattgtcgaaagtccgtcgcggtcggtcggccacacgaggttgcgctcgatgtccagctggcagtggatgctgttctgctgcgaatattcgccgaaggtctcgaccatgctctgcgcgatctcggccacgggaaccagctcgatgttttcgctttcgtcgttctgccccgtgcggatgccgcggaactcgtggagcatgtagatcaggtcgtggagcttcgagacgttctgccgtatggtctgcgcgtatttgagcacataggggtccgccttgcggtaggcgagtatctgctggcagggggccgagatcatcgtcagcggcattgacagctcctgcgtgatgttcgagaagaagcgcatcttcgattcgtaaacctcctccttgcggcggatttcgagccgctgcagcttctcggcgcgtctgcgtcggtagcggagcaggtaatggcggatgacgcccccgactacggccagcagcaacagcacgtagagacatttggccgccgcggtcgcataccacgccggtttgagacgtatcggcagcgaatagaccggactttcggccccggtgatgttgttgcggtaacgcacgtcgagccggtaggtgccggccggcagatcggcgaacgagagttgcgacgacgcgccggcccactggtcgttgtagccgtccagacggctgtaatagctgtagttgctgccgttcacgtagtcgagcgccgagaccgtgatctcgaagatgcgctgtccgtgtctgagcgtcagcacgccgtcgcgggagagcatgtcgccgatgttgcggatgccgtcgttgagccggatgtcgcggaacagcatcgggggattgtactcctgctcgcggaagcccgtatcttcgattgtcaccagtccgtcgatgccgccgaagaagagggtgcccgtccgcgggtcggcgaaacaggccccgtcgctatattcgatggtgttcagtccgtacgaatagccgtaggtcaccacgtagcccgtgtggggcgagtactgcaccagaccgcggttggtgctcagccagaggtcgcctttgcggtcttcgagaatgccgtgcacggtgttgcggatgcccggaacgtgcgaggtcgaatcccgccggaattcgatcagcccgccgcttgtgccgaaccacatggtgccgtcgccgctgcggtggatggcgaagatgtcgttggcgatggcgctgcgccccgcgtcgaacttgaagacttcgctgccgccgccggcgatgtcgtagcggaccgcgccgccgccgcggttgccgaaccacatcgccgaaccgttttcggggtagagcgtgaagaagaagttcttgatctccagttcgtcgttgaaatgcagttgctcgaccccgcgtatcgagggctgcgacgccgtgccgcccagcgtcacgcggaatacgccgcagcccaccgtggccacccacagcgtgtcgggcgaagtctcgtacaaggcgtgtatgtatttgagcggcgccggggtgtggagcgtgcggatgcgccggtcgccgtacgaatagtagttcagtccttcgccgtcggtgccgatccagagcaggttgcgtctgctgcgggcgaaggcgtagaccgaattgtcgagcagctcgctgttgtcggccgtgagctgctgcacgtgcgccggggtgaactccttgcggtcgtagaagtcggcgatgcgcaggatgccttcgcctttggttccgacccagagcgtccgctcgtcgtcgatgtagagcgcgcggacgggtttcgagaggttgtagggcagttggttgaaggtgatcgagcggaacgccgtggcgttgcgcgtatgctggtagagtccctgtccgtcggtgccgatccatacgatctcctgccgggcgtcgcgcagcagcgaaaagacgccgcaggggatgttgatgtgctcggtggcgtatttcacgctctgttcgggcgtggtgcgcagccgtatgacgccgttggtgtagaacgagacgatgtagtcgccgccgtcgcggacgatgcttgacacgctgcccatgcgcgccatctcgtcgctcatctccttgatgtagatcagacggcgctcccggatgtcgaattcgtagaatatgtgcttttcgtcgatgaagaagccgctgccgttttcggcgaacgcatattcgggattcgagaccgtgggaaaccgttcgggacgtccgatgccgatccggtcgttgtttttgtccgggaatgcgaccggtatgcggaagatgcctttgcgggagaatacccacagggcgccgtcgtcgtccagctgcatgtcgaggatgtcggcgtagtcgatgccgggcatgggctgtacggagctgaaccggcgcgccgccgggtcgtaacagctgaatttgttgtcctgcgtgacgacgagcacttcgtcgctgcgccgtgtcacgattttgtacatcccttggaagtccgcatggcgttcgacccgcttgctgtcggggtcgaagagatccagtccgtagttggtgcggatccagaagagcgagtccgtggtgacggcgatctcctcgatgagatttcctgacagcggagtctctccgccccagtcgttcggaaagagccgcatccgctctccgtcccacatattcaggccgtcgcagcttccgacccagatgaatccgtgcttgtcctgagccagcgaaagtatggcgttgttcgagatgccttcgcggctcgatatctgccgcaggttgctggcgcggactgccgtacagaacagcaggagcagccagacgagaccggtttttcgtatcatgggaactttcggttgtgtgggtttgaactcttttgtgcaaatttatgcaaaatacggctgaaatcggataaatattgtggcgaaacgacctgaaaacagacaaaaatcgtatttttgcggttgcaaaaccggacccgacgccccgatatgcggggtcggaagcgcgaaaatgcctgctctggggtgtttggcacgtatctgtactatttcttcatggatacggactgccgattccccggcgttttctaattttgttagcgaaaacccgaaacccgtatgacctgcatgaaaaaaatcgtactcttgtcgctggctcttttctccgtggcggcgcttcgtgccgaaggaccggcggactgggcgcagtacggacgttacgaacttcagaatgccgtgttggaccggcccgtcgaggtggtcttcatgggcaattccatcaccgacggctggattcgcgtcgatcccgattttttcgaacggaacgggttcctcgaccgcggtatcatcgggcagacgaccgtccagatgcttgcccgtttccgcagcgacgtgatcgacctgaaaccgcaggtcgtggtcattctggcgggcatcaacgacatcgcgcggaacaacggcccgataaaactcgaaaacgtcttcggcaacatcgtctcgatgtgcgatctggcccgctacaacgggatcaaggtggtgctttgctcgctgctgccctgcgaccgcttctcgtggcggcccgaaatggatcctgccgaggaggtccgacgactcaatacgatgctggaacgctatgccgcggagcagaagattccctatgtggattaccatcgggcgctcgacaacggcagcggcggaatgtccgaagagctctcccaagacggctgccatccggttctttccggctatttgcggatggagccgctggtcgtcgaaggcatcaaccgggcgctcggcgttcagaaaacatggtatacaaccgtattgcctgcaaaataaccgataaatgatgaagaaactgcttattatggcttttgccgcgtctgctttcgcggcttgctgcaacaacggaggcgcggcgtgcgacgcccgcaacctcgatcgcgcaaaggcgacgctcgattcgatatatgcgcattacggcgtggccgaaaaccgtctgctgcgcgagaactatccgttcaatgtggattatacggcgagctacctcgcttcggcggatcaggcgcgccccaatccctattcctacctctggcccttttcgggaaccctctcggccgtgaatacgattctcgaagccgacgcgtcgtaccgcagcgtgctcgacggacgcgtactgccggggctggccgaatacctcgacacgacgcgcatgcccgcggcttacgcctcctatatcaatacggctcccgcttcggaccgcttttacgacgacaacgtctggctgggcatcgatttctgcgatatctacgaagccacgggcgacaaaaagtacctcgccgaagccgagatgatctggaaattcatcgagagcggtacggacgacgtgctgggcggcggcatctactggtgcgaacagcagaaacattcgaagaatacctgctcgaacgcacccggtacggtctacgcgctgaaactctacgccgccacgggcgacgaacgttatctcgcgcagggcaaggcgctctacgcttggaccaaggaacacctgctcgatcccgaagacggcctttatttcgacaacatcggcctcgacggcaagatcggccgcgcgaagttcgcctacaacagcggacagatggtgcaggccggggcgctgctctacaaggcgacgggcgacgaaagctacctgaaagacgcccagcgtacggcggccgcctgctacgaccgcttcttcggggagttcacgcccgaaggcggcgagaccttccgcatcatcaacaagggcaacgtgtggttctcggcggtgatggtgcgcggactggccgaactctacgccatcgacggcaatgcggcttacctcggcgacgtgcagcgcacgctcgactatgcgtgggagtatgcccgcgatgcgcaggggctgttcgagaccgactttacgggggcggacaagcagtccgagaagtggctgctgacgcagggcgccatggccgagatgtatggacgcatgagcggcgtgaaactggatcagacaaaataaccatactcaacttacacattgcaacaaaatgaaaatgaagaaaatccttaacatctgccttgcggccgccgtggtgtgcgccgcagagggcgtctcggcccgcacggtgagcctttccgctcccgccgaagccccgcagcccgctgcgcgcgaagccgcagctccgatgcctgccgacaatacgcgtatggccaagcccggcaagaagaccaaagcgcagacgccggccgcatatgccgcgacgaaccgtcccgccgaagccgaacgtctgttccgttcggaagccgtggaacaggagatcgcccgcatcaagggcgtgctgaccaacgccaagctggcgtggatgttcgagaactgcttccccaatacgctcgacacgacggtccgcgcccgcaaggatgccaacggcaaggacgatacgatcgtttatacgggcgatatccatgccatgtggctccgcgactccggtgcgcaggtgtggccctatctccagctggccaataaggacgagcacctgcgcagcatgctggcgggcgttatccgccgccagttcaagtgcatcgaactcgatccctacgccaacgcattcctcgatccctacgatccgaatcccgaccaccagtggatgagcgaccagaccgagatgcgccccgaactccacgagcgcaagtgggagatcgactcgctctgctacccgctgcggctggcttatcagtactggctgacgacgggcgacgcttcggttttcgacgagcactggatggccgccatcaagaatatcctgaagaccttccgcgagcagcagcgcaaggagggactgggtccctacaccttcatgcgtgtgaccgaccgtcagctcgacacggtctgcaatgcgggcaagggcaatccggtgaaccccgtggggctgatcgcttcggtgttccgtccttcggacgacgccacgacgttcctgttcctcgtgccgtcgaacttcttcgccgtgacttcgctgcgcaaggccgccgagattctgaccaaggtgaacgacgagccggcgctggccgccgagtgcaccgcgctggccgccgaggtagagaccgcgctcaagaagtatgcgacctacaaccatcccgaattcggcacgatctacgcattcgaggtggacggtttcggcaaccgcttcctgatggacgacgccaacgtgccgagcctgctggcgatgccttatctgggcgatatggacgtgaacgatccgatctaccagaatacgcgccgtttcgtgtggagcgaggcgaatccctacttcttccgcggtacggcgggcgagggtatcggcggtccgcatatcggttacgacatggcatggccgatgagcatcatgatgaaggctttcacgtcgcaggacgacgccgagatcaaacgctgcgtcgagatgctgatgaccaccgacgccggaacgggcttcatgcacgagtcgttcaacgtgaacgatcccgcggacttcacccgctcgtggttcgcatggcagaacacgctgttcggcgagctgattctcaaactggtgaacgagggcaagaccgatctgctgaattcgatagaggttaaataggttaatttccgaagggccgcggtctgactgcggccctctttttttatggcgttccgctaatcccgaatgatgatgaaacgattattcacgctgttgtgcgcgctgacgctggcctgcgccgccgaagccaaaaccgtcgaggccgcgtcgcccggcggaaatctccgacttgcggtcgatgtctcggaccggatcacttacggcctttggtccggggaggacaagatattggaaaactgtacgctgtcactgacgcttgccgacaggacgctgggcgaaaagccccgcctgcggagcgtgaagcgttcgtcggccgacgaggtgctcgaacggcgcaatccgaccaagaacgcttcggtgcgcaaccgttacaatgccgtgcggctcaatttcgcaggcggttacgccgtggagttccggctgttcgacgacggtgcggcctaccgtttcgtgacgtcgcttccgggcgaggtcgaggtcatgggcgaggcgtgccggctgggatttcccgctggaagcgaagcgtggctttccgaggtggacggtttccggtcgatgtacgaggagccttatacccgtgtggcgacggcggaatacgattcggcggaccgtatgagctacctgcccgtgctggtcggtatgcccggcggtaagaaagtgctgctggccgaatccgacgtgcgcgattacccctgcatgttcgtccggggcgacggcgcgggcggcttcgaatcgctgtttccgcgtgtgcccaaggagtatgcccccgccggcgaccgcagtctgaagatcgtcgcggaggagccgtatatcgcccgcacccaagggacgcgcaccttcccgtggcgggtggcggtcgttgcggaaaaggacgccgccctgatcgagaacgagctggtctggttgctcgccgaacctgcggccgacgccgactgggattgggtgaaaccggggctggtcagctgggactggtggaacggcatgcgcctgacgggcgtcgatttccgggccgggcgcaataccgaatcctaccgttactacatcgacttcgccgcccgatacggtattccctacatcatcatggacgagggctggtcggcttcgacgaccgacgtcttccatcccaatcccgatctcgatctgcaggagctgatcgcctacggccgggagcgcaacgtgcagatcgtactttggctgacgtggttggcggtcgagaaggatatggaccggctctttgcgacgctggaggagtgggggattcccggagtgaagatcgacttcatggaccgcagcgaccagtggatggtcggctattacgaacgggtgatgaagtgcgcagcccggcatcgccttttcgtcgatatgcacggctcctatacacccaaggggctttaccgcacctatcccaacctgcttacctacgagggggtgctcggcatggagcagggggcccgctgcaagcccgaaaacagcaactggctgccctttatccgcaatgccgtaggaccgatggacttcacgcccggctcgatgttctcggcgcagcccgaagacaaccgttcgacgggggccaatccgatgggaacggggacgcgcgcctaccagatggcgctgtacgtggttttcgaaagcccgctgcagatgctcgccgacaatccggtgctctaccgccgcgagcatccctgcacggagtttctggccgcggttcccaccacgtgggacagcctgcgcgtcctgcgcgccgcatgcggccgggaggtcgtcgtggcgcgccgcaagggcgacaagtggtacgtcggcggcattacgaacgaccggccctatacgaccgaaatcgcgctcgacttcctgcctgcgggccgtacctttacgatgacttcgttcgaggacggggtgaatgccgacctgcaggccacggactacagaaaacgggtgcgcgaggtggacgcttcgaccgtcgtgaaggtggagatggtgcgcaacggcggctgggcggccgtgatcgagtagcggggcgggatttttcaactctttcctgcacttggtcttatggcggttgcggggctttggctccgtgtccggagacgtggattatgaaaaaggagatgcttttcggcatctccttttactttgcagcgtgtgcgcgttctgcggcgattcgttttgccggcgtgcgttgccgcggacgcattttgcggcgacttgcagatgatgcgggcgcgtaccggatacggccgcattgtgtagcggccgtggtcgtataatagtgcggctgttgccgttgcggtggtgtatactgcgccgcggcaggtgcttgggcactgcggcgtgatgcgccgttaggcgtcttgaagcgatgtcgcaagctccccggtttgcggtgcgtacttccgcatccggtagagctggtcccgcaggcgcgggatgaagcccgcttcgcggatggcggactgaatgccttcggcgtcgaaactgttgtgcgccccggccgacgatacgacgttctcttcgatcatgatcgaccccatgtcgttggccccgctgtgcagggccgcctgcgccgtggctttgcctacggtgagccacgaagcctgaatgttggggatattgtgcagcatcagccggctcacggcgatgatgcgcaggtattcgagcggcgaaaagcgggtttccacgccctgccgttccagctcggtgcccgtcgaacggaaaatccacggaatgaaggcgatgaagccgtaattgccttcgggacagcgggtctgcaggtcgcggatgcgcaacaggtggtcgatgcgctggtgcggcgtctcgacgtgcccgtacatcatcgtcgccgaggtcggcagattcaggcagtgggcttcgtgcatcacgtcgagccacttctcgaccgagggtttggcgggggagatggcccggcgcacgtctgaatcgagtatctcggctcctgcgcccggcagcgaatccagtcccgcggccatcaggcggcgcagggtttcgagcgtcgtcagcccgcttatgcgggcgatatgcgccacttcgggcgcgcccagcgcatgcagccgcagcgaagggtagcgcgatttcaacccgctgaacagccgttcgtagaagtcgattttcagtccggggtgcaggccgccctgcaacagcagctggtcgccgcccagacggagcgtgctgtcgattttctcgcagtactgctccatcgtggtgatgaacgcccggtcggtctggtggggcttgcagtggaagttgcagaatttgcagcccgaaatgcagacgttggtgatgttgacgttgcggtcgatctgccacgtcacgacctgaggatcgggaaccacggcgcggcgcacctcgtcggccaccagcgccagctcctgcagcggggcttcgtcgtagagccggtaggcttcttcgcgcgagagcggctcccgccgccggcatttgtcgtagatgcgctgcacggcctatcggtttttgcgtcggttgctgcggcgcacctgcggcccctgtccttcggcgggcgcaggggtgcggagtccgtcgagcagcacctcgaagtcgagctggcgtttctgcaggtcggcgcgtttgacgcggatgcgcacggcgtcgcccagcgtcatgcgtcggcccgtcgagcggccgatgatctggtagttggcctcgtcgaactggaagaagtcgccgtcgatgtcgcgcaggaacgacatgccctcgatatgggtctcgtccagctcgacatagattccccactcggtgagtcccgaaatatgtccttcgaactcttcgccgatgtgctccttcatgaattcgaccatcttgtacttgatcgacgcgcgctcggcttcggcggcgatgacttcgcgttccgaagcgcggaagcacaaatcttcgagcatcgtcttgtcggccgccttgccgtcggcgagatagcgcgccagcagacggtggaccatcatgtcggggtagcggcggatgggcgaggtgaagtgcgtgtaataggggaatgccagtccgtagtggccgatgttgtcggtcgtgtaatacgccttggccatcgaccgtacggccatcgtcaatacggcgttctcctcggtcgtgcccttgatctgggcgaaaagcttgttcagctccttggccacggcacggcccttggcggccttgaagatatgcccgaagcggaggatgaactgccggaagcggtccagcttctcctcgctcggcgagtcgtggacgcggtaaaccatcggacgttcgacggtgcggcccttgtcggtcttgcgtttgccgcagaactccgcgacgcggcggttggccagcagcatgaactcctcgatcatctggttcgattccttctgctccttgaaatagacgcccagcggtttgcctgtctcgtcgagtttgaatttcacctcttcgcggtcgaagctgatcgcgccgttcttgaaccgctgccggcgaagcgcctgcgccagccggttgagcgtcagtatctcttcggcgtagtcgccgcggcccgtctcgatcacctcctgcgcctcggcataggtgaagcggcggtcggagtagatcaccgtgcggccgaaccactcttcgaggatgtcgaggttctcgttgagggtgaagaccgccgagaaacagagactcgtttcgtgcgggcggagcgaacaaagctcgttcgaaagccgttcgggcagcatcggcacggtgcggtccaccagatagaccgaggtgccgcgttcgacggcttcgtcgtcgatcgtcgattgggggcgcacgtagtgcgtcacgtcggcgatatgcacgccgatctcccagacgccgtcccggaccctgcgcaccgaaagcgcgtcgtcgaagtccttggcgtcggccgggtccaccgtgaaggtcgtcacctgcctgaagtcgcggcgtgcggcgatctccttggcggtgatgctgccgtcgatggcctctgcggcctgctctatttcggggtcgaagcggtagggcagctcgtattcggccagaatggcgtgcatctccgtgtcgttgttgcccgccatgccgagccgttcgaccagctcgcccacggggcttttgctgccttcggcccagtcggcgatgcggaccacgaccttttcgccgtctttcacgtcggggtattgctttttcgagaggtagatgtccatcggcatgcggcgcgagtcggcccgcacgaagatctggtgcgcgcccacctcggccacgccgacgtagggtttgcggctgcgttcgacgatgcgcgtgatttcgccttcgaatttcccgtcgcggccgcggtggatggccaccacctccacgcggtcgccgttcagggcgttggccgtgttgcgctgattgacgaaaatatcgttctcctcgccctcgacccgcacgtataccgaaccgctcgccgtcatgtcggcgatgccttcgaagtggggcaggtgcttgtgcgtgagcctgtatttctcgcgggcgcactcctcgacgatgccttcgtcgtgcaggcgtcccagtatttcgaacgtctcgcggcgtccctctttcgtcgcgccgcccgaagccgacgcgaggtgtttgagcgagaatttattattggggaattcacggaaaagactcaggatgactgccgcccggtccgtgtttttcgcgccccttgcgggacggttcttttgtgattgctttttcatttcttcagaatttggagggcaagacgtttcatgtagtccatgcccgtgtcgatggccccttcgtcggggttgaacgtcgccgtatggggccgtccggccgcggcgcccacgcccagccggtagaacagcgacggatatttggtacagtagaagccgaaatcctccgccgtggtgcgcagcggcagcatttcgacccgcagcccggcttccgcagccagcgccgccgcatgcttgaccaacgcggcgtcgttcaccacgcaggggtagccccggctgatatcgacgtcggtccgcacgccgtggcgcttgtcgatgtccgcggcgaagttgcggatgcgtttgtggatgatttcgcgctcgcgttcgtcgaaggtgcggagcgtgccttcgagatagacctgatcgggcacgatgttcgtggcgcccccggcctccacgcggccgatcgagagcacgcactcttcgtggttgagcgccacgagccgcgtcacgaactccgcggcggccgccaccggatccttgagctgcgggcgcatggccccgtgaccgcccgtcccgtgcaccgtgaagcgcagttcgtcgcttgcggccatgtatttgccggcgcggaatcctagcgtcccgacttcgagctgcggctcgacgtgttcgccgaccacggcccggacgtcgtagccttcgaacggattttcggccagcaccagcgacgcaccgcccggattgcactcctcgcccggctggaacagcccgaagatcgtgccgcggaaatccggctcggcggccagctgctgcaacacgccgaacagcaccgcggcgtgcatgtcgtggccgcaggcgtgcatgaccccttggttgcgggagctccagtctgcgtcgttccgctcgtcgatcggcagggcgtcgatgtcggcgcgcagtaccacggcccggcgtttggggtcggctttgccgcggccttctatcttcgccagcacgcccgttccggctatgggacggtgctcgatgcccagctccgagagccgggcggagataaaggccgccgtgtcgtgctccctgaacgacagttcgggatgcatgtgcaggtgacggcggaattggatgggattcatttgagttaaaatatcgcttttgctatcttgatgatattgtcggccttgcccatcgggtagtagtgcagtacggggactccggcctgtttcagctcccggctctgggcgacggcccattcggtgccgacttcgcggatcgccttgggatcctccctgtggcgcaggacttcgcgttccaactcttcgggaatgcggcagccgaaggtctgcggcagcagcgtcaggtggcgcagcgtcgagaggggcttgatgccggggatgatcggcaccgcgatgcctgcttcgcggcagcggcgcacgaagtcgaaaaagcgggcgttgtcgtagaagagctgcgtgacgatgtacccggctccggcgtcgatcttcgccttgagggcggcgatgtcggcttcgggcgagggggactcttcgtgcccttcgggataaccggccacgccgatcgagaatttcgagtggtggcactcctcgacctcgccgtccacgaattcgccgcggttcatggccgcgatctgccgcacgaggtccacggcgtgcgaatggccctgcgggtggggcatgaagaacttctcgttctgcgacttgtcgcccctgagagccagcacgttgtgcaggccgaggaagtcgaggtcgatcagcgcgtcctcgatgtcgtatttcgactgtccgccgcagatcaggtgcggcacgacttcgacgccgtacttcttctgaatggcggccgagatgcccaccgtgccgggacggcggcgcaccacgtgccagtcgatgcctccgtccggacgcacggactgcttgattccctcgcggtggaaggtgacgttgatgtaggccgggtcgaatccgatgagccggtcgatggctgcgaatacgccgcccatgccgtcgcccttgaggggcgggagcagttcgaacgcgaagcgcgtgcggtgttcggcgatggccgtattgattatgtccagaacattcatggttcggtctgttgttgctttggttcggcgggcggggccgccggggcgttcccgcgcgttaaatattattgggtatcagtttcttgatctcttcgacctccatgccgcgccgccgggcgtagtcgagcagctgcttggtgtcgatcgtgcctacggagaagtagtcggcgtcggcgaacatcagtccgcaaagcgcttcgccgggatcgatcatgtaattctcggtgagcttcatgcccgtcgtcatttcgaccgacagcaggtcgaagacctcgcgcttgagcgaatggtcgggcgacgcgggatagccgaaggccatgcggcggccgcggtactggccgcggacggtctgctgcggcgtgagcggctcgcccgtttcgtaaccccacatctgccgccgcacgaacgtgtgcacggcttcggcgaaggcttcggtcagccggtcggccagcagtttggccatgatggcaccgtagtcgtcgccctcggcgcggaatttttcgcagagttccctgagtccgatgccggcggtgacggcgaaacagccgatccagtcgctgtgcggcgcgatgcagtccgccagcgagcggttctcctccccgcgcgtctggttgcggagcatcgccagccggcgttcgcggcctttctggtcggtgatccagatgtcgtcgccctccgcgcgcgccgggaagatccccacggcggcctgcagcgtgagcagccgttcgtcgcggatgcgggccagcagggcctcggcgtcggcgaagaccttgcgcgcttcggcgcctttttcggggtggtcgaggatttcgggatagcgtcccttgagaccccatgccgcgaagaagaagctccagtcgatatagggttcggcgtcggcgacgtcgaagtcggggaagaccatgcggccggggtgcagcggctcgacgggcaggtgcggggcggcgcctttgcgggccttgcggacttcgacgatcggaatcaggttccgggtgcgttcggcgcgcaggtagtcgctgcgcagcgactgctggtcggcgcggaccttgtcggcgtacagctggccgtcggaaccgagcagctgcgccagaatctggctgttgcggctggcgttgggcgagtgtatcaccaatcccgaatagaccggggcgatcttcacggcggtatgcaggtccgaggtcgtcgcgccgccgatgatgaccggaaggcgcagcgcgcggcgttccagctcctcgcagacgtgggccatctcgtcgagcgacggggtgatcaggccgctcaggcagatgcagtcggcgccccacgctacggcctcttcgacgatccgctgcgattcgaccatcacgccgaggtcctttatctcgtatccgttgcaggccatcacgaccgccacgatattcttgccgatgtcgtgtacgtcgcctttgaccgtggcgatcagtaccttgcccgcgttgtgaggggtctgggcgctgccttgctcgatgtagggggtcagggccgccacggcgcgcttcatcacgcgggcggtcttcacgacctgcggcagaaacatcttgccctcgccgaagagcgtgccgacccgctccatggcgggcatcagcagggtgtcgatcacggccatcggcgttccgagggcttcgtagccctccagcgcgtcctgctcgatgtagtccgctacgcccttgagcatggcatggccgatccgttcggcgagcgttcccgtgcgccatgcgtcggggacctgcggctgggtttcggccgtggcgcgcacctgctgcgcatattcggtgagccgttcggcggcgtcggcccggcggcagaggatcacgtcctcgacgcgttggagcagttcgggttcgatctcgctgtatatcttcaccatttgcgggttgacgatgcccatgtccatgcccgcgcggatggcgtggtagaggaacgccgagtgcatcgcttcgcgcacggcgttgttgccgcggaaggcgaacgagaggttcgacacgccgcccgacacctttgcgtaaggcaggttttccttgatccagcgcgtcgcgtcgataaaggctttggcgtagtcgtcgtgttcgggaattcccgtcgccacggccagtatgttggggtcgaagatgatgtcttcggcggggaatcccgcgtcggtcagcaggcggtaggcgcgtgaggccacctcgatcttgcgctcgcaggtgtcggcctgtccctgctcgtcgaagagcatcaccaccgcggcggctccgtagcggtgtatctcccgtgcgcggcgcaggaattcggcttcgccctccttgagcgagatcgaattgaccacggccttgccctgcgtgacctccagacctgccgcgagcacctcccatttcgaggagtcgatcatcgtcggcacgcgggcgatttccggctccgaggccatcaggttgaggaacgtgcgcatggcttcgacgccgtcgatcatgccgtcgtccatgcagacgtcgacgatctgcgcccccgcatcgacctgcgcacgggctaccgacagagcctcttcgtaattgccctcgcggatcaggcgggcgaatttggccgagcctgcgacgttggtgcgctcgccgacgttgacgaaattggtttcgggtgcgatgcgcagcggctccagtccgctcagcgtcgtgacgcggcgcggcgccggaacggggcgcggggcatagttgcaggcgattttcgaaagttcgaagatatgcgcgggcgtcgtgccgcagcatccgccgacgatattgaccagtccgcggcgcatgtattcgcccacgtccttggcgaacatctccggggtctcgtcgtagccgcccatgacgttgggaagcccggcgttggggtgcgccgagatgcggaacggggccgtttcggccagccgttcgaggtagggcagcagctgtttggctccgtaggcgcagttaaggccgagggagagcagctgtgcgtgcgacagcgaggtgcagaaggcctcgacggtctgtcccgacagggtgcggccgctggcgtcggccagcgtgcccgacgccatgacgcagatcgtgcggccgagtttttcggccagcgcgtcgatcgcgtagagggccgccttggcgttgagcgtgtcgaagatggtctcgaccagcaggatgtcggctccgccgtccagcagtccccgcgcctgatcggtgtaggcttcgacgagttgtgcgaaagtcacttcgcgggccgcggggttcgccacgtcggccgacatcgaggccgtgcggttggtgggtcccatcgaacccgccacgaagcggggtttctgcgggttgcgggccgtgaattcgtcggccgcgctgcgggccgcggccgccgccgctcgcgacatttcgtaggcgtacgcctccagtccgtaatcggccagcgatacggcgttggcgttgaacgagtcggtttcgatgatgtcggcccccgcctgcaggtatttgacgtggatttcgcgcaccgcttcgggccgcgtcagggccagcaggtcgttgcaccccttgagcagcgcgggccactcgcggaaccgttcgccccggtagtcctcttctgtcagtccgtactgctggaccatggtgccgaagccgccgtcgagcagcaggatgcgggattcgagttgttcgtatatgtcggccatttatttctctctgatttcgatttcaaacagtttgttccagtttttgcccgtgacgaagatgcgccctccggccgcgtcgtatgcgatgccgttcagcacgtcggtcgccggagtcacatcctcttcgggcagcagccccgtcagatcgacgatcccctccaccgcgcccgtcgccgggtcgatgatgacgatttggtcggtggtgtagacgttggcccatatcttgccgtcgatccactccagctcgttgaggaagttgagcgtctcgccccggagcgtcacggtagtgcgcttttcgcgtttgaaggtggccgggtcgagcgtgtagatgtttgccgtgccgtccgacatgtagagcttcttcccgtcggtcgtgaggccccagccctcgccgggatagcggaactccttgagtttctctcccgtccgggcgtcgtagacataggctttgttcgactgccacgtgagctggtagaccttgccgtccaagagggcgatcccttcgccgaagtcctccttgggaagacgtgcgaagacctccgcgcggcccgtcgcgaggtcgagcgtctgtacgaccgattcgccgtgctggcccgtgccttcccacaaacggccgtcggcgtattgcaggccctgcgtatagctggtcgccgggtgcgggtggaccgcccggacgccgtaggtgtattccttgggttccgccggcgctgcggggcgtttggcccggacctgattgccgccgcacgaagccagcagcactcccgacagcagaacggtagcgaactttctcatctctttcttgtgaattcgtcagcaaagacagcgcgagccggaaactgaagcgaatttattcggccgggccggacgccgcctgtctgagcggaggtttatcctccgcaaagataggaaaaacccgccatatgacgaattttttgactatctttgcgtttacccgcgttttcggatgcctgcgcatttcccgaaaacagcctttgcggagtttgccgccggcggttgcaatacactatattttggaaaaaatattggtttgtccgcgaaaatcgctatctttgcgggccgatttcggaaataagacaacaacaatatagaaagtattcattatgaagatcgtaagagaacaacgcgaagagaacaattcgctgctcaaggtaacggtgggcgaagaggattacggccaagccgtcgagaaagagttgcgcgaatacaggcgcaaggccaatattcccggtttccgccccggcatggtgcccatgggcctcgtcaagaagatgtacggcaagggcgtgctggccgagcaggcctaccgcaccgcctcgaactcggtgttcgagtatctccagaaggagaacatcgactacttgggcgacgtgattccttcggaagagcagggcgatttcgatttcgagaacggcaaggagttcgaattcgtgttcgaaatcggcgaggctcctgagataaaactcgaactttcggacaaggataagctgacctacagcaagatcaaggtggacaagaagatgcacgacgactaccgcgccaactacctgcgtcagtacggccgtttggtcgatgccgacgaggtgacttcggacgaggcgttgtcggtcacgctcgacaacggcgagatgaacgtggcggacgcttacgtgggcctgatctcgatgtcggaggaggagcgcaagcccttcatcggcaagaaggtgggtttcaagaccgaagtcaacgtcaacgaactctacaagaacccgtcgcagcgcgccgccgtgctgcaggtcaaggagaacgagctggagggcatcaaacccgaattcacgctcgaaatcaccaagatccgcaagttcgccgaacctgagctgaacgaggagttcttcaagacggcattccccggcggcgaggtgaaggacgaggccggactggacaagttcatcgacgcgcgcatcgagccggagctgcgccgcgaaagcgactacctcttcacgctccagctgcgcgactatctggtgcagaaagccggtctgaagatgcccgaagcgttcctcaaacgctggctgtatacgatcaacgaaggcaagttctcgatggaggacatcgacaaggacttcgaccagttcctgaagatgttcacgtggaactacctgcagaagcacttcatcaagcaggacaatatcacggtgaccaaggacgaggcgctcgcggaagccaaggcgctggccgccgcgcagttcgcgcagtacggcatgccgtcggctcccgaagatatgctggccggctatgccgagaagatcctcgccgacaaggatcagggacagaagatctacgagaagctgtacgaagtgaaggtcgtggaggatgtgaagtcgaagatcaaggtgacggaaaaagccgtatctgccgacgatttcgccaaattggccaaggcgctttagtatttgccgaaaaaagattatctttggactttgcaggcgtgatgtttgcaaagtccttttgtttgacgatatacagctttaaacgccgtttcggcgacagtccgccgcccgcagctcccgcccggagccggccgtgggccgcgaataagagatgccgggctgccggccggcggtaaaaacgatagcgatagcggcaaacgataacgaacgataacaattacgataatttattatgtcagaatttgaaaaatacgcacggaaacactgcgggatcagttcgctgaaactgcacgatttccagtcggtcagcggcgcctacgtgtcgcctacgatcatcgaagagcgtcagctgaatatcgccacgatggacgtcttctcgcggctgatgatggaccgcatcatcttcctcggcgcgccgatctacgacgacgcggccaatatcattcaggcgcagctgctgttcctcgaatcggtcgatcccgaaaaggacattcagatatatatcaactcgcccggcggttcggtttcggccggactgggcatttacgacacgatgcagcttgtcaattccgacgtggcgaccatctgcacgggactggccgcttcaatgggcgccgtgctgctcacggcgggcgccaagggcaagcgttcggcgctgccccattcgcgggtgatgatccaccagccgctgggcggtgcgcagggacaggcctcggacatcgaaatcacggcacgcgagatcatgaagaccaaacgcgagctgtacgagattctctcggcccattcgggcgtcgcgctcaagaagatcgagaaggacgccgaccgcgactactggctctcggcgcgcgaagccaaggagtacgggctgatcgacgaagtgttatccaaacgcgggaaataatggcatcgggaaaaggcaacaaccataagaacggggcgggcggcgactgctgctcgttctgcggcgccaagcgcagcgacgtggagatcatgtttcagggcatcgacggcgccaacatctgcaacaaatgtatcgaaaacggctaccggatcatcgtcgagaacgacgtggcttcggagcgcggcggcagcgcagccgctgcgccgctcaagatggaggagctgctcaagccggcccagatcaaggatttcctcgaccagtacgtcatcggtcaggacgacgccaagcgttatatggccgtggccgtttacaaccactacaagcggctgctctacgcccccaaggaggacgaggtggagatcgacaagtcgaacatcgtgctggtgggacccacgggtacgggcaagacgctgatggcccgcacgatcgccaaactgctgaaggtgcccttcaccatcgtggacgccacggtgctgaccgaggcgggttacgtgggcgaggacgtcgagagcatcctttcgcggctgctgcaggtcgccgactacaacgtcgagcaggccgaacgtggcatcgtcttcatcgacgagatcgacaagatcgcccgcaagggcgacaacccttcgatcacgcgtgacgtttcgggcgaaggcgtgcagcaggccctgctgaagattctcgaaggaaccgtggtcaatgtgccccctcagggcgggcgcaagcatcccgaacagaaattcattcaggtcgatacgcgcaacatcctcttcatctgcggcggcgcgttcgacggcgtggagaagaagatcgcccagcgtctgaacacccgcgccatggggtacggacggctccgtgccgaccgcatcgaccgcaacaacctgatgcagtacatcacgccgcaggacctcaagtcgttcggactgattccggagctggtggggcgtcttccggtgctgacctacatgcagcccctctcgcgcgaagccctgcggtcgattctcaccgaaccgaaaaacgccatcgtcaagcagtacaagcggcttttcgagctggacaacgtcaagcttacgttcgacgacgcggtgctggattacatcgtggacaaggccgtcgagttcaaactcggcgcccgcggcctgcgttcgatctgcgaggcgatcatgatggacacgatgttcgacctgccctcgaccgacacgcggaaattcgtcgtgacgctgccatatgcaaagaaaaagatagaaaaagcaaatattttagagcttaaacaagttggttagtatcttttttattacttttgtggcagaagatacgctgattaatacaaagactttaaaactttaaatactcatgtcatctaccaattccaaactaacgcgtgtagcggacaatatccgaattttgtcggcctctatggtcgagaaggcgaaa

SEQ ID NO: 12041 - DNA, 66201 bp, Unknown
  gut microbiota DNA sequence
tgatggttatattatttgcaaacataaaaaagaggctgcctaagttagaattgttagacagcctctttttgttgtcgggagccgtctccggccgtcccgtcggtcccgtgaccgggaggggcggctcacggcatccactccagcacgccggtgacggggtttgcggcgcgccatgcctcgaattcggcgtaggtgcggactccgtcgcgcagcacggcctgataatattcgatacccatgattttctcggtctccggagtttcgtatttgagccggaggatggtttcgcgcgtttggtcggtcagcacggcggcgatccggtcggccacccgttcgaaatagccgtcgtaggccgagcctttcggcatgtggatcatgtcgatctgccaaagctggtcgtcggcgtcggcataccatgcgtgccattcgaggcactcctcgctcgtgtcgagcaggttgccgtattcgatgcggcggatgcggctgttttcggccagccgggccatggcggcgaagctgtccgctacgcgcaggggcgatgagtagatgtggaagtcgatgtcgcggtgcgtcatcagcagtcccgtgcggagcgagccgaccagatgcggttcggcgcccacggaacgccagatgctttcgatgccgctgtcgcggatgacctcttgggcgcgctgctggttcgcggcggcgagggtgctgagtttgtccattgtgcgatgctatgaagggttaaaagggcttgccggagcgaattcgttccggcaggcttgcggtttgtcggggtgttatttgccgagcaggatgcgggcctgcgcgactgcggcgtcggttattcggctgccggagagcattttggcgatctcggtgatgcgttcttcggccgtcagacgccggatgccggtgcgtccgtcctgcttgtagaccacgaagtgggccgagcctttcgaggcgacctgcggcaggtgggtgatgtccacgacctgcatcgtcgccgagagcgactcgatgatctctcccatggcgtcggcgatgcggcccgaaacgcccgtgtctatttcgtcgaagatgaccgtcggcagctgcatgcaccgggccagcagggctttgagggccagcatgacgcgggaaagctcgccgcccgaagcgatccgctcgacgggctggggcgttgcgctgcggttggccgtgaagaggaaaaccacattgtcgcgacccgtgcggcccagttcggcgagcggcgtcagcgccacttcgaacaccgtgtcgggcatgcccagctgcgtcagcgtcgcaaggatctgtttcgcgaagcccgcggcggctttttcgcgggctttgtgcaggcggtcggccagtgcggccgctttctgctcggtttcgtgcagcgctttttcggtcgcggcgatctcctcgtcgccgtggacgatggccgccagccgggcggcgtaaccgtcgcgtgcggcgatcagttcggcttcggagacggcgcggtgcttctgctggagcgcatagagggtgtcgagacgcgccgagagcttcgccagccgttcggggtcggcgtcgatccgttcgcagtcggcggccgcggcgttgtcgatgtctttcagctcttcgagcaccgagtggatgcgctcggcgtactccccggcggcggggtagtgttcgcggatgcgtacgaggtcgttttccgagtttttgagcagggtgagaattcccgtttcgtcggcgtcgaatgcgttgcggagcgtggtgaggacttcgccgatgcggtcggcgttttccagtacggcaagttccgcttcggtcgcggcctgctcgccttcgcggaggttggcggcggtcagctcttcgcactggaaacgcagccactcctcgtcgcggcggccgtcggctgccgcttcgcgcagggctgcgagttggcgccgcagttcggaaagccgggcgtactgcgccgtgtactgcgcgagcagcccgccgtttccggccacggtgtcgagcgccgaagtgcggaactcctccgaggagagaatcaggttctggtgctgggagtgtatgtcgatcaggcgggtgccgaattcgcgcagctgcgcgagctggaccggaatgtcgttgatgaaggcgcggctcttgccggccggggttatcatgcgcgtaacgtgcgtttcgggagcatagtcgaggtcgttctcgtcgaagaacgactccatgccgcggcccgaaaggtcgaaagtcccttcgaccacgcagttgcgcgccgcgtctttcatggccgagccgtcgttcttggctccgagcagcaggcccaaagcaccgagcaggatggatttgccggctcccgtctcacccgtgatgatgttcaggtgcgggtccagctccatttcgagcttttcgataagcgcgtaattctcaaccgacagacgacgtaacatggcggcctattttaacagtgattcgattttatcggcgatgcgttccgcgacttcggacttcggcatcaggggcagttcctcccggccgctgcggtcgatgaaggtgactttgttggtgtcgccgcggaatccggccccggcgtcgcgcagcgaattgaggacgatgaagtcgaagtttttcttggcgagcttggcttcggcgttggcctgttcgtcgtgggtttcgagcgcgaagcccaccagcaggcggctgcctttgcgtgcgcccagttcggcggcgatgtcgcgcgtacggcgcagggtgatgcacatttcgccgccgcattttttgattttcgtctccgaaacggcatcgggcgtgtagtccgcgacggccgcgcacatgacggctccgtcggctcggtcgaaagccgcggtggcggcgtcgtacatctcggcggcagaaagtacgtccgtacgccggactccggagggcgtcggcagggccgtgcggccgctgacgagcgtcacgtcggcgccgcgggcggccagtgcgcccgcaatggcgtagcccatcttgcccgacgagtggttcgatatgaaccgcacggggtcgatggcttcgatcgtggcgcctgccgttacgacgaagcgtctaccttgcaggctcttttttttttcgggattttctccgccgagcagttggccgacgaaagcggcgatgtcggcgggttcggccatgcggcccttgcccgtcagtccgctggccagctcgccttcggcgggctggacgatccgcacgccccgttcggccagacggcgcaggttctcctgcgtcgcgggatgggcgtacatgtcgaggtccatggccggcgacacgacgaccgagcagcgggccgagagataggtcgtcagcagcaggttgtcggcgatgccgcaggccattttggccagcgtattggccgtggcgggggctatcaggtaacagtcggcccactcgccgagcgagacgtgcgaattccacgctccgttttccgggtcgaagaattccacgagaatcgggtttttcgagagggtggccatcgtcaggggcgtgatgaactgcttggccagcggcgtcatgacgacgcgcacttcggcgcccgcgcacttcaataaacgacagagcacagccgccttgtaggccgctatgcttcccgtaatgcccagcagtatgcgccgtcccgcgagtccttcgaccgtgcggccggcgccggggctttgtatgtcgtgtccctgcgagtccatgccggcgggctgttacgcctccttgacctctttgttctccttgaagaaaagctcgtcgtcgaggaactcctcggtggcgatgatcgcgggcttgggaagacgctcgtaatagcgcgaaatctcgatctgctcacggttctcgaaggtctcctccatggtgtccgtgggcgatgagaagtcggcgagcttgcggttcagctcggtcttcagctcggttgcgatctggttggcgcggcgggcgatgatatttatcgactcgtagacattgccggtctcccggtccagatcgaccagtttacgcgtaatggtgttgttgggaatgttcttcttgatttccattgctatatgttgttgtcttcttgcttgttgcggtccagataatcgcgggcgtgctgggccatgcggtccacctccttgatgtgcttcgattcggggaactcctctttgaacgagaggtacgagtcgagcatcgccagatagcggtcggtctgcttctcggcgaccgagttgctggcgaagcggtagctggcgtccacgatcaggtacatgatctcctcgcggtgcgaactttcggggtattgcttgagcgcgttcttgagcgatacgatggccgacttgtagcggcctatcttataataagtgtatgcgttgaggtaggccttgtcgtgcaggcgctgcgtcagctcggtgttgatggtcttgaaattctcgatctgctcgctgtgcggatagcgcgacatgaattcgttgatggcgatcagcgcctgtccggtcatcgtctggtcgcgcgaagggccgggcgaaagatagtagaagcagagtgcgtacatgccttcggcgtcctcgatgaaggcgctgcggccgaacttgcggcggaaatcgtcgagaagcgtcgccgccgtgtcgtaatcgcggttcttgtatttgcagcgggcgttgaagaacgaaatgctgtcttcgcggggcgtgccggagtagtagtgctggacgccttcgaagagcgtcgaggcccgcgaccacttctccttctggtagtactccagcgccttgctgtaaatcaggtcgggttgtccgcttttgagcagggcgttgattcctgcgcatccgctaaatgcagtgatcaggatcactccgcacacggcgtataaaaaagtctgcttcatcgataaatcttttacggcgctttatcgcgcaaagttacgcataaattaacgatttgcaaaattatttattgtgcaaaaaaagagtgcgtcgccgcaccctttgttttcgctcagaagaagaacccgaccgaacctccgtaaacgaggttgcgcgggaccctgacccgctgcgacacgccgtcggagacgaaggtgttccagacgtgcgaacgggcgtaaccggacaggcggaagtcgaaaaagaatttccggatgttgaatcccacgccgcccatgatgccgacgtcgtcgttgaaattcaccttcagcagtttcggggcgctgtcccgctcggagtcggccacgcggaactgggcgccgccgaagagccgcagaggcccgaactggagacccagctgcagcgggatttcgaaccgctccgaacgcagcgagacgctgcgggtgcgggggccttcggcgcggatcgagtaattgacgaaggcgaaatttagctccgactgcagatgcaggcggcgggtgaggttgaaccgcaggaccaagcccgcctgatagcccgccttggcgggaccgggccggaatcggttttctccgatttccacacgggaaaaggtgtagctggtggtggtgacgccgccgcggacgccgacctgaaagcggcgctgggccgaagcggcgccggtgagcagcagcgcgcagagcaggagcgggaagagatgtttcatgccgaaattagctggttttaaggttgctgcggaggttacatcaggggtgacacgagccgcagcacatcgcccagcgtgcgccgccatgccgccggccgccactcgtcccgcacgatccgccggcacgaggccagatcgccgtcgaaggtggcggacagctcccggacgacctcccggtcgcggatgaaggccgtgacttcgaggttgtccagcagactgcggtaatccatgttcgccgttccgaccgaagccgtgtcgtcgtccacgatcagcagtttggcgtgcagaaagccgttgtcgtagcggtagagttcgattcccgcgtcgagcaggtctccggcgtaggagtcggatatcaggtccgtgaacggcgagtcgctgcacgtcgggatcatcacctgcaccctcacgccgctccgggccgccagccgcagggcgtcgagcagcatcgcgggcggcaggaagtagggcgaggatatgcgcaccctgcgctgcgcccggacgatggccgcggcgaacgcctcggcgatggtcagccgcgagggaccttcctcggcccatgcgagctggatcggcagccgctgccggatgtcgtgcggcgcgatatggcggcggatgtcgagacattcgccgcgtacgcgcgcccagtcggcgatgaagagcttctgcaggtcggcgacggcgtcgccttcgatgcgaaggtgctcgtcgcgccacttgcccatgtaatctccgtcgaggtagtatttcgcaatatttatgccacccaagtaggcgacctttccgtccgtaacgactattttgcggtggttgcggcgggtgacgcgcgtggtgaaccacgggaaacgcaccggttcgaaagccgccgtctcgacgcccgcctcgtgcatgcggcgcagcatcgtgcggctgagccgccacgagccgacggcgtcgtagatgacgcgcacttcgagtcccgcgcgggccttgcggatcaggatttcggcgatggtgcgtccgatgcggtcgtcgcggatgatgtagtactccatgtggatcgagcgcacggcccgctggagcgaggcgatcagcgccgtgaaggcgttgttgccgttgtggagcagttcgacgctgttgtggcgggtgatgcgcgtgccgcagccccgtgcgatgatctgtccgagacggtcgccgcggtatgcgcggcgttccgccgccgggaggtgcggccggtaacccgccagtatgtagagcagcgtgccggccacgggaagcagcaggatcagcgccagccacgccgcagccgatgcgggcaggcgtttctggcgggtgacgagcgggacggctccgagcgtccatgcgatgtgaattgcaagcagcagatacataacccgtgcgtgagggcatactccgtgccatgcaggttgaaaaaagatttggaaattcggaatatactttctatctttgctgtataatgaaaatcagggttctggccttcaccggtcaggattcttatttttttacgttgtttaattcgaaatttctcctctgaggagggggattcaggaaggttttagatgcggggcgggcgttttcggatgcctaaagtgagttcgacgggttccggcatttgaaatctttcgcggtgttatgaaactgaatacgtcggactcgtataaaattatggcaaaagagattatctatctgacggcggaggggtacaagaaactcagggacgagcttgatcacatgcgttccgtcgagcgtcctgcaatttcggcggcgatcgccgaagcgcgcgacaagggcgacctttcggagaacgcagagtacgacgctgcgcgcgaggcgcagggtatgctggagatgcgtatagccaagctggaggattcgcttgccaacgcacgggtgatcgacgagtcgaagatcgacaagagcaaggtgcagattctgagcaaagtgacgctgctgaatcacaacaccaagaaggagatggtctacaccatcgtcgccgaacacgaagccaacctgcgcgagggcaagctggcgatcggcacgccgatcgccaaggcgctgctgggccacaagaagggcgaccgggtcgacgtggaggttcccgccggaacgatccacttcgagatcctcgacatcagcatttaggcgccccttcccgcagggcagcggcgccgcatcgtccgctcccggccgggtgcaggacacgacatacatccccatttgtgggtatttttgcaggaccgttttgtgcggtcctttttttgtgctacttttggcagcagaaagatgatacgcaaagcacccaaacggatatacgccgctctgctgctgctgattctggtcgcagcgtacgcaggacacaaggtccacatctataaggaggaccctgcgcatttcgccgcgctctgcggcgatctgctgcccgacaacggcgcgcatcagatcatggtggaacgctgtatcgtcgatgacttctatttcttcccctatctcgacgccgtccggcccgcgcactcgttctattgcgggatgctggccgtcctgatgcccgaagccacgcagtgcagacgctgcatgccggttccgggcgtttcgctgcgcgcgcctcccgcggcgtaacccgcaatccccttcccatcctgttttttgccgggccgtgcggtccggcgggttacgtatgtcattcaaacaatccgataagcaatgaaaaaatttctgttgccggcactcttcatgtgcctgtatgccggtgcgtcggccgcggagacgccgaagaagagcaccgacgccaatcttttcggccacgtcgtggaccgtgaaacccatgaacatcttccctatgcgaccgtcgccgtgacgggcacggcattcggcgccacgaccgacgcgtcgggacactattttctgaaaaacctgcccgaaggcgagctgacgctcgaagtccgtgcgctgggttacgccgtgctggcgaaaaaggtgacgctcgaacggggacagaccctcgaactgaatttcgaggtggtgcagagcggcatttcgatggacgaagtggtcgtctcggccagccgctcggccacgctgcggcgcgaagcccctgcgctggtgagcgtgctggacgccgcgctgttcgagaaaacgaacgcttcgtgtctggcgcaggggctttcgttccagcccggcgtgcgggtcgaggacgactgtcagaactgcggcttcgcgcaggtgcgcatcaacggactcgacggccattattcgcagattctcgtcgattcgcatccggtcttttcggccctgacgggcgtctacggactggagcagattccggccaacatgatcgagcgggtcgaggtgctgcgcggcggcggttcggcgctgtacggttcgtcggccatcggcggcacgatcaacgtcatcaccaaggaaccttcgcgcaattcggcgcagctggcgcatacgctgacctcgctcggcggcagcagctcctatgacaacaacacgatgctcaacgcgtcgctcgtgaccgagagcggccgtgcggggctttgcgtcttcgctcagaaccgccaccgttcggggtacgaccacgacggcgacggatttaccgagctgcccctgatcaacagccggtcggccggcatgcggtcgttcttccgcacgggcgcctattcgcgcatcacggcgcagtaccaccacatcgacgaataccgccgcggcggcgacctgctggacctgccgccccacgaggcgatggtggccgagcagaccgaccactcgatcgacggcggaagcctttcgttcgacatctcgtcggccgaccgccgcaaccgtttcaacgcctatgcgtcgttccagaatacggcccgcaagagctactacggcagcaagcaggaccccgacgcatacggtacgacgcacgaccttacggtcgcggcgggcgtgcagtacgtccatgcgttccggaaactgcttttcatgcccgccgaactgacgctcggcagcgaatacagctacgacgacctgaacgaccgttcgatcggctacgacatcaacaccgcccagacggtgcatatcgtgggcggccacctgcagaacgaatggaaaacgaagagatggtcgctgctgatcgggggccgcttcgacaagcataatctggtggaccacgtgattttcagtccccgcgccaacattcgtttcaacccttcggaggcagtgaacctgcgcgtgagctatgcgggcggctaccgggcgccgcaggccttcgacgaggacatgcatatcgccgtggtgggcggcgagcgggtccgcatccggctcgccgacgacctcaaggaggagcgttcgcacagcgtgagcctttcggccgacctttatcacaacttcggccgggtgcagaccaacctgctggtcgaggggttctatacgattctcgacgacgtcttcgccctgcgcgatctggaagatacggacgacggaggcaagatcaaggagcgttacaacggttcgggcgccgccgtgcgcggcttcaacgtcgaggggcgggcgattttcacccgctggttcgaactgcaggcgggcgtcaccctccagcagagccgttacaggaagcctgagcggtggagcgaggacgccgacgtgccgcctgtgcgccgcatgttccgcacccccgacgcctacggctacttcacagccgcgttcaggcccgtccggaacttcacggccgacctgacgggaacctgcaccggctcgatgctcgtgcagcacatggccggatcgggcgtcgcgcaggacgcggccgtctcgacgccgtcgttcttcgacatgaacgtccgcctgtcgtacgacctgcgcatctacaaggagataaccttgcagctttacggcggtgtgcagaacctcttcaatgcctaccagaaggatttcgacaagggcgccgaccgcgattcgggctatatctacggtccgtcgctgccccgcagctggttcgtcggcgcgaagttcagtttctgagtctgcgctgctgcgtccgacggcaaaggctgccctttcgggggcagccttttgcgtgtggcggcggtctctgcgggccgtttcggatacgtgtcgcggcccggaatcctgtgccgggttttgcggggaataggttgtgacgcctgcgcaaagtcgccggaatgtccggtcgggtgcggagaatttcatccgggaagcaaaaagccgccccggattccggggcggccttgccgtatatcttggcgcggaattagatcgccttgatttcgtggagtacgttgttggtcttgcggaccgcgtcggccgaagctgcgaacttctcggcctcttctttcgaaaggtcgatcttcacgatcttctcgatgcccttgcggccgatgatcgcgggaacgccgatgcagatgtccgactggccgtattcgccttcgagcaggcacgagcagggaatcatctttttctggtcgttgaggatcgcctccaccatcattgccgaagcggctcccggagcgtaccatgccgacgtgccgatgagcttggtcagcgtggcgccgcccaccatcgtgttggctacggcctcttcgagcttcttcttcgatgcgaactgcgatacgggaacgccgtttacggtagccttcgagacgagcggaatcatcgtcgtgtcgccgtggccgccgatgaccataccgtcgacgttgttgatgttggcgccggtggctttggccagatagcacttgaagcgcgacgagtcgagcgcgccgcccatgccgatgatgcggttcttcggaagtcccgaagccttgagcgccagataggtcagcgtgtccatcgggttggcgacgacgatgatgatggcgcgcggcgagtatttaactacgttttcgattacgcccttcatgatgttggcgttggtgccgatcagctcttcgcgggtcatgcccggcttgcggggaatgcccgaagtgatgacgacgacgtccgaattggcggtcttcttgtaatcgttggtgacgcctacgagtttggtgtcgaagtccatcagcgtcgagcactggtacatgtccagcatcttgccctccgaaagaccctccttgatgtcgatcaggactacttcgcttgcgacctcgcggcaagccattacattcgcgcaggtggcgcctacggcacctgcacctactactgtaacttttgacataactgttgatatttaagtttgttgtgcgtttctttccggcggggcgtcgttcgcggccggccctgtcatggagcaaacccctctcggaagaggggcttgaacgggtcggggatcagccgatcagcttttcgtaatccgcggcgctcagcagcgcgtcgtattccgcgggatcggacattttgaccttgacgatccagccttcgccgtaggcgtccttgttgacgattgcggggtcggcgtctaccgcgtcgttgaattcgacgatttcaccgccgacgggcaggaaagcgtcgctgacggtcttcacggcttcgatcgagccgaacacctcgcctgcggcgagcgtctcgccgacggtcggcacgtctacgaaaacgatgtcgccgagctggctctgcgcgaagtcggtaatgccgataacggccgtgtcgccctcgatacggcaccactcgtggtcgttcgagtatttcagatttgcaggtacgttcataatttggttatcgttttaaattttgaatgtgctttttctgatgcaaatataactgttatttccgtaacagcaaggggatgccgttattttttaatgcgattttgcgccgcgaatccgttgcagatttgcagaatagcttgcgcaaaatatttgtatgtattatttttgcggcaaaatcaagcttgcgttacaggtatgacaggggaagagacgtccgaatcccggaaattcgcgatcataggcgttgcggggtacatagctccgagacatttgaacgccatgcggtcgcttgggtgcgatctggtggcggcgcacgacgtgttcgacagcgtggggatgatcgacgggtattttccccgtgcctatttcaccaccgatccggatgatttcagaaagcgcatggtcgccgaccgtgcggaatttctgacggtctgcaccccgaattacctccattgcacccataccgtaacgggcttggaggcggggcttgacgtgatttgtgaaaagccgctggccctgactccggacgaactggaccggatggagacctgcagccgggccgcgggcaggcgcgtattccccgtattgcagctgcgccttcatccggaaatagagcggctgaaacggatggtcgacggcgacccccccccgacgatttatgacatagaccttacgtacatcactcccagagggagctggtacgccgcttcgtggaaaggcgacccgtgcaagagcggcggcgtgacggccaatatcggcatccattttatcgacatgctgcactggatattcgggccggccgagaaggtggtgttgcaccattcgtcgccggagtgttcggctggctttttgcagttgaagagtgcccgcgtcaggtattttctgagcgtcaacgccgcccatcgcccttcgccgaacgataatcccatgtctccgtacagacatctcgttatcaacggcgaggagttcgactttacgaacgggtttacggacctccacacgttgagctacgagcggatacttgccggtcggggttttgcggtcgaagatacggcgtgtgccgtccatacgctcgatatgctgcggaagagtgcggcggtcggcctgacgggcgactatcatccgctgctgcggaatttgcagaggtgatgcgaaaaaagaacgggagcgatgaaaatggtggatctacataggcagtatctcggcatccgcgatgaggtggaccgcgccatcggcgatgtcattgccgagaccgccttcatcaagggtcctgcggtcgggctgttcgaagaggagctggcccggctgctcgaagtgcggcactgcatcgcctgcggcaacggtacggacgcgcttctgttgtcactgctggccgtggggctgcagcggggcgacgaagtcatcgtcccggccttcgcattcgcggccgtggccgaaacggtgctgctgctgggcggcgttccggtcttcgccgacgtcgatccccgcactttcaatatcgacccggcgagcgtcgcccggctggtgtcggagcgtacccgtgtcgtcatccccgtccatctgttcgggcagccgtgcgatatggctgcgctcacggccgttgcgaaggagcacggcttgaaggtgatcgaggacaacgcccagtcgctgggagccgtatgccgcatgtccgacggcgcgcgccgctatgcgggtacgatcggggagatcgggtgcacgtcgttctttccctccaaggtgctgggctgttacggcgacggcggcgcggtgttcaccgacgacgacgggctggcggcccgcatccgggcgctgggcagtcacggttggttcaccaaatatgacagccggctggtcggaatgaattcgcggctcgacacgctgcaggccgccgtactgcgggtcaagctgccgcacctcgacacatggatcgccgcccgccggagcgtggcagcgcgctatacggagcgtttgggcggtctgacgccggtcgtgaccccggccgagacgccctgcgccacccacgtctaccaccagtacaccgtcaaggtgcctccggcctgccgcgacggactccgggccgcactcgccaaggagggcataccctccatggtctattatcccggaaccctgtacgaacagcccgcataccgcgacgcctgcatctgcgaccccgcgatgcgccatgccgcgacgctgccggcggcggtgctgtcgcttccgatggacagcgaactgaccgacgccgaggtggagcgtgtggcggatgccgtatgccgctattttgccgataacgaaagcagataccatgagtgaaacgttcatccacccctcttcgttcgtagacgacggggcggtcatagggccgggttgcaggatctggcatttctcgcatataatggccggggccgtgctgggaccggcgtgcaatatcggacagaatgtcatggtcgccgcggacgtgaaactgggccgtcaggtaaaggtgcagaacaacgtgtcgatctattcgggcgtgatctgcgaggattatgtttttctggggccttcgtgcgtattcaccaacgtcaagaatccccgaagcgagatcccgcgcagggatcagtataaaaccacccgcgtgcgccggggcgccaccgtcggggccaatgccaccgtcgtatgcggggtcgagatcggccggtacgccttcgtgggcgcgggagcggtcgttacgcactcggtccccgatcatgccctcgttgagggggtgcccgcacgcgtggtcggatggatgagccgcttggggcacaaactggaattcgacgaagcaggcagggccgtgtgtccggagtcgggacgcagttatcgcaaggttaatgaatgtgtttatgaagaagatatatgatcggctgaccggtcgggaaacgtcgctggccgtgatcgggctgggatatgtaggcgtgcccgtggcgctgaggtttgcccggcgtttcgatgtggtggggtacgatatggatgccggccgtatcgaaaaactgcgtgaaaagtacggcgccggcggcgaaagcatccgtttcacctcttcggaagaggagttgtcgcgggccgcattttatatcgtcacggtgcccaccccggtcgatgagcgcaagaatcccgatctgacctgtcttgtcgaggccacgcgtaccgtggcgcgttatctgaagcggggcgattatgtcgtgtatgaatccacggtctatcccggatgcaccgaggaggagtgcgtgccgctgctcgaaaaaggctccgggctgaaactcggtgcggatttcaaggtgggctactcgcccgaacgcatcaatcccaacgattcggagcataccttctcgaacaccgccaaaatcgtgtcggcgaacgacgggcaggcgctggacgaggtcgcgcgcgtatacgccgaagtcgtgtcggccgatctctgccgggcgtcgggcatccgggtggccgaggcggccaaaatggcggagaacgtgcagcgcagtgtcaacatcgccctgatgaacgaattgcagcggctgttctcgcgcatgggaatagatatgggcgaggtcatcgatatggcttcgtccaaatggaatttcgtaaagtacagaccgggactggtcggcggccattgcattccggtcgatccgctctatcttgtttctgtcgcttcaaagctgggcgtcgagatgcccgtcacgagttcgggctgcgccgtgaacgacggcatggcggcgtacgtggtgcggtcgctgcttggggccatgggaagcggcggccgcggcgcaagggctttgctgatgggcgtcacctacaaggaaaacatcgacgacatacgcaactcccggatcgccgagatggtcggcctgctggagcgtgaggggatgagcgtggatgtgaccgatccccatgccgatcccgataaggtttatgccatgtacggaattcggccggtgccggccctccggcccccttacgacctgattgtcgtggccgtggcgcacgacgagtaccgcggactcgacgacgcttatttccgctccatctcccgcggggcggccctgttgggcgacattcgcggactctataagggccggatcaaatcgctcggatactggagcttgtaaaacgggcggccgggccatacggtacgaggcatgaaacagcactccacccctcagatcggaaatgcaggcaggagccgcacgctgcaggccttgtggctggcgctggccaatctgttgtcgctgagcgtgacgctggtcatgcaggcggtgctctgccgttacatgaccacgtcggagtacggtacttacagtcaggtgctgtacgtctacaacaccctgctggccgtcttttcgctgggacttcccaaagcgtactcctattacctcgcccgcgtgtcgccggaggaggggagggatatcgtccgcaaactgaacgggctgtttctgcttcttgcgtccgttttttcgtgcattttgctttggcaggccgccgccatagccggagtgctcggcaatccgctgctggcccagccgttgaggctgtttgccgcggcgcccatgctgctgatgccggtcttgggggtggagaatattctggtcgtctacggcaaggcgcacctcgtggccgtctatgtgctgataagccgcgccttcatgatcgcatgcgtcgtgcttccggtcgtggttttcgatgcaggggtgtcgggtgcggtcgccggtttcgtcctcgcgtcgctggtcacatgcgttgccgggctgaagttgtcgtccgtcccgttccgcaatgtatctccggtgaagagccggctgacggtccgggagctgctccggttttcgatgccggtgtttgcttcgagtatgtacggattcgtgatcggttcggcgagccagttcttcgtaagccgctatttgggcgtcgaggatttcgccctgttcgccaacggataccgcgaacttccgctggccggaatgattatcggtgccgcggccggcgtgctgctgccggaattttcgaggatgtcgggggaggaggccgacggcggacagtttgtccggttgtggcaggcggctgtcctcaaatcttcggcgatcatttatccgttgtccgtattctgctgtgttttcgctcctgagatcatctgcctgctgtatggggaggggtatcgggaagcggccggtctgttccggatcgtcaccgtcgtcaatctggcgcgtatcatgccctacgcccccgtcctgtttgcactggggcggggaaaagcctttgcccgtgcgcaccttgtcaccgctctgctcatcgtcggtctcgacctgttgtgcgtcatggcgtttccgtccctttgggccattgccgccattgccacgggctgtacgcttttctgtctgttcctgctgatgacgaccactgcccgcgtgctgggcacttcgcttgcggggctgatgccgtggaggatgctgacgaccgtgctgctcgtatcggccgcggcctgcacggcggcccggctggccgtcttgctgaccggaatgacgcatcgtcttgccgtcgtgtcggtaggcttcgccgtctatctgtcgttgtatctgccgtttgcgcagcgggccagaatccgctatatggagttgttcggaccggtgctcgcgaaattgcggccgaaccggacgtaagggcttcgcggcttcccgttttcggccgccggagcggagcgccggcctccggcttttaggaccggaggcgcccgatgccgggcggtcccggccggggcgtcagtgctgtttcagggcttcctgccctgccagatattcgagcagccggccgacctgattcttccggctgtacagccgtatcttgtcccagtcgcggggcagcacctccttgttcttccagatggaatagcagcgcaggatcatccgcttgacctcttcgttgtccgtttcgtccgcggtgaaacccgcgcgcgtctcctccagcaggtcggcgatgacgtcgtcgggatcgcagatggcgaggatcggtttgttggtggcgaggtagtcgaacagcttgcccgtgtagacgcctttccgtcccttgggatgcacgacgaccagcgtgtcggtctccagcgatttcctgatggcttcgtcgtgatcgacctgccggatctggaatacgttctggctgatgttttcgggaacggccagcggcgaggtgtttcctatgatgaggatgcggctgtcggagggaagcgctccctcggcgaccagttcggagaaggctccgaaccatttgtccggagtgatcgaattgtaaaaatggccgatgaacgccatggtatagacgggctgaaaagagacgtcgtgcacctcttcgtaatcgtacccgttcgttatctcgataaccttgtcgatccctccgccgatttgtttgaaatcttcgacaaggggtgcggatactgacaggatcaggtccgcatccttgaggattctgcgctcgtagaagaggagccgccggctgtttatcggcgggagccaaggccacttcgacatctcgtcgcgcatgtcggcgatccagtaaaacggcgtttttctgtgcagcctgtatgcgatccggtgcgaagagagatggccgtatgaacttaatacgacatcgaaccgccggctttttgcgagtttttgcgccttcttgctggctttgaactgccatatccgtttgtaatcgaggaacagccggaactgcagggccgacaatatgcgtctgaaagcccatttctttctgcgctgcaggagggagtcctgtttcgacgaggttatcaccgggtcttttacgtagtggacctcgcagccgttccacatcgccgtttcatcgcggtccccttcggttatgacggtcaccgaatgccccgcctcccggaaataccgggcgaaggcgttgagcctgaatgcggcgatgcggttgtggggatagaagtgattgcaaacgattagtatattcatcttcaattaaaaacatattccgtcggcggggcggaaattcatttctctgcggagccggcgttcccttgtttcccggcgatcacgaattcgatttcgcggaacaggtattcgtgccgcgtgccgtccgcatggcgcaggatcagttcgccggagggaagcacgccttcgatcgcggcctgaaacagcgtgccgtcgggcagccggtaggggtgctgttcgcccagccggtacatccgttcgcggtaggcgtgctggagggcctccttttcgccccgttcgagctgggcgtaacgccgcaggcagcggaccagaaaggtttcgagcagccggctgcggttgaacttgcggcccccggcctgcgcgagggagacggggttgggcagcgcggggtcgaacgccgtctggttgacgttgatgccgatgccggcgatcgtgcgggagagggaggctcccgcatggttgtgttcgatcaggatgccgaccagtttcctgtctccgacgtagatgtcgttggtccacttgatgcgggtgtcgatgccgtaggcggcgaaggtgtccgtcagggccagcgtcacggcttcggagagcagaaactgctccccgacgggaaggaaccggggttcgagcaccatcgagaaggtgaggttttcaccttcggggctggtccacgtatgtccccgctggccgcgtccggcggtctgccgttcggcccagacgatgtcgccgtggcggtatttcgcgtcgcgggcctcgtcgttggtcgaggtggtttcgtcgatacggtagatcatgaattattcattttgtcgtgggtgggattttcgggagggcgacgcgatcagacggacacgccgaagtcgcgcagggcgtcgttcagcgaggtcttcttgtcggtcgattccttgcgctggccgatgatcagggcgcaggtgatgctgtattcgcccgccgggaactgcttgcggtagctgccgggaacgaccaccgagcgcggcggaacgtagcctttgtaggtgacaggctccggtccggtgacgtcgatgatgtgggtcgaacccgtgatgacggtgttcgagccgagcaccgcctcgcggcagacgtgcgcgccttcgaccacgatcgaacgcgaaccgatgaagcagttgtcctcgatgattacgggtgcggcctgtacgggttccagcactccgccgatgcccacgccgcccgaaaggtggacgtgtctgccgatctgcgcgcaggagccgaccgtggcccacgtatcgaccatcgtgcccgtgtccacgtaggcgccgatattgacgtacgagggcatgaggatcgctccgggagcgatgtaggcgccgtaacgcgctacggcgtggggcacggcgcgcacgcccagctgttcgtagccgtgcttaagctccatcttgtcgtaccactccagctcgcccgcttccattttgcgcatgggctggatcgggaaatagaggatgatggccttcttgacccattcgttcacctgccactggcttttctccggatctacgggctgcgccgtgcgcagctcccccttgtccaccagttcgacggtttgccgcacggcctgccgcacggactcctccttgagcagctcgcggttttcccaagcctgcccgattatctctttcagttcgctgtacataattttccgagtgtttttgcaagccaaagttacgcaaaaacttcgatccgcaggccgaactatcttattttttcctaactttgccccgatatatacccaaaccgtatagttatgatgagattaccgcgcatggcggcggccctcgcgggcgccgcggcgatactgacaggctgcagcgacatgaaacagataaaacacatgccctatccccggacggagcgcaccgacgtgaccgataattacttcggtacggaggttcccgatccctaccgctggctcgaagacgacaactccgaggcgacggcggcgtgggtgaaggcccagaacgtcgtgacgcaggattacctgtcgcagatcccgttccgcggcgcgatccgcgaccggctgaccgaattgtggaactaccccaaagagggtattccggccaaacacggcgacgcatggtattatttctacaacgacggactgcggaaccagtcggtgctctaccgcaccgcgcagccgggcggggagggcgaagtgttcatcgaccccaatacgctctcggaagacggtacggtggccctttcgggcgtgaccttctccaaggacggcaaatactgcgcctactcggtcgccgcatcgggttcggactgggtcgaaatccgtgtgatgaacaccgccgaccgtacgctgacttcggaccggatcaactgggtgaagttttcgggagccgagtgggcgcccgattccaaaggattctattacagtgcgtacgacgctcctcagaagggcgttttctcgtcgcagaaccagtttcagaaggtctactaccaccgcctcggcacgccccagtcggccgaccggctgatctatgccgacgcggagcatccgctgcgttatttcagcccgtggcccagcaaggacgggcagtggctcttcatcgtggcttcggagggtacgtcgggtacggaagtgctctataaaaaggtttccgagccgaaattccgcaccttgctgccgggcttcgatgccgactacgcgcccgtcgaatgccgggacggccagctctattacgtgaccaaccgcgacgcgtcgaactacgcgctgatgaaggtggacctgaacgacccgtcgaaggtttcgatcgtgattcccgaaagcggcgggaagctgctggagggcgtcggctcggccggtgggtatcttttcgccacctatctcgaacatgcgcagagcaaggtctgccagtacggtttcgacgggaaactcgtacgcgagatcgaactaccggccatcggcacggtgagtggtttcgacggcgagaaggacgatacggagctttactattcgctgaccaactacatcgcgcccgccacgatctacaaatacgacatcgccggcggcgcatcgacgctctataaagcccccgcggtgaattttgatccctcgctgttcacgaccgagcaggtgttctacacctcgaaggacggcacgaaggtgccgatgttcatcacccgccgcaaggatatgaaactcgacggcgggaatccctgctacctctatgcctacggcggcttccagatcaaccagacgcctgcgttcaggccctcggccatgatgttcgtcgagcagggcggcatctactgcgtggccaatctgcgcggcggttcggagtacggcgaagcgtggcacaaggcgggcatgctcgaaaacaagcagaacgttttcgacgacttcatcgccgcggccgagtacctgatcgccgaaaaatacacttcgtcggacaaactcgccattgcgggcggttcgaacggcggcctgctggtcggcgcctgcgaggtgcagcgtcccgacctctatgccgtctgcctgcccgccgtgggcgtgatggacatgctccgctaccacaaattcacgatcggctggggctgggccgtggagtacggatcgagcgaaaacgaggagcagttcgactacatttataaatattcgccgctgcacaacatccgcgagggcgtgaaataccccgcgacgctcgtgacgacggccgaccacgacgatcgcgtcgtgccggcacactcgttcaagttcgccgcccagatgcagcactgtcaggccggcgatgcgccggtgctgatccgcatcgagtcgaatgcgggccacggggccggcaaacccacttcgaaacgtatcgccgaggaggcggacacctattcgttcctgttccagaatatcggagtgccttacaaagagctgaaaaaacagaaatgatccgggcggaagccctgtcgtgccgcggcaaacgcctcctgcgtgaggcgttggggtgcggtcgttcgacgcggcgttccgccgcgggagtccggcggccggtcgccttcggacggtaaagaaggtaggttaggttaaaaagagagataacatgaaggtttacaaatttggcggtgcgtcggtgcgtaatgccgacggagtgcgcaacctgcgcaagattatcgacgacgagcagaatctcttcatcatcgtttcggccatgggcaagacgaccaacgcgctcgaaaaggtgttcgaaggacttcagaagggcgacaaacagctctccatggagcatgtcgccgcgctgagggagtaccatgcgggcatcatcgacgatttgtggcgcggccataaacagctcgaacgggtcgatgcgctcttcgacgagctggagcgcgtggccgtggagacggtttacaaaccctccgacgccgagttgtggtacgatacgatcgtggccttcggcgagttggtctcgacgacgatcatctcggagtatctcaactatgccggagtgtcgaaccgctggatcgacatgcgccgctgtttcctcaccgagcagcgtcacaaggacgccggggtcgatatcgaagcttcggcgccgctgctgaagggcgcgctggccgagtgcgtcgagaatatcttcgtcggacagggctttatcggcggtgcgcccgacggcacgaccaccacgctggggcgcgaaggctcggactactcggcggccgtggtggccaatatcctcgacgccgagtcgatggccgtatggaaggacgtggacggcgtgctgaacgccgatccgaagattttccccgacgccgtgcagatcgccgaactgaactacctcgatacgatcgagctggcctacagcggcgcgcagatcatccaccccaagacgatcaaaccgctgcagaacaagaatattccgctttacgtgcggcctttcggcgacaagcgcaaacccggtaccgtgattcgcggcatgtcggcgccggtcgaggtgccgatcctgattctcaagaaggatcaggtgttgctgacgatccgttcgcgcgacttctcgttcgtgctggaggagaagttcgccacgatcttctcgctgctggagcgtttccgcatcaagaccaatctgatccacaactcggccgtgaacctgagcttgtgcgtcgataactcgtggcacatcgacgaggcgatcgaggcgctgcgcgaagcgggcttcgacgtgatgaaggccgagaatatggagctgctgaccgtgcgcggctataccgacgagttgtggcgcaagtacgcccgcggcccgcaggtcttcgtgcggcaggccacgcagtctaccgtgcgcgtggttcgcaagaagtagtggcggacagccgctgtccggggcgcttcggccccgtcggcactccggagcttcgggcggaatccggcggcagagttttcgcccgcggtcccgaaattacgatacgagagcggccttcattgcgaaggccgctctcgtatcgtttgctctcctatccctgccgcatgttgcgcaggatggtccatgtcgagtcgtcgcggatttcgccgctgcgcttcatgttccagatcgtgcgggcgatgtatttctcgatgtcgcgctggagccgcttgtaaagcggacatttggtgtagttctcgttgtcgagcagcacgtcgcggatcgaccgcagcgaattggtgtagttcgacatctcgttcttgagcgccacgccctgctttttcgacgcggtgatcttggcgatcgacatctgccgcagtttctcgcatacggagttgagcaggatcatcaccacgttgtccatcagcgtgtggccgtgcatgaacagataggcgttttcgggcgtcaggccccggctcttgagctgctgttcgaattcgagcatcgggtcgatcatcttcgggttgcgcctgcgcagcatctcctcgcgtttggcgacgtttttctgcagccacgccagcgttttctctccgttgttttcgaggtcgagatagccgatgcgcaccgccgacttgaagtcgatcagcgggaatacgttctccgtggccagctgcgccgagtaggcgtaccagaggaaaagcgggtagatcgtgcaggagtattcgtgcatgaaatgcacgaaatcgaagatgcgcgtgtcgttcttggtcgccttgacgcatacgttgtgcagcgagggggcgtagcagaggaagttctcggtggcgtaggcgtaggtgtggaacatgtagcgggcggcgttcacctcgcgcgactgctccgtgcggtcggcgaacagaaagtcgaagtccgaatcgacgcacaggatcagctcctccgacgagcgggggatcatccccatcagcaccttcttccctttgggaaggtcggcgcggttgggcaccgagatttcgaagcgcaggtaggggttctggaagtggtcgaagatgccgcgccagaaggccacgtcttcgtagccttcgacgtagacctttaccagccgctggtcgggattggccggcagcggtttgggcagctcttcgagagtcgccgggcgcgtgaagggattgaatctgcgcagtttgtcgccgaactttttagccatacggaaacaaagatagtgatttcggccggaatttcttcccaaggccgggattttttgcagcggcgggacggccggttccgtccctctgcgccgccgttcttctgtgttgccgccgttcttctgcactgccgcctttctttttgcgctgccgtcctctgcgctgtcttttctttgcgctgtctcttctttgcgccgccgtcgctttttctccggctccgccttgccgctcctatctcgtgtgggtgtgcgccgccgtttgaagggttgaatgcgctctttttcgccgatctcggccgccgggcgcgcacaaccgtaatattttattatttttgcacaaaataagaggttccgaaaggacgtttgatctctactattcgaacaatatggcggacaacgattggaaagcgaggctcggaatggtctattcgaccaatcccgacttcaactatgaaacgaccgaaataccggaggcggagacgcttcccccggcgcggcaggagctgcgcgtgtggctcgaccgcaagcagcgcgcgggcaaggtggtgacgctggtcaaaggcttcgtggggcgggatgcggatctgcaggagctggcgcgtctgctgaaaaccaaatgcggcgtcggcggcgcggccaaggagggtgagatcatcattcagggcgaccaccgcgaccgcgtggtcgagatactcaccaagagcggctaccgctgcaaaaaagccggttcgtaggtgaagcggctgctgcatatcctcctcttgttgtgcgccctcggtttcgcgcacgaggtttcggcccagtactatacgtggggttcggaccccgcggggctgaaatggagcacgatccgtacgcccgacgtgcggatgatctatcccgatacggtttcggccgtggcgcggcgtacgctgttctacatccgtaccgtccggcccgacattgcgttcggattccgtcacggtccgatgcgtattcccttcgtcatgcaccccgaaaatttccagtcgaacggactggtgatgtacctcccgaaacgtgtggagttcctcacctcgcccgcgatcgacggctattcgatgccgtggtacaaacagctcgtggcccacgagtaccgtcatgccgtacagtacaacaacctcgaccggggcgttatccgcgccctgagctatattctggggcagcagggttcgaccatcggcctgctctgcatgccgatctgggccatggagggcgacgccgtgatgtccgaaacggccatgtcgtcgttcggccggggacttcagccctcgttctcgctgggttaccgcgccatgggccgcgtaggccgcgaccggaaggacacgcgcgaccgccgcaacatcgacaaatggttctgcggctcctaccgcgactacattcccgaccattacgagctgggctatcagatctgttcctacgcctacgaccgctacggcgaggtggtctgggacaaggtggcgcgctacggctcgcgcaacccctatgtgctggccacgacgcgcgtcgcgctcgaaaaatattacgacaccaatgtcagcaggcttttccgcgagacgttcgacgtgctggagcggcactgggagtcgctgccgcaggtcgaagacagcgccgagccgctgacgccgatgcccgccggcaattacacgacctaccagtggcccctgccgctcgacgccgcgtcggcgctggcgctcaagaccgactacgaccggccgttgcgtttcgtgcggctcgacacccgcacgggcgaggaggaggtgatctgctatacgggggcggtttcgacgcgccctgccatggccggcggccgcgtgtggtggaccgagtaccgccgttcgaaactcttcgaacagcgggtcaattcgcagttgtgctacatggacctcgccgacggtacgccccggatggtcgtcggacgccgcaacgcgctctatcccacgccgtcggaggatgccgtcgcgtgggtcgaatacaatcccgacggccgctatacggtcgtcgtgcagggaaaggagggcgtggagaaacgctttgcgacgcccgaccggtccgagattcacggactggcgtgggacgatgctacgcggggctattacgtcatcgtcaccgacgattcgggcatgtggctcggccgcatcgacggcgacggcgtgcatcccgttaccgaaggcgcctacattacgctgagcaacctccgcgcgggcggcggcaggctctatttcggctcgatcgcttcgggccgggacgaagcccactgcttcgacctgaagacccgccgcgaataccgcatcacgacgtcggcttacggatcgttcatgccggtgccgtggcgcgacggcgaggggcgggaacgggtgctgctgaccgcctatgacaggcgcggttaccatgtggcggcgcaggacgccgatgccgacgcgctgattccggtcacgccttcgaaactgccgctcaacgtcgtgaatcccgaccgcaagcggtgggacgtcgtgaacctcgatacggtgcgtttctcgccggccgattcgctgcgtcaggagggggtgtaccgcgcgaagcgataccgcaaggtgcccaatctggtgaacgtccatagctggacccccgtggccttcaatcccttcgaggccgtggacgaacacaatatcaacctcaatctgggcgtcaccctgctttcgcagaacctgctgtcgaataccgaagccttcgcttcgtacggctggaaccgcaacgaagggtcgattttcaatctgggcgtgcgctatttcgggctgggcgtccgtctcgacctcgacgcttcgtacggcggcaatcaggtcttctattcggtggggcagtacaacgagcagacgggaaaatacgagtaccagcagcgtcccagccccgacaagtactactccgtgggactctccgccacgcttccgctctatttccagcggggctatcatacgcgccagctctccgtcacctccggctggaactactccaacggcatggtagccaatctgggtaaaatcgaatggaacgccgggcagatctccaatatccagcgcatcggtttccgcaagggactgcacaaactctcgttcggactgggctactcggatcaggtgcgcatggcgcaccgcgacttcgcgccgcgctggggctatatgctgagcaccgcctatactttcaacccggccaacacccatttcagcgacctgatttcgttctacggacaggcatacctgcccggattcgcggcccacaactcgctgaaggtggccgtcacctaccagacttcgatcggcggctacaaatttccgtcgggatacgcgccgctgagctaccgctcgacgcgccttattccgcgcggatatacctcgtcggatattatttcgaacaactacacggccttctcggccgactaccagctgccggtgtggtaccccgaagggggcatcggctcggtgctctatttcaagcgcatccggctcaacgtcggcggcgattacgcccagttccgcgacgtgggccgcggagggatgacgtggcggcgcatctggtccgtgggcggcgacatcgtattcgatatcaatgcgttccgccaacccgcatcggcgacttcgaccttcaagctgtcggtctatcgtcccgcaaacggcagcgtgtggtgggccgccgccgtgggccttccgttctgattgcaataaatttcgtatctttagcgcaaaattaagtcctatgccaaagaagaaaaagacggacgtgagtctgaaaacgataaaatggatctggtgtctggccttcgcgccgttcgccctgctcttcttcatgctgctgctgaccgccttcgggctgttcggccgcatgccgtcgttcgaggagctggagaatccccgcagcaacctcgccacggagatctattccgaggacggcaaggtcatcggcaccttcttcgtgcagaaccgttcctacgttcagtacgccgatcttttcccggacgattcgacgctccatatccggctcggaggacacgaggtgccgccgatcgtcgcggcgctgatcgctaccgaggacgcccgtttcagaacccattcgggcatcgacatcccctcgctggcccgtgtggccgtgaagaccgtgctgttgcagaacacctcgcagggcggcggttcgaccatcacacagcagctggccaagaacctctttccgcgcgacacggtgcgcaaccgcgggcggctggtgcgcaacgccaagctcgtcacgtcgaagctcaaggagtggatcacggccctcaagctcgaatacaactataccaaggaggagatcgccgccatgtacctcaatacggtggagtacggctccaacgcctacggcatcaagtccgcggcccttaccttcttcaacaaggagcctcacgagctgaacgtgcaggaggccgccgtgctggtgggcgtggtgaacgccccgtcgcgttattcgccggtgcggaattacgacaacgccctcgcgcgccgcaacctcgtcatttcgcgcatggaggacgccggggccattacgcgcaagcagcgcgattcgctcagcgcgcttcccatcgtcctcaattaccgtcccgtgtcgcacaacgaaggtacggcgacctacttccgcgagatgctgcgtcttgtgatgaacgccgaacgtcccaaacgcaatcagttctacaacgagtgggactacgatcaggcggtgaaggagtacgaggagaatccgctctacggctggtgccgcaagaaccgcaaggccgacggcacgccctataacatctaccgcgacggcctgaagatctataccacgatcaattcgacgatgcagacctatgccgagcaggccgtccagaaacagatggaatcggtcatccagccccgcatggacgcccagtaccggcgcaccaagacgctctttatcgacgccgacaaggcggagcgcgagcgcatcatgcgtcacgccgtccgctattcggaccgctaccgcgagatgaggaacgccggcgcgagcgagaaggagatcaacgcttcgttcgacagaccctgctcgatgaaggtcttcacctacaagggcgaacgcgatacactgatgactccgcgcgactcgatcctgcaccacaagcgtatcatgcgggcgtcgttcgtggcgctcgatccccggacgggatatgtcaaggcgtacgtcggcggacccaatttccgctacttcaaatacgacatggccaagcagggcaaacgtcagatcggttcgacgatcaaacccttcgtctacaccttcgccatcgaccatctggggctgacgccctgcacgatggtgcccaacctgcccgttacgatcgagacggccaacggcacggcgtggtcgcccaaggaggcgggcaaggtcgagtacgacggcgtgatgcaccccctgagctggggtctcgcccgcagccgcaacaactattcggcgtggatcatgaagcaggccaaacagcctgcagcggtcgccgacttcatccacaacatgggtatccgcagctatatcgaccccgtgccggcgctggcgctcggctcgtcggaatcgaacgttttcgagctggtgagcgccttctcgaccttcgccaacgagggcgtgcataacgatgccattttcgtgacgcgcatcgaggaccggcagggcaacgtgatcgccaacttcataccccagtcgcaggacgccgtcagcgagcgcacggcctatacgatgctgacgatgctgcagggcgtggtgacgtcgggtacggccggccgcctgaaccgcgattacggcttttcgggcgtggagatcggcggcaagaccggcacctcgaacaagaaccgcgacgcatggttcatgtgcgtggccccgaaactcgtggctggtgcatgggtcggcggagaggatcagtcggtgcatttcgtatcgggcggcgagggcagcgtgatggcgctgccgatcgtgggcgacttcatgaaacgggtctacgacgacggccgtctcggcctgagccgcaacgaccagttcatccgtccggcgatgatgccgcgctacgactgcgacgaggagaccgatcctgaggggcatgtcccggatgcggacgacgacaatttcttcgactgaacagagtcggccggccgctgtgccggccgatttttttgtcgttcgcgccgaaatcgctatatttgtcccggagcttccgtgtacggtccgtccgagcgggaacgatgatcattttttaactttatcgagatgaagattgcgattgtgggcgccagcggtgctgtgggccaagaatttctgaggattttggagcagcgcgacctgccgatcggcgaattgctgctgttcggttcgcagcgcagcgcgggccgtgtctataaattccgcggaaaagatataaccgtcaaactgttacagcataacgacgacttcaagggggtggatttcgccctcacttcggccggagccggaacttcgcgcgaattcgcggagacgatcaccagacacggtgcggtcatgatcgacaattcgagcgccttccgcatggacgccgacgtgccgctggtggtgccggaggtcaatcccgaagatgcgaagaacgccccgcgccgcattatcgccaaccccaactgcacgacgatccagatggtcgtggcgctgaaggcgatcgagcaggtgtcgcacatccgccgcgtgcatgtctcgacctaccagtccgccagcggcgccggagccgcggcgatggacgaactggtggagcagtacgccgagctgggcgcgggcaaggagccgaccgtcaataaattcgcctttcagctggcttacaacgtgattccccatatcgacgtctttacggacaacgactatacgaaggaggagatgaagatgttccacgagacgcgcaagatcatgcattcggatatcgccgtgtcggcgacctgcgtgcgtgtgccggtgatgcgcgcccattcggagagcatctggctcgaaacggagcgtcccgtgtcggtcgccgaggcccgtgaggcctttgccaaggcaaagggcgtcgtgctgatggaccagcctgcggacaaagtctatccgatgccgctcttcatcgcgggcaaggaccccgtctacgtgggccgcatccgccgcgacctgacctgcgaaaacggactgacgttctggtgcgtcagcgaccagatcaagaagggcgcggcgctcaatgccgtgcagattctcgaaacgctgatctgaacgcaccgcagcggcagctgattgaaagggagacttgaccggtctcccttttttgccgtttcatggggtgtcgtcggagagttttcgtgcgggcagtccggatacgccgcccggatacgccgcccggatacgccgcccggatacgccgcccggatacgccgcccggacagcctgcccgcgaaggctgccctgaaattcggatgcgctccggctatttcgagagcatggcgaacaggagtccgattacgggcagatagtctttcaggggaacgcggagctgcgcataggcccgctgcatctcggatgccacctgccgggtcgagatgttgtatcgttcggctatctgctgataggtgagtccttcctgacggctcgcctgatagacggcccgtgtcagctccggcattttggcgagttcccggctgaacagttcgatgatttccgactggaagagttttttggaaagctcgtcgctgctcagggagttcaggctggattgcagcttccagtaggcgtctttggtgatctcgtttttggccctgcggagcacctcctgctctttgatgtggttggcgcatcgggttctcacgcaaaagtagatgtatcccttgatgttttcggccatattcacctgctcccggtgttcccaaagatacatgaaactgtccgttacgatatccttcgcgatatccgtatcgtgtacgtacccgtatgcgatgctgacaaaacggtttttgtattcggaaaagaactttccgaattcgtccgaagtcagtacgggtgtttgtctatccatcttttatgccgggtaggttgaggtcaaagttagcatttttcggaaaaagcgcaactatcgtgcggtggtcatattcgtctgatgagtgatgcactttgtcgcggagggggtgtcgggtctgtcggtttcatttcgaacttctgcaataaatcatgaaaggtgccggcggggcgcctttttcgttacagcctgtatgaaacccgaagtccggacctccggctgcggagccggactcgtgtgatattgtgtctgcaaatataggcaatttttcgggaatgccgattccggtgcggattttttgcggaatgccgcggcggatgcgtccggggagattccttcccggaaagtcgggcgggcggagcttgttcattacggctatccggttgattttcagggatgtgatttaataaatattttgccgaatttaataaataaatttatttgctgaaaaatcgcaaaaatgcctgtaaagccgtcgctcccgactgttttatactatagagacggaaacagaaaataacgtgaatcaggaaattttatacaggtatcttaaaggcgataccacgccgcaggaggacttgcaggtcgcggagtggctggaagccgatccggttgccaaccagaaggaactggacatcgtccgcttcgtattcgaggggatggagttgtacggaaacgacgcgagggccggagcgctccggacgcgcggaatagtcattccgtggcgcaaggtgtggatctttgccatgcgtgcggccgccgtgctgctgctcgtctttgcgggcgggtacgtcgcccaccagcgtacgtacgaagctatttccgaccggctgaccgcggtgcacgttcccaacggccagcgcatcgaaatcaccctgcccgacggttcccgcgtctggctgaattcgggcgcccggatcgaatatccggtcgtattcaaaaagaatctccgcagcgtgaaactttcgggcgaggcgctgttcgacgtgcgtcacgacgccgaatgccccttcgaggtcgagacctttgcgaccaagatcaacgtgctcggaacgaaattcaacgtaatagcggacgagacctacggccggttttcggcggcattgctgcagggccggatcaaagtcaccaacctgctcgatccgcgcaggcaggagatcgttatgaaacccgatgatattgtgaatctttcgaacggccgtctgttcgtcgagacgatcagggatccggaggcgctctgctggaccgaaggtctggtgcgcatcagcggacttccgttcgatgaactgatggccaagttcgagcaggtgttcgacgtcaagatcgtcatcgcccggaattcgattcccgacatcggaaaaatcagcggtaagattcgtgtgaacgacggcatcgagaatgccctccacatcttgcagtacgccgccgatttttccttcgagaaggatgaggagaccaatgtggtgacgatccgctgatcctccgcctgttattgtttaacctaaaaccccggtaagatatgcgcatgaaaaacaactgacgacttgacgatccgaatcatttgaccgataaaaaaagcctgcggactggacctccgcaggcgaagataacagattaaatgattcttgcacccattaacctattatcttaaactttacaaaagtatgaataaaacagtattcttcaaaacctttcgaagactgtttgggttcgtattggcaatctctctgagcgcgagtgtcttaaccgctcaggcgcagaatgcgcgcataaccctgaatctgtccgacgtgcccatgtcgcaggttatgaaagagattgaaaagcagacccgctatctttttatcaacaagggcgtcgacaccggtaaaaagctctcagtcaatctgacgcagaaaacgattcaggaagtattggactacgtgctcaaaaatacggatattacgtataagatcgacggcacgtacatcattcttgccgagaaagccgcggaaaaacccgtcgccgtgacgggaaaggtcagcgacgtcaacggcgttcccgtcatcggggcgtccgtcgtggtcaaaggcacgaccgtcggcacgagtacggacatggacggaactttctcgcttcaggtacccccccccgcggctacggcccagctggaggttaattttctggggtacgaacccgtcatggtttccgtcggcaaccggacttccttcgacgtcacgcttcacgaagcggcttccgaaatcgagggcgtcgttgtcaccgccctcggcatcaagcgtcaggagaaggccctgagttacaacgtccagcaggtcaaggccgaggacatcaccacggtcaaggacgccaacttcatcaattcgctgacgggcaaggtcgcgggcgttacgatcaacgcctcctcttcgggcgtcggcggcgcgtcgaaggtgattctccgcggcaacaagtccatcagccagtcgtccaatgcgctctatgtcatcgacggaatcccgatgtataacttcggcggaggcggaggtacggagttcgattcgcgcggcgcctcggaatccatcgcggacatcaacccggaggatatcgagtcgatgtcggtgctcacgggtgccgccgctgcggccctttacggttcgaacgccgccaacggcgccatcatgatcacgacgaaaaagggcaaggccggcgcgctcaaagtgacgctttcgagcaataccgaattcctcgatcctttcgtgcagccggagttccagaaccgttacggcacgggttcgaacggcgtgaggagcggttcgggcatttacagctggggacagaagctcctgcccgcggcccgctacggctatacgcccgccgacttcttcgaaacggggcatgtatacaccaacgccgtgaccgtttccggcggtacggacaagaaccagacctatttttccgccgcatcggtcaattccgacggcatcatccccaacaacgaatacgatcgctacaactttactttccgcaatacctcttacttcctgaaagataaactgcggctcgacgccagcgccagctatatctatcagaaagaccagaacatgaccaatcagggcgtatattcgaacccgctggtcccggcctatctctttccgcgcggcgagaatttcgcgatttacaagaaattcgaacgctataatcccggcaccaaactcatggagcagttctggtcggcggacatggagggcggcgacctgcgcatgcagaatccctactggatcgcctaccgcaacctgcgcaataccgacaagaagcgctacatgctgtcgttctcggccagctacgacatcctgccgtggctgagcgtttcgggacgtgtgcgtctcgacaactccaattcgctctatacgcagaaactttacgcctcgtccaacacgaccatcaccgacggcggcaagaacggacactataccgaagcccgtgcctacgatacgcagacctatgccgacgtgatgctgaacgtcaacaagaccttcggcgacgattggtcgctcacggccaacgtcggcgcttcgctcaacaacatcaagaccgacgaactttcgtaccgcggtccgattcaggagaacggccttcccaatatcttcaacgtattcgacctcgacgacacgaagaagcgcgccgagaaggtcggctggcacgaccagacgcagtcggtcttcgcatcggtcgaagtggggtggaaacagatgctctacctgaccgcgacgggccgcaacgactgggcttcgcagatcgccgggtcgccctccaagtcgtttttctacccttcggtcggcctttcgtgggttccctcctcgacatgggatttgggcaacgccttctcctacctcaagctccgcggttcgatcgcctcggtcggcctgccgttcccgcgtttcctgaccacgccgacctacgagtacgatgctacgggcaagatatggaaggataagacacactatccgatcggcgacctgaaacccgaacggaccatcacctacgaggtgggtatcgacgcccgtctgtggaagaacatcagcctttcggcctcatggtattccgccgatacgaagaaccagacgttcgacccggcgcttccgccgtcgtcgtcctatacgaccatctacctccagacggggcatgtccgcaataccggcgtcgagctgtctctcggctattcgaaccagtggcgcgatttcggctggtcgtcgaacttcaccttctcgtggaacaagaacgagatcatcgacttggcttccggtgcgctgaatcccgttacgggccagccgctgaatctttcggaactcgacatcaaggggctgggcaaggccaaatacatcctcaagcagggcggcacgctgggcgacctctataccacttcggacctgaaattcaacgacaacggttatgtcgaggtcgataaggcgggcaacctgcttctcaccgacgagggcgaccagatctatctcggctccgtttttccgagcgagaacctcgcatggcgcaacgacttccgctacaaggggatcaacctcggcctgctgttcacgggacgcatcggcggcatctgctattcggccacgcaggccaacatggacctgtacggcgtctcggaagtttcggcagccgcgcgcgatgcgggcggcgtgctgatcaacggccgcgagatggtcgatgcccagaaatggtatcaggctatcggttcgcagtcgggacttccgcagtactacacctattcggccacgaacttccgcctgcaggagctgtcgctgggttacacgctgccgcgcaaatggttccgcaacaagatgggactcaccgtctcgtttgtgggccgcaacctgtggatgatctactgcaaggctcctttcgaccccgaagccgtggcttcgacggggctgagctatcagggcatcgactacttcatgatgccgtcgctgcgcagtctgggtttcaacgtgaaatttgaattctaaaccatgaacagcatgaaaaagataaatgcatacatgcagctactgctgctttcggtagtgctgctcagcatttcgtgtacgggcgatttcgagaacatgaatcgcaatccgaacgaagtgaccgacgggcagatggatgccctgaactacaagatcggcacgaaattccagtcgctgcagggactcgtggttcccgtgcaggagcatatgtaccagttcaacgaaagcctgtcgggcggtccgttcggcggctatatcggagcgacggtagacagctggctcacgaagttcgagaccttcaatccttcggccgactggcgcaaatggccgttcgccaacgtgattaccgagacttacacgccgtggcgcggtatcgtcaccggtacggacgacgaggtggccgtcgctttcgccaaactgttgcgcgtggcgatcatgcaccgcgtgaccgactcctacgggcctattccctattcgaacctcgaaaccaacgagtcgattacggtgaagtacgacaagcaggaggaggtctatatgaagatgttcggggagctggacgaggcgatcgccgccttcgccgccaatacgacgcttccggccgaggctttcagccgctacgaccgggtctacggcggcaatatcgcccagtggctcaaatatgccaattcgctcaagctgcgcatggcgatgcgccttagcgaagtgaagcccgacgtcgcccggacgaaggctgccgaagccatcgccgcaggcgtcatcacggccaatgccgacaatgcggccatgcacgccgccgagaaccgcacgacgctgatctacaacgactggggcgaccaccgcgtcggcgccgacattctctgctacatgaccggctacgaagacccgcgtctcgaaaagatgttcctgcccaacgacaagggcgattacgtgggcatccgcatcggcatcgacgtcacgagcaaatcgcaggcgcaggccaagtattcgaacatgatcgttaccagttcgacgccttacctgtggatcaacgcggcggaggtggctttcctcaaggccgaatacgagctgcgctggggaacgaaggatgccgccaaggcgctctacgagcaggcgatccgcctctcgttcgaggacaagggcgccaaggacgccgacgcctatatcgccgacaagaccagaaaacctgcggcctataacgatccgctgggcaattacagcgcgaccgccctgagttcgatcaccatcgcatgggaggacgattccgccgaaggcgccgacaaggcggccatcaaagagcgcaatctggagcgtatcatcacccagaaatggatcgccatcttcccgctgggggtcgaggcgtggtccgagcaccgccgcacggggtatccgcgcctgctgcccgccgtcgaggacaagtcgggcggtacggtggatctggctcagggcgcccgccgtctgccttatcccgtcgaggaatacgacaagaacaacgccaatcttcaggaagccgtacagatgcttaacagcgagtcgcagggcagccgcaagggcgacggtatgggcacccgcgtatggtgggacgtgaaaccttataacaactaaacgctatgaaacagcacagaataatacgtttctccggtttgttcctgctcctcggcgtactcttcggccttgccgcctgcaatgactggaccgagatggaggccgtggacaacaacgtgaagaaaccgtgggagcaggacccggccttgtgggcggaatatacggccgctctgcgggactataaaaagagcgagcatttcatcgtctacgcccgcctgcacaactcgcccgaaccggcggccagcgagaaggacttcatgcgctgcctgcccgattcgctcgatatcgtggcgctgaccaatgccgacaatttctcgcgttacgatgccgaggatatggccgtcatgcgcgagaaaggcacgaaagtgctctggcaggtggactatgccggacgtgccgccgaattcgccgacgccgcgaaactgggcgcatggctcgaccgggtcgtgtcgtccgtcgccgccaacggcatggacggctattcgttcaccgggattcccaacgccggcgatccggcagcggtgcaggccgcagcgctgatcgtctcgaaactctcggccgacgagagcaagctgctcgtcttcgagggcaatccgctcttcgtcgccgaagcggaccgtgcgaaggtggattatttcatcctcgacaccgagaaaaccgaagatgtcggcgacgtgaagctgcagatactcaacgccacgggttacgcggccgttccggcttcgaaactcctgctggcggccgaggccggagcgcccctcaaggacgaagaccgcgtggagtatgccgccgtcgaggaaatgtcgcgccgcgtgatagcctacggtccgttgtgcggactgggggcctacaacatcggcaacgactactacaatgcggacatgaactacaaaatgatccgtcaggccatccaaacgcttaatccttctaaataaccgacgctatgaaattaatacataaatatctcatactgggcgttgcggcagcgggggcctttacggcctgcgataactatgatgccgatgaccacaagttcgacaatgtcgtctacctcgacgtgtcgaagaccgacgaggtgcagccggccaccttcagcaacaatacgcccacggtcgaaaagccgattcaggcgacgctggcctatcccgaagggcaggacgtcgcggtgtcgctcacggtggacccgtcgctcgtggcgacctacaacgcccgctacggttcggactggaaaatgctcgacgcgaagtattacgagctgtcgtccgacaacgtgaccatccatgccggcaagaccgcgtcggaggtggtgacgctccgcctgaaagggctgatgggcaaaggcgaacagcagaccggcgcgctgcccatcgacgagacctatctgctgccggtgcgcatctcccattcgtcgatgtcggtgctgaaaggctccgaggccgcctattatgtcgtcaaacgctcttcggccatcaccgtcgcggcgcagcttacggacaactggatcgaattcccgtcgctcgacaagtacggcgacaacagcatgccgtggaataaactccgggccatgacctacgaagcgctgatctacatcgacgatttcgcgctgaccgacattcagggcaatccggtgagcatttcgaccgtgatgggcgaggaggactatgcgctgctgcgtatcggcgacacgaacttcgagcgcgaacagctgcagttcgacggttcgggcgtcggattcggcaaattccccggacgcgacaacacgaaggtcctccagaagggctactggtatcatgtcgcctgcacttacgaccagaacacccgcgtcgtgcgtgtctatgtcaacggcaggatacagagcgaggggaccgagatggggccggccgcactggacgacaagaacttcatccatctggcccgccgcgcgctgtacgacctgtgggacaacgagaccgatccgggcaagaaggatcagtacaagacgctcggctacgatacctacagcgaagcccgccagttctttatcagttattcgtacaacgactaccgtccgctgaacggcaagatcgccgaggcgcgcgtctggtccgtcgcccgcactcccgaacagatatgggagaacatgtacaacgtcgagaacccgaaggacgacccgacgctgctcggttactggaaattcaacgacggcaagggcaatacggtgaaggattactcgcgctacggcaacgacggtcaggcgaaatacgacctgaagtggcccgacggcatcgagattccgaaaattaatgaagtggaggagtaaattatgaagacgcaaaagatacagaatttattagtagtgacgctgttctgcgcggcggcgctcgcgggccttacggcctgcgacgccgaccccgtggaacgcgaaggaggcaaactgcccgacaaggacgggcttgagaatacctacggcatgctgcgcagtaacagggcgagcgagaatgaagcgtatctgttactaacgcagggggccggttttgtgacggataatatctattatcagatcaccaaacccgctgccgagggccttgcgctggaaatttgggtcgataattcgcttttggacggtttcaatcaggcgaatgaaacggagtatgaactgctgcctgaagcgaattgtgaatttccggacggtaaaaccctgaccgtagccaaggagggtttgcgaaccgacccgaaacgaatcaaggtgtcggccgagggtttggagccgggagaatacctgctgccggtatccgtcgccgataaaaatgctgccgatgtcgatgagaggcaggtgctttattatacgattacgattcgtcagccccagctgggagactatgaacttcacgacggctcggacctgttctttgttttctacatcaacacatcgcagtaccagcctcttctggtggatgattatttcatgcagaaaaagctggcccgcggatcgaccgtcaaatggtacagcaccgtcggcaatatcatcaacctgcgtaccgtcaggctcgattacgaagcggaaaccggacgcgccaaactcagcctcggctcggatatgcgctatgttctggaccattacgtgaaatataacagtccgcttcaggacaaaggccgtaagttgtgcatgagtatcgaaggcggcggcaaggggttgggattctgcaatctttccgatatgcagatcgcggatttcgcatcccagatcaaagccgtggtctatgagtacggattggacggcgtcaacctttgggaccgcaactccagttacggcaaggagggcatgccagccatgaatacgacctcctaccccaagctgatcaaagccctgcgcgaagcattgggttccgaaaagatgattaccgtcaccgtctacgacaaaccgacggagtctttctgggacaccgaggcgtcgggcggaatcgccgtcggggactacatcgactacgcatggtcgggctacaataacaacaacgaggctgtgcagctgctcgacccgtggcataccgagctggagtatgtatcggcctatacgcagaagccgattgcgaatcttcctaaagaacgttacggctgtgtcaatttcccgatttatcccggcacgacagatccggtggaaatagcttacagggagccggattttcttgtcgattgggtgcagaataaatacaaaccgaatcagattgtcgtattcgacgacatccgaaccattttacaggacaaatacgaaaccgcttgggatccgacatttgcagcatgttgtacatatatggacgatgaaagccgctggattctcggtactcgcaacggttacagctacactttggatacaaacaatcttggcacattaccgaacggaaccggaggttacggcaaatggctgaaagattggtaaattgaatatgaaactaaaatcggtcgacaggtttcatccaactctctcacatttttctgaaaagaaaaaactgctaaatccaaaaaaaacttgaattctaaccacttgaattttaaactttaattactttaagctatgaaaacttatattaagattttcagcacgctctttatcggagcaactgtattattttcctgccaacaggcagaggaacctcagctggatgctgttcagccggaggcgaaaatgacccgtgcattcggagacaaaactccgattgtcaacatttatgtcgagaccaacgacgtgaatccgctcaatgccggcgattacaaacttcccaacggcaagccctatgccgatatcgtggaattcttcgcttccaatattcacaaggagacggtgaacggtgtcgtgcgtccgacgctctacctgaacgacaagatgaccaacctgctggagaacggcggttacctgacctatgtgaaacccttgcaagatatgggcatcaaggtgctgcttaccgtgctgggcgactggcagaatatcggagtcaccagcatgaacgacacgcaggccgatcagttcgccacgatccttgcctatgccgtgcagaagtacggtctcgacggtatcggattcgataacgaatatgacggatcgccgactaccgtcagcggttcttggggcaacatcattaccaaactgcgcgctaagatgccggccgacaagctcatcactgtattccagtggggcaactatggctcttcgcagatcaacgccacggccggcgccaagatcgattacgtttatgctaacttcgggtatagcacttacatcggtgtagcgggtgttaccaaagaccgttttgctccgctgtcgctcaatcttggtgtgtacaatagtccttctacggctggcgaccgtgcttatgacttggctgaagctggttacggtgcgatcatgcacttcaacctgcgcacacggtcgcagaacgatcctacggctctgttcaaggcgattgccgacggcgcttggggcgagaccaacgtgacctgcacgaacggcaaccgcccgcaggactggacgttcgttcccagcggttacacgattacctacgctgaagctactgcccaataaatttctgagagatgagactctgtcgaccgatttgagttgattatatagcttgatctatggtccgtgtatcgtcttttggagatacacgggcctttttgccgtccgggaatacgtcggttaagtcacggcttcgaatgtgttgaatggcctgattttttatatctttgccccagactgcaaactgtattccttatgaaatcccctttcctgcaaaatctcaatgaactgccggggccggtgtggctgttcggcgcttacggcatgacccggctgggcgaatggtctttcgcgctgctgatgcagtgcgtgaacgggaacctgcggctcgacggcttgaccgccggaatgcagctgttgggacttgccggggcattgctgccggttgcgctcctctgctcgctggcgctgcgcaaatcctatgggctgcctctggtccgctggtatgccggtttgcgggtgctggtgcacggtgtggccgtaatcgccccgttggtcgccggttatgatccggaggtgtcgggcggttatgccgggctggtgcggaccgaggtgctgaatctggtccggggcggcctgtggttcggatttctttgctggctggaacgctcgcagacccttgcccggctgatgcccgcggaaaagcggtgcgcgctttggtgggccgtcgtgccgatggccgcactggcgctcttcggaatgtgaaaaccgctgtcggatatgcgtgccgggccggatttgcggtccggttttttgcgtcccgcgccggcggttcctgtggccgtgaagtccggccgtgaagtccgggcgcggatgccgccgttagcgtgccgttgcaaatcgaacggctgtgcgcaccctttcccggaaggcgctgttcccgcaatatgaaataagatattttggaatcaatattgccgttttgaatgttttgtcgtaaattgtactcgcaacagtcccaaaaaagaagtgtcggtgttgtattttccgaatatgtttcctacatttgtagtaacatattgactaacacggaaagtgtaagtttattctcgagtggtaaatcttgcaaattattacgaaggagagaataggccggcatttcttcacgttctgtccgttttcggatttagagcgtgggactgttgcttattttattcttcaggttttgcaagaacctcccactctaaaataagcattcagcaccacgctttccttattttttaacgatgacatgttatgcaggaccctttcggtgcgggggcctgaaccggcgcgtcgccctgtcgatgcggagagcacactaacccttacttaaacatatctatgaaaaacgtattcagaacttttctgacggctgctgccgtgtttgtaacgctgggcgctgcggcgcaggaggacccctcgaaggagaccgtgatcatcaatccctttgcctgcaccgacgccgtgagtcaggctgcgtgcgacaacatgcgcgccgccgtgctgtcgggcttttccgaccgggggcgtttccacatcgtcgacgccctgaccgacgaaacgctgtcgaaactctacgccgaccgcaatgccgaggacgtggtgaacgacgccaactggaaatccgagagcgaagccgcctacaaggcgctgggcgccaagaaggtcgttatcggtcaggccaacaacgtttcgttttcgaccttcaagtcggacatcgacggcaagatgtataacaaggccgaggtgacgctggcgctgaaggtgtacaatatcatcgacggcgcgatggtcggatcggagaccatcgccgtgacgggtgtcgatgccgattcgaaggacggcgcgttcaacgacgcgatgaaggatctgcgcaaggcgatgaccaagttcgtcgacaaccacttcaagttcgagacctacattctggagctgggcgaagccgacaagaaaggccgcgtgaaggacctctacatttcgggcggctcggagatgggcgtcgccaagaagacgcgcttcaaggtctacaccgagcgcaagatcggtcctaaggtgaccaagtcggagatcggtacgctcgtcgccgtcgaggtgatggagggcgttaccaaatgtcaggtcgctgccggcgaggaggccatcaaggagaagttcaacagcggcgagaagctgatcgtcatcgtcgacaagcagggaacggccgcaggcggattcctcaaaggtctggtaggtgcgtaagcgcttcgaaaaatatcctgttccatacagtctccgggatgccgacggcgttccgggggctttatccgttcaaacttaaaaacaaaatcaaatgtttaggaagtccgtattgtcagttatcgtcgttctttgcgccctgatcccggcggcggcccagaattatacgaccgatgccatcctgaagaacacgaccggaaaaattgcgacactggagtgttcgggaatcgcccgtacgaagaaggaggcaaccgaaatggcgaaaaaatccgtgatatatacttatttatataacggtatagacggcctgaacgacaacaagcccctgctgggctacaaaccttcggccgacgcttcgcagtacgtgggcacgctgctcggcacgacccgctacgccaatttcatccgcagctgtacgatcgccgaccgcaccaacaagacggccgataagaacatacaggtctttgcgacgatcgacctctacaccgagtcgctcgaacgggacctgatcaacaacggcgtcatcgggcgcagcgcttccgacatcgcgctctccgagacgcaggaggcgatcgccatgccgacggtcatggtggtgcctttccgcaagggagacgaatcctacgaggaggcgatccgcaacaattcggacatgcgcatggccatctcgaaggtgaacgaaggcttcatcggcgagggcgtcgagaccaaggacctgctcacctcgctgaacaacgccaacacctatcaggtgcgtatgggcgacggcatgtcgttggacgacgcgattctcgccaactccggggccgacgtctcggtgagcgtcgatatcaatcaggacgtcaacgacggcggcgtgcgcgtgtcgctgaccctgcaggcgatcgaggtcgccacgggcaatacgctggccaccaaatccgaaatttcgggccgcaagcgcaccacggccgacgtgttgtgcggcgtcatggccaaggcgatgatcggcgacttcatgaaacagatctcgacccgcatggcgaccaaaatctcgaccggacagagcgtggccgtgcgtttcacgatcgatcccggatcggcgatcgacatggacaccgaaatcaacaacatcatgccgctttcggatattctcgtgtcgtgggtcaagcgccacgccaagaacggcagataccatacgcagggccgtacgagcacgctgctggccttcagcgacatcttcgtggacaactccgtggaagacggcatgcagtccgacgtcaatgacttcgcgctggcgctctatcagtacctcaaggggctgaacctctccgtgtcgcgtacgatcacgggaaattccatcgacgtaatcatctactaaacaacagaccatgaatctgcttcgcaaactatccctcttcgcggcgttcgcgctgggcgcgctgtcgctccgggcgcagaccgtaatcgacctttcggcctatatcgacgaagacacggccgcgcagctcggcgagagcaacgctgcggcgctccgcaataagatcagcaagatcatcacccgcaacggcatggccgatgcggcggggcttttcgtcgtcacgccgacgcttaccgtcaccgacgacggcacggtcgatacgggcatgacgaccgtgcatgtcgtgcgtgccgacctgaccctttcggtcaagaacctcttcgagaataccgttttcgccagccagaccgtatcgcttcaggccaacggcaagagcgaagaggcctgcatgcgttcgcttatcaacaaggtgaacgtgaacgacgtgcgtttcgccaagatgatcaaggacgtgcagcagagcatcgccgattactatacgcgccagatgccgaagatcctctccaagatcaactcgctcgtcgcccgcggggagtacgaggatgcgatggccgcgctggcggtagtgccggagaacgtcgatgagtacgaaacagtctccgacctcaaggtgcaggtctacaacaaactgctcgaaaacgaggtgaagcgggccgtcgccgaagccgatattctggtccgtcagggcgatatcgacgcggcgctggatttgtgccgctcgtgcaatccggtaagccccaactacggcgaggtcgtccgtttcctgaaccggctcgacgcgcaggccgcggccgccgaagccgccgctctggagcaggagctgcgcaggatggacgccgagcagctgcgcgaacgcacgcagcaggaggccgcggccgaagccaagacgctgaagcagaccaaggccgattcctatgagaaaaaaggcaagtcgctgggcgaatggctcttcggactctgatcgaaccatgtcggaactaactttaggattacgatgaaaacctgtcccgtctgcggcgcccagatgcccgattcgcagaacctctgtcccgcctgcggcgccgattacgtcgaagccgtggtcaatgacattaccgccggggtcgaagccgatccctctctgatgctcgccagtctcgaagaggggctggccgggctggataccgtccctatgcccgcaccgggcgaaacggtccgcaagatgatgcccctgctttgcggcgttgcgctggctttctgcctgctctccggtgtgcttaccggggccaatttcttctatctgctggccattgtcgcattgatcctgctggtggctgcgctgatgcggggaagacagcggctgagcgccggggaggtggtcgtacgggccgccgcacgggtcttcgccgaggacgccgcttcggtgcgggagcgcttcgcgggcaatgccgaggtgatggcccggctcgacgccatggaactccggctggacgacgcccttgccgggcaggccgcggcccatgcccggaaccgcaaaaaggtgatgctggttgcggccgtcgtgctggccctttgcagtgcgggcgtcggcgcgctggccgtgcggaaccatgccgcccgcagggccgcggcggcttatgccgcgcagcccgaatggatcaagctgcgggatggttacctcgcatcggccggcgatgacggggacggcggcaaagacctgcggctgaaagtagtgcatgccatgctcgcagccggcgaaagcgcggcagccgaggagttcttcttcgcgcacagccaagggaggatgggcgacgtcgattgcgccctgctcatcgcccgccattacaagacgcataacgacgcggaggccctcggcgcttttacggaccgggtgaaactgcgttacgattccgatacgcggaaggtaaaatccctaaaatgacaatccgatgaagcgtttacttactttcgcgctgctgctgtcggcatgctgtatctcttccggggcttttgcccagaaggacaaggtcgtcgaggcgagcggcaagcgcaagcccgactggatcgggaagtccgatccgtcgcatttcgccgtcacggaggtgggggagaccctttccgccgcttcggacaagtgcatggcttcgatccgccagtatatcgtcaatgccgtggcggtcaacatctcgtccgccgagaagatgaccacgcggcaggttacgcgcgaccagctggtcagcgtgatgaacgactactcctcggtgctgatgaccgaggccgggaaactgccttacctgaacaatatcaccctctcgaacgccgagtcgatttactgggagcgcgtatacagcaagaagaccaagacctaccgttacgaatattcggtgctctatcccttcccggaggcgacgcggcggcagttgatcgaagcgtttctggctatcgacgatgccaagcaggccgagtacgagcgtctgcgcggcgaactcgaaacgatcaccgacctcgaccgcatccagcagaacgtgaatgaactcgacggactgtacggctatttcttcgacgccacccgcaaaggcgcggtcgaaaccctgaaacgcaactatctggcgctctacaacgggctttcggtcgaagtagagtccgagacgccgggcgcctgcgtctattcgctgcggctcggcggccgccgggccgtgaccgcccgccagccgcgcctgcagagcgagtccgcgctcgaaatgaccgtcaaaccttacggggacgatctctatctgctgacctacaatcccgaatacgcatcgccggccgacgtcaataagatcgacctcacgtatctgtttggcggcgcccgcgtgtcgcggacgatctatttcgatcccgctgaaggcaaggtcgccgtgctcccgaagggtgtcgtccgtttcgagcagaccggcagcctgctgcgcggcaccatccagctgcgcgtgaacggcgcgcaggccgaggtgcgcgaacttgtgttctggaatcccgccgatggtgcgcgctttgccgccgcgaaggtcgaacccgcccggatcgcgcaaggcgagcggaccctgagtttcgaaatgtcggccgccccggcccgttcgatgaacgaactggacgtcgtcaagggacgtctggtcgtctgtaatcccgcggacggaaaaaccgcggagatcaattttacactgccttacaaacttactactaaataaatcggaaagatgaaaagaaccctcattggagcgatcgctctcgtactcgctgctggcgccgtgtcgtgcagttcttcgaaaaaggccgtcggccccgctgcccctgccggcatggtcgaagaggccattccgctgagcgggccgcagtaccgcagcgatgcggaatattaccgtgccgtgcagaacggcgtgagcaccgaacgcagcacggcgcagaagatcgccatgcagaactgccgtcaggacttggccgccgccattcaggccgatgtgaagacggttatcgaaaactatgtgaagaatcaggatacgggtatctcggccgagcataagtcgcagtatcaggagctggcctatacggccgtgaaccagcagctgcgcgacgtgcagatcgtcgaggagaagatgttccgtcaggacaacggctcgatgcgctactacgtctgcatgcagcttcccaaagtcgctctcgaagccgccgtggaggatgcgatcgccaaagacgccaagctcaatctggaattcgaccgcgcgcagttcaagaagatcttcgaagagcagatggcggcgtttgcacaatagcggccggccgatattgttgtccgattgacggcgctcccctcgctggagggaagccgccgtctcttatccgtaaccgatccgtctatgaaacgctacgtgattctgttgttgtcgctgtttttcgccgtgccccttgcggcgcagtcgcggcgcgaagccctgctcgaatatcaggcccgccgcaggcaggcctacgccgaatttcaggacaactaccgcaaagcctgcgccgacttcatgcgcaagcgctgggaggctttccgctccgaggctccggtgcctcttcccgaaaggaaggagccgccgcagcccgtcgtgaaacagcccgacgaatcggcggcgcccacgcaggaccggattccctataaggaggtggtcgaagcgcccgttcgcacggttccggcgatccccgcgacgcctgccgcgccggaagttcccggcgctccggaggagcctgacgggccgaaagcgccggacgcacctgcggagccgaaacttcccggcacgaaaaaggacggggaccgtacgcctcctgccgcgaccggaaagggtggtccggctcccgctgtcgtgacttcgcgcccctatcgttttacgttctacggtacggagtgctcggtgtcgctggccgcaaaacatcggttcaaactggcgtcgttgcaggaaaacagcgtcgccgatgcgtgggagcgcgtcgcgggcggtgcctacgatccggtggcgaaggagtgccgcgagctgaaagaacagctgcggctcaacgactggggctactacgcgctggtacgtacgctcagcgacggttttttcggcaaacagtcggccgaatcggtcgtgctgcagtcgttcctgatggccgaagcgggctgcaaagtgcggctggcacggggcggcgaccgcctctgcctgctgctggcgctcgatgatcaggtctatgccaaaccctatttcaagatcgacggacagaccttctacctgctggacgatatggcgcgggccgcatcgtacaacatctgcaatttcaggatgcccggcgaacgcccgctgtcgctggcgatgcccgtgccgcccgtgctggcgcagaaatccggacagcccgccgtgcggaagtgcggtgagggagcgctcacgacgacggtcgcggtgaaccggaacctgatggatttctataccgattatccgccctgctactggagcatttatgcggcgaccgaactgactccggcggtgcgcgaccagctttacccgaccctgcgcagcgcgctggcgggcaaaggcgagtacgacgcggccaacctgctgctgcactacctgcaccgggcgtttccctataagaccgacgaggctcagttcggcgtcgagcgcacgctcttcgccgaagagatgttccattacccctacagcgactgcgaggaccgttcgatcctcttcgcacggctggtcagggacctgatgaaactggacgtagtcctgctttactacccggagcatatcgccacggcggtctgtttcaaggaagacgtgaagggcgactacatgcagataggcgccggacgctatgtcgtctgcgacccgacttacgtgggggccgacgtgggcgacgcgatgcccgacctgaaacgggtcgcggcgcaggtcgtcaaaattgactaacccttaaaacccgattcgcgatgttttgtcccaattgtggaaaaaagtgcgaggataacgctttgttctgctggaactgcggcaccaaactgcccgcagcagccggacggtccgcttcggcggcttccggcggtcagtccgctccggtttcagcggttccggccgcttctgctccggcgggtcactccggtccggacgccctgttggtccgtcccgccccagcggcttccgcttctgcggccgcaccggccgtttcggccgcgtcggcagcttccgaagcacctgcggctccgatcgttccaccggtatctgcggctccggccgctcccggcacggcttcggggactgccgcacccggaggtgcgcagagtcgctatgccaaggaatccggcgggcggatggccgaaggagttctttttaccaacctgcgggcgctctcccgcaaattcggcaccgatgccggcgcggtgcgcaaactgctggcggcttatgccgaggcgtcgctcacgcacggtatccgctaccatatcatcgacgccgcggattacgctttcatcaaccccgaagcgggcgacgaccgccgggtgagtctttcgccgtcggattcgtgggtcgggcacggctgtctgctggccgactatttccgtttcgggcgcagcacctccgaggacgaaaccaactatctgttcatcatcggcggcagcgacgtgatcccgatgccggtggtgccgcagtatatctccgatcccgattacagcgatacggacatcgacaccgatattccgtatgcctacctgctgggcgagaagacctatcccatgctggggtcggcggagattttccaatacgaacagtatttccatgtaggccgcctgccgcttgcggaggacgcttcgctggacgatctggcggggtatctgcgccgcgcggcgaaggctcccggcacgctcggtatcggacgtgtgtacggccagaccgacctgacgtggctgtcggcttcggcttcggtcagcgaacccttccgccgccacaaactttaccggggcgacgagcggctggacgagcgcatttattcccggaatctttttatcagcccctgcgtcgaacggtcgatcgtcgataaggtcttcgaccggaacgccgacctgtattacttcaacctgcacggaagcgacgcgccgacggcgtgcagtttctatgcctcctaccggcagcagtgctacgaggcgatcacgccgcgccagctggcttcggccgaagcggcgaacgtggtggtgaccgaagcctgctacggagccaaatttcaggattacggccgcggcgagacgatgctgctcgccgccatgggcgacaagacgctgctttacctcggctcgtcgcgcattgcgtggggggcgtcgcagagcagttcggcggccgatctcaacaacgccgaccgcctgaccaatgtctatatgtccagactgctcgaagggtacagcgcgggcgaggcgttctatctggcccgtcagagcttcttcgattataacgacggttattttacgccgcatcaggcgcttacgatcgtcgaattcaaccttttcggcgatccctacctttgtgtcgggacgcggcgcggtgaagcgaaggttcagctgcgcgaggttaaggcactggccaaagggccggtgaatgccgtcgtcgaacgcaagtgcgtgtacgaggcagctccggcgtccatcctcgatcaggtgcgcaacgccgtggaccgcaacctgctggccatacgcgccacggtagacaaacagctttacgaacggctgggcgtggagccgcgcaaactctcgaccgtcacccggctcagatacggcaacggcgatgaattctacgccttcaactatgtcgagaccgacggcacgatcgagagccgccacacggcgacggccgacatgaagggcgatgtgaaatcaataatatcaactaaatagaacgactactatgaaatgccagaattgtaattcagaactccttgagggggcgaaattctgcacgacctgcggaacgcccgtcgccgtgcagcctgccggcggcgtgtgcgggaagtgcggcgcccggctgctgcccggcgccaaattctgcacgacgtgcggcgctccggccgcggctgcgccggagagtgcgcccgcacccgaagcgcaggccgccgaagggggcgaactggccgccgtgaagcagaagattttctggaacatccagaaaggcgaagtggcctgccgggtcaacgagtcggagttcgtcagctacgactcggcgcaggggctgatcgtgaacgacggcaccacggcctatatcaaggccaacggcaaggtgctggccgagattcacggaggtatctacgatttcgtcgatcccgacgaactggagcgcatactcgaaagccgcaggggcggtgcggcgggcgcgcttgcgggcggcggccgtttcctgataaacgccctgctgggccgccgtgtgaaggacaagttcgacaagagcggcgatcccgaacgccagcgttcgctggacgccgtgatcgagagcatgaagcggcacgaagccttctcgctgactctcaaactcgacaagagcttctcgctggtcttcggttcgggaacggccgaggagatggccgaattcaagccgatgaccgtccgtacgaaactgctcgacctgcagatggggctgcgtgcgattttccgcatcagcgatttcgaccgcttcgccgagtacttcctcaccgacgagcgcgtcgccacgacgctgaagatcgccgggaagctgcagcccacgattcagaatgccgtgcaggccgtcatgcaggaccgcgaggtcgaaggaacgtctattcccgccgacgtcgtcgagctgattacggccaagatcgtcgctgcgggcgaccagttctacggccttacgctggagcgcgtcgccgaagtggcggcgtcgaacgaggatctggaacgcctgcgcagcctgagccgcgagctttatctttcggagcaggagctggatttcctgcgccggaccaacgatttccgcaaccggctggcgacggagaccaacggacaggccatcgccgacgcccgcagcgacctgcagctatatcagggattgcaggaggtcaacaaggaccgtctgctggccgacgacgagctggataagttctacaccgtgctttcgcgcgagaagcgcatccgcgatgcgcagagcgaggacgaggtcgaagcggccttgtccgacatcgaaaagacgggtctgctgcgcgaagaggacgtcgagaatctgcggatcgacattgccgagcggcgttaccagcgcgggcaggtgatcaagctcatgcagctgaaggacgagatcgaattcgagaaggtccgtacggcgggcgagggccagatcgccgtggagacgatgcgtcaggggctggaactgcaggagctgacgctggcgcaccgcaggcgggaggacgagtactccgacgaccgccgcgccaaggagcgcgagcagatgcgggccgaccgtgaggtggagctggagctggatgacgccgagatgaacgcccagatcgaacgtctgcgcaaggtcaaggagatcaaccgcgaggacaagaagatggatctggaccacgagcgcgagatggagcgtctgaagcaggaagccctcgacaagaaggcgcggatgaccgccgaacagctgatggccgtggccgccggggagaacctcgattcgcaggcggcggtgaagttcgccgagtcgttctcggcggggaagaacgtcgaacaggtgcagcaggccgccgaggcccgtatcgccgattcgcagcgtcacgaggaccgcatgctggagatgatgcgcgagatgaaggagatggccacgacgatgaccgggcatatcgtgcagaacaaggacgaggagcgcgaccgctaccgcgaacgcatggagcgtcaggaggagcgcgtggacaagacgcaggacagcgccctcgaatacgccacccgcaacaatcagcaggcggctcccaagccccagccgcaggccccgcagtccgtcggccgtgtatgccccgactgcggaacggtggccgctcagggagtccgtttctgcgcccattgcgggcgagacctcaaataagccggagtatggaacgctacgaaggtgtgatactggtccggctgcagaatgccggatcgaaatcggaggggcgttacgcctttctggtgcgggacgacgacatgagcgtcctgaagctttgccgcgagggcgtgccgcccgccgacgatccgttttttgccgcatatgaccggcaggaggtggtcgtgacggggcgcatgagccacgggtggctggtggcggatgcggtcgaggcggcggcggatgccgaagagatggataatggtgaaacgacagaaaacagggaacaagcatgaaaaaatgccataaatgcggttcggaactggcggacgacgcccggttctgccttgagtgcggtaccgagtgccgcacgatggaggtgaaacgcaaacccaagtccggacccgaaaccggagaggccggaccgctggtcggcgacaagaacctgatcaacgaaagtacgatcatcggcaaacaggagaagtacgaggcttcgaacatcacgattcacaatacgatcaacgaggaccagtcgcacaagatcgtcgagtgcgcggtttcgggcaagcgtatctatatggaccagagtgtggtatgtccgcaatgcggcgggcaggtggcgctggagtattatgtcgagacctcgaagcgctgcgagaactgcgagcagcaggcccgcgaggagtaccgcgtgttcgtggcgcgcgtcatgggcgctcccggaccgttcgacgcggcgcgcaagcagcagttggacgccgaggcgcggcgtcttcgcatcgatgccggaacgcaggcttcgattctgcgggccttgcagcagcgcgctccgtccggaaatgcggcggagctgagttccgtgcagcgggccgaactggaggccgcggcgaagcgtctgattacggcgaccgagcgtgagcaggggttgaagagtctggagacctttacggcgctgcacgaggtttcgtcgaattacgaggtgggatactggtatttcctcgccatggcgattctcgatccggccggatcggtgaagagttacgaggaggagctgaccgacgattactggcagcgttactggggctttctggcctattgcaacacgggatcgcccaagggaagcgccgccgtggaccgcgtgcgcgcggtgttcggcgaccgggaggacgacgtgcggctggccgagacggtctattacctcgcgcgcggcttcgattcgttcgaaggctcgatgctggagcgggccggggagttgtcggcttcgatccgccgggagtatctgtccaaaccgctgacgatggtttacgatgcgttgcagcggcttatccgcgacgatatccagctggatcagcagtacagcgccgaggagatgtttgtcttcgtggacgttttccgggccggcaagtatatcgaatacctgtgtgccgagcaggcgcgccgcgagcaggaggcccgcgacgagcaggagcggcaagcccgcgaacggcaggctgcggaggaggcccgccgccggaagcaggccgagttggccgccgaccgttcgaagcgcatggagcaggagatggcccgtctgggcgcggcgaaacccgccgcagcgcactccgacgccaaagcgttcgccggatacgagaccgcagtgcccgtaaagaagaaaaccagtttgggaaaaataatcctgatcgcggtggtctgtctgatcctgctgatcggattgctgttcctgattccggctcctgagtcgctgcagtaggctgccggccggaatgcaggttgttatgatataacgtcggttcttataatataaataaggtaaatcggtcggttttaacggattcacccccgtcactatggatgtggcgggggtgaatcgtgtttttgaggagctggcagggcatttcttccggcgatatgcggggccgcgggccgtccgtcgtccggcaggcgggcgttgcgaaccgcaggaacgatctaatctttgaataaatattatataaaataatacaaaaagccgattaatgtgttttttctcaaaaaatattgttatattgcgtcattaaataatacttaataaaccttgactgtataccgaattcattattaacctaactattaatttaaaacttgaagtatgcttgaagctttctcaacgaacagaaacagaagcagagccggcctcatggcgcgcatgctgctttccgtactgggaattttcctgtgtgcaggtgctttagcgcaaaacgtagccctgaagggcgtggtgaaggacaatacgggtgaaaaactgacgggcgtgtcgattatcgtcgagaatacctcgacgggtacgacgaccaacagcgacggcgaatactcgatcgaagcgccgaagggagcgacgctcgtgtttttcttcctcggtttcgaaacccagcgcgtagaggtgggcaacaggaccgtcgtggacgtcgtcatgtcgcagaccgcggtgggtatggacgaagtagtcgtggtgggctacggtacgcagtcgcgccgtacgatcacttcggccgtgaccaaaatcgacggcgatctggtaaagggcacgccggtcaatacgctcggcgaggcgctgaagggcaagatcgccggtgcgcgtgtttacagcagcaacaacacgcccggcgcagaccccgtgatccgtatccgcggcggctcgtcgatcgacggcaataacgacccgctgatcttggtggacggcgtggagcgcgctttttcgggcatcaaccccaacgacatcgagtcgatggaggtgctcaaggacgccgcctcgacggccgtttacggttcgcgaggttcgaacggcgtggtgctcattacgaccaagtcgggcaagcgcaatacgggtccccgcgtgacgttcgacgccaatgtcggtttccagcaggcggagcgtcgtttcgacctgctcggcgccgaggattacatccgcatcgtgcgtacctcgatcgccgagggcacgagtcccatgaacaactttacatccggattctcggcaagttcgatcaacgacgccaattcggtctactcgacccgctggctcgaagagggcgaggccgtgccggccggctacaagaagatgcgcgacccgctggacaacaccaagtggctgattttccaagataacgactggcaggacgtgctcttccgcgacaactggtggcagaattactacgtgggtatcgacggcggtacggagaagacctcctatgcggccagcgtgggctataccaaggacgacggcgtggcgctgggtacgggctacgaccgtctcaacgcgcgcatcagcctgaattccaacgttacgaagcgcctccgggtgcgtgctacggccgattattcggatgcccggagcgaagagttcgacaaccagatgaatgccatctcgcgcgcactctcggctgcgccgaccatgaaacgctacatggcggacggcgtgaccccggcctacggttacaacgccacgtcgctgaaccccgaatattatgcctacatctatgacttcgacaaccgtaacaagcggctttcgatcgtcggcgggctggattgggagatcatcgacggactgaaggcaacggtggacgcttcgacctacaaccatgtgacccgcaagagttcgttccgcaaacgcggctatttctccaacctgactccgaccacggagagcttcaacgagctgacgcgcacgaaactggacgcctatgtgaattattcccgcaccttcgccgagaagcacagtctttcggccatggccggttactcctattcgcgcgacaaaaccaatgcgttcgccgcttccgccgagggcggaggttcggacctgacgcccacgctgacggcgcagcccgaccgtacgtcgagtacgagcagcttctccgaaatcgtgatgctcagctacttcggccgtatcaactacgactataagaagaaatacatgcttaccgcgacgttccgcgccgacggatcgtcgaagttcctcaaaggcaatcagtggggttacttccccgccatgtccgccggctggatgatctcggaggagaacttcatggagtctacccgccgggtggtggacgacctgaagcttcgcgtgagctacggtcagaccggtaacaactacatctcggtcaatgacgcgcgcggcaagtacaacgtgaacttctacaacggcaatccggggcttcatcccgccgtgatgcccaatcaggatttgcagtgggaggtgaccacgcagctggacgccggtttcgacctgtcgatgttcaacaaccggctgatggtgacggccgactacttcaaccgtctgaccgacaacctgatctattcgaaggatatgcccaacacgaccggtttttcgagcgtgaagacgaatatcggcaaggtgcgtttctatggtttcgaccttgagatcagcagccgcaatatcgtgaagaagaatttctcgtgggagtcgaagttcacgtggagctacgtgaagaacaaggtggtgaagctgcccgacaacggtctgccccagaaccgtgtggacggtatccgcgtgggtaataccaacgagtatttcggcggtatcgccgagggcgaaccgctctatcaggtggtggccttcaagatgaagcacatcatccgtacgcccgaacagctcgccgcggcgatctatgacagctattcgaagggttacaatcccgacgacggcacgaccgtgaagggccgcaagaacatgggcgactacgaatgggtgaaccgtcccggtacgaccaaggccgtggtgaacggtgaggaggtggagcagatcaactccgaggacaagttcgtgatcggttacagcgtgccccactcgacgggcggtttcagcaatacgttccgctacaagggactctcgctgaacgtctacctcgactgggctatcggccacaccatccgccacgcccagatggcccgccagttcatcaatacctttacgggcaatacggccctgaacgccggtgtgctcgacacgtggtcgcctcagaatccggatgccaagtacgcccgcttctattcgggcggcgagagcgtttcggccaacttcaagaacgactccgacgtcttcgccttcaagggcgactacctctgtatccgcgagctgagccttgcgtgggacctgcccaagaagttcgtttcgaagctgggcatgcagggcgcttccatcaccttggcgggaaacaacctgcactactttaccgcagtgccgggcgtatcgcctgaggtgggtacgatgagtacgaacgccgcaggctacaacaactatcctccgatccgtcgtatttcgctcggaatcaaggtgattttctaaatattacagcaactaagttaaatatacgattatgaaaaagatattcggaatattgtgcctgatcaccctctcgctggccggagtctcctgtcacggcgatctggacatcgcgcagaaggggcaggtaacgggcggcgacgcttggggcagccagtccaatgcgttggccaacatgtacggcatgatgagtactttccgcgcggccttcgccacggactatatgtactggggcgagtaccgcacgcagatctggggtaagggaaacgagacgcagccttcgcgtgacttcgtatataccaacaacatcgcttcgacgcatgcacaggcggactggacgagtctctacacgacgatcaaccatgccaacctgattctcaagtacgtgccgggaatcggctttacggacgaggggcagaagaaccagatcttgggagccgcccatttcgtgcgcgcgttctgctactactggatcggccgtatctggggtgacgctccggtgctgacggcgggtttcgagtcggacgggcaggaggggctgttcccctcgcgcgatcccgcggacgtcgtattccggcaggtcggcgacgatatcgtggcggcggtggattacctcaagaacgcttcggtgtcgagcaccgacatcccgacgctcgccgccgcatacgccatgcagacggactactacctgtggatggcgaaggtgcgcaaggacgcgactgcgctcgttgatgcgcgtacggcctgcgacaacgcattggccgcggcggcagctgccggcaagcagctcctcggcaatttcgccgacatattctcggtaaccaacaagctcaatcccgaagtgctcttcgcatggagcatgaagaaggacgagaaggagggcggtttccagtccgactggctctgcgccattcagtatgtttcggagaaatacgtcgagaatcccgtgaaggtgggaagccatcagcagtgggcgatgttcaccgaggctttccgcggggtgatcgacgagacgaccgtgaacggcgtcagcgtggaggattcacgtgcgcgcgtaagctacgatttcttcctcgacgtggagaaaaacaacaccacgcaccgctggatcaacaagtatgccggcacgtggaacgagggggcgcgcattttcgattcggacatcatcgtttaccgttatgcggacctgctgatgttcgatgccgagatcaagaacgaccagaatcagaaggatgccgccgtcgatgcgctcaatcaggtggcgcagcgcgcttacggccgtgccaacttctaccccaagacgcttaccaagcaggaggtcgatgccgctatcctgcgtgaacgcgagaaggagttctgcgccgaaggcaagctctggtgggactttatccgtctcggagtggtcttcgacgaggtgccgagtcttgtcggccgggagaacgagaagaacattctgctgtggccgatcagcaatacggcgatgaacaagaacccgaacctgactcagaccgagataggtacgatcgagtagatacctgtaaatagtttggagcggagccggcgcaatgccggcttcgtttttttgtgtttcgggatgccggggctgggaatcggggtgtagggatgccgggaggaatttggggatttcgggatgccgggcggtgttcgggatttcgggggcaggtgtgtcggagcggcgatgcgggcgagcgtttggcggggaaaggagggggcgcgttcggaggattgccgggtgctcggaagactgctgggcactcggaggattgccggacgctcggagggcgggagaggggcttgtgggagcttgtgcgtgtttcgggcgcggcttgtaaacgcatgggcgggaagttgtcgggaattgccggaggggacggattgctggctgcgaattgccggggggccggggcggggtgtcgggaagagggccgcttgagagtgggggtgtgggatgcttggaggcgatttgtttggcaggaatctcgttggatgcagggaaggggccgcgcgtgcggcgtgttgccggttgttcgggagtcgggttgaagccgggcgggggtgttccggcctttgtcgggagctgaaaccgagagagtcgggcatatgaagggcggagaagaggtgggaatataagaggag

SEQ ID NO: 12042 - DNA, 134448 bp, Unknown
  gut microbiota DNA sequence
gtgccttttaacctaaatctatagaacctctttgattacgaagttgtcgaccataaagcgggcgggcgtgtcgggttcgttgggcgtgccgattacgatctgcgtatcggcgtcggcgccgtaaaccgtgaccgaaaggttgttccaccggtctaccggccagccgccttcgagaccgctggggttgtcgaggagcacttcgcccatggcttcgccctccttgaaggagcctgcgccggacagcgtgatcttcagcttgagtgcgttcttgctgtcggggatgctccatgcgccgccgctcacggtgtgcagcggattggcgtcgaaggtgaagagaatcgtcgagttggcagccagacctgcgattttcggcgtgccgaaggcgccgctgcgtttggtcgtgccgaatttgatcatgcccgtgcggaagaatatgaagcgggccgtgccggtgggctggaacgtgccgggcgtcaggtagcctttcgaatcgcggatggcgatgtgctcctgatttttaaggctggtccactgctgttcgcgctgggcggcggagttggccgtaggaggatcgacgcttgcataccacggcatgatttcggccagctgtccgttgagctgctgctcgccccaatcggcttcgacccagctgaagtcgtcccagaagagcaccggcagtacgtcgatctcgcccgtgttgggcatgtcgcgcttgatcgagaagtcggccgtcgtggcggtcatctccggcaggttgtcgtcgaaccggcaggcgatgcggtagagaccggagagcagttcgcccgtccatttgccgtcggcgccggtggtataggtgcctacgtgagtcgcagcgccggcggcgacggagtagagctggaattccttttgtgcccagacgctgcccgttttggcgttccggaccgtgatgacggactggtgcgggtagatgtcggggttcgggtccttgaggtgcatcgtcgatttgagcaggtggttggcgatctcgaacttatggatgacatccttctttccgcccggctcgaaggccgcttcggcaacgtaatagcccgaacggacgttcatcgtaatcacgccgtcggcgtcggtggtatagtccgtcgaggagtgtacgacgtcgcccgccttgttggtgcgtttgatcgtgacggattcctcggcgcgcggctggccggtggtgtcgtccacgaccgtcagcacgtactcgaagagcgtgggattttcgggttcgctttcgtcgatgggcggcttcgaatcctcgcatcccgcaagcagcgctgtcccgaagaggaacaggaccggcatgaagagttttgagatggttttcataatgtgtttaaggttatagttgatgatcgtttcaggttttacctctcatttacaaatatagtattaataattaatatataatacatatatcggctattttctgatttttgagcctaatttttcttttgataggttttatatgtagtaccaatatggggcttttagagcgccgcggcgatctctgcgaattcgaagctgcggaaatagacgcctttgccgttgttgtgtccgtgctcgaacagcacgcctaccttcttgttcgccagtacggcgaggtcggaataggcggagtagaagtcgttgtccggaacgtatttgaaggtgcgcgaccaagagcggccgtcgttgctgctgagcttgatgctgccgttgcggcggctcgacccgtgatcgggattcgagaagagcaggttggccttgcccgccgaattgatcgaatagcgcaggatactgccctgacaaccgttgttgttgggttcgatcagcgtggttacctgcgccggttcgtaggtgagccctccgtcgcggctgaccgcctgccagcggtagcccagcgagttgggttcgtagttgcgcatgttggtcatcaggctgccgtcgcccagctcgacgacggtgctctcgttgccgtaggggtggtcggtgacggctcccaaatgccatgtcgcgccctgatcgtcggagtagatcaggtgggcgtggcgttcgcttttggggttggtgccgggtttgttgtggttgcagggcacgacgatgcggcccttgttcggcgcgagcgtcttgacgatggcgtggcagggtcccgtggcgtaccatgtgtaacccgcgatggcgacttggtcgtggatgtcctcaggggtgctccacgttttgccgtcgtcgtccgaataggttttcatcacccggcgcggatggccgctgctgcccgaaccgttggcgctgccgggcgtacgctcgttccagcagaacagcagcaggatgcggccgttgtcgagtacgacgggagcggggttctggcagcggttttcgccgtcgtcgtagaccttgatcggggtgctccatgtattgccgttgtcctcggagcgttttaccagcaggtcgatgttgccgtcgtccgccgagccgtccacgcggccttcggcgaaggccagcacggtgccggctttcgataccacaacggccggaatacggaaggccgcatagccgctctcgcccggtttgtatacctgcgaggtgacgttggcctccggctgaggctcgccgcctccgccgccttcgctgccgcccggattggccggttcgtcgccgccgctgctgcatgccgcggcaagaaacagcgcggcgaatatccaagtcagtatttgtatttttttcatggttgtgacgttttttatggttttggatcgcaaggccgtcctatttgaacagcttcgcgggaaggatggtgaactcgatgcgctcgtagcaggagtccacgccggtctcgtacatcacgcccagatcgccgttcggcaggacgaccatgtcggagtaggcggccgcgatgtcgctgagccggtaggctgtctgccagttcttgccgctgtcccggctgatctttacggtcatgtccttgcgcttggtcggatggtcgggattcgagaagagcagcgtttcggtcagtttgcccttgggggcgtagttgatgatgctgccgttgcagacgggttcggtcagcgcgcggtcgtagtattggggttcgagcgtgagtccctgatcgtggctgagggctaccagacggcaggagccgttgtccgcgcggttcttgtggcggggaccccgcatgttgagcatcaggtcgccgtttttgagctccgtgacggtgctttcgttgccgtcgcgctccccttcgccgccgatggcccacgtctggccgtggtcgtcggagtagatcaggtgcgaataggaacccgcgcccttgccgtccttgaagagtccgtggttgcaggagactacgatgcggcccttgtgtctgcccttctgaagctggatggcgtggcaggggcctgtggcgtaccacgtccagtcttcgcgtttgacggacggggtgatctcgcggggggaggaccaagtcagtccgtcgtcgtcggagtagagcacgaagacgcggcgggtgtccttggccgtacgggcgtggatgtccttttcgtggtccgtaccgtcgttccaagtggagagcagcaggatgcggcccgtttcgcggtctacgaccggcgccgggttgccgcagacgttgcccgcgtcgtcccagacggtgatgatgtcgccccacgtgcggccgccgtcggtcgagcggcgcagtacgaggtcgatgtcgcccgtatcgctgcggctgtgtttgcgggcttcggcgaaggccagcacggtgcccttcttggtccggaccgtcgccgggatgcggtaggtgtcgaagccgttgtcgcctttcttgtagatcgtcgccgtgtggacgggctgcgcgtcttgcggagccgtttgctgtcctgaggcgcacggggcggcgaggagcagcatgcctgtgatgatgttggtcagtttcatggtatttttataggttgaaaaattcgggaatgatctgccgggcctgccgccggacctcttcgacgcgggagtcgggaatcgagtcgtagggccaccgcagcgtgctgccgacgtcggcccatccgccgacgagggccatgaagcggtcgcaggcgtggttggggtatttcatccggacgatgaacggcgtgatgcaccgctccatgaaatgctgaatccggccctccagttcgagcgcggccgtcatgtcggtgagcatcagttcgtaccagcgctgcgccgcaaaggggttgaggcaggcgacgttggagtaggcgcccgcggctccgagcctgacgccggtagccagatggtggccggggacgaagacggccagccccgcggcatggagggcgacctgtccgtaccactccggcgaggagttcctgtcgttggtcttcacgccgatcaggccgggaacgtgccgcttgagcgtcgcccattcggcgggtgtcagttcgcgtttggcatgcggcgggttgtagagtacgagggggattccgtccgcctgttcggccatcgtcgtgaggaaccggacggcttcgcggtcgttgacgggaaaccagtcgggcaggatgacctgtatggctccgggtttcagaccgcggacgagttgcaggcgcgcgagcgactcctgagcgcagggatggctgacgccgatctggaacgccgtgcctgccgcctcgcatttctcggccagcagccggctgatgcgtaggaattcgtcgcggttctggctgtagaactcgccggccgtgccgttggagtagatgccgtcgggtttcgaggcgatcaaaacgtctatttcgtcgctttgccgggagaagtcgatctctccccgtctgtcggtggcgagcagcagcgtcgcccagttgccgcgcagcgtgtcgtgcgttaggggtctcatagtaggaaattccggttgtcgttcgtagcgccgaatcggcctgccgggagtcggcggcggcgtcttcccgatggagtcttcggctattggtaggacaaatatactgaatggtttttaatatgcaatacataatctatctatttttaaggaaaatttgcaaaaaatcgaattttatacattatatataataataatcgcaagaatggggatttgttatttgtattatataatatttattgttatgtttgcatagcttaaacttacttaacttaacagaacctcatgaaagacgatgtttctctggtcgaacagacacaacgggatatactcgaatatatctccaaaaacaattcgaatgcgcaactgcctaaagagcaggaattcgtaggactgctgggcgtgagccgcgtcgtcgtgcgcgaagcgctgagccgtctgcgcgcgctcggcatcatcgaaaccaaacgcaagaaaggaacggtggtcgttgtgcctgagatattcggcgggctcaaggcgatcgtcatgtcggggctgctcgaccgcgatacgctgcgcgacctctaccagcttcgtctgatgctggagatcggcatggccgatttcgtcttccggaacaagaacgaggagataatccggaaactggaggagatcgtcgcctgcgaggtggagctggaaaggcagctgatccgcaccgaggacgacgacgaggcgcgcgagatcgccgaaaaactgcgcgacgtggacattcagttccacagcacgctcttcgagacgacggcgaacaagagcctgatggatttccagtacctgctgcggcacctcttctcgctttacgctccgcgtgcgaaaaaggattttcattcgcatacgatcgttacccatgtggggcttttcaacctgctgcgcaacggcaccgccgacgctttccgcatggcgatgcgcctgcacctgaaaacgcagttcgaaaatatggaggtccttgtggataaggccgtaaccaaataaaaccaacccagaatacgaaacttcacatgaacccgattaaaaaactaagcttattattgtcggcgctgctggtcggcggcttgtgcttcccggcggcggcatccgattttacggtgcgtaccgccgggacgttacccccccccgcttcgggcggcgttaaaaatcccggcgtggcgggcgctttcatcggcgggatcggcgaccggatcgtcgtggccggcggctcgaacttcgcgcagggcgcgccgtgggacggcggcgcgaagcagttcgaagatgcgatttacctgcttacgccctccggcgacgcctgcaaatgcgagctggcggccgatgcgaagctgcccgcgggtatcgcccacggctgcgccgccgctgcaggccgcagtctctactgtttcggcgggctgactgcccaaggggagtcgcgcgcggtctatgcgctgacgcccgtcggaaattcggtgcgcgtcgatgcggcgggtgagttgccggcgggtttccgtcccgcggccgcactggcttataaggatgagatttacattcacggcgtgacggacggcgccaacgctttctggcgtttctcgcccgtgagcggaaaatggaccgagcttgcggcgtgtcccggtgcggtgcgttcggcgggaccggcttttgcggcccagcacaacggacgcgaaaatgccatgtacctgatcggcggccgtcacgagaaggacggggagctgcagttgtgttccgacgtctgggagtacctgccggtgcatgacaaatggcaggccaagggcgacgtgacggtcggcggcaagcctgtggtggtgatgtatgccgctgcggtgccttacggatcgggccatgtgctggtgttcggcggcgacgacggccgggagctgctgcgccgcgccgcgctcgaacgggcgatcggcggggcggcgacgcctcaggaagcggagagcctgcgcggagagctgcgcgaagcgttcacggggcatgagggattttcgaaagaactgctggcctatcacgccattaccaatacgtgggtgtcgctcggagaggcccggacgggcttcccggccgtatcgacggccgtggtcgcgggcggcggaatcgtcattccgtcgggcgagatacgtcccggcgtgcgtacgcccgacgtgcaggtcgtgacgattcgcgagacggcggaattcggctggggcaactactccgtgattatcgcctacctgctggtcatgatgggtatcggcgtctatttcgtccgcaagaacaatacgaccgaccagttcttcaagggcggggcgaaaataccttggtgggcggccggtatcagcatcttcgccacggcgctcagcgcgatcaccttcatctcgattccggcgaaggcctacggcgccgactggggcatgttcatgttcaacatgacgattctgatgatcgtgccgatcgtcatccactactacctgcctttcttccgtaaactcaacgtggcttcggcctatcagtatctggaacagcggttcagttcgccggtgcgctatctggcttcggtgttcttctgcttcttcatgttcgcccgaatagccatcgtgctcttcctgccgtcgctggcgctgaacgccgtgaccggaatcgacgtctatacctgcatcctgctgatgggccttgtgaccattgcctattgtacgatgggcggcatcgaagcggtcgtctgggccgacgtcgtgcagggcgtgatcctcgtgggaggcgcgctcgtgtcgctcgtgtacctgatcagcggcatcgagggcggattttcgggcatggtcgacgtcgccgtgaccgacgacaagttcaatattctgaatttcgctttcgacctgacgcagccggtcttctgggtgacgctggtgggcggtctggccaatcagctgctggcttacacgagcgatcagtcggtgatccagcgctacatcacggtcaaggatacggccggtacgaaaaaggggttgtggctcaacggattcctgagcattccgatcgccgtgatcttcttcatgatcggcacggcgctctacgtcttcttcaagcagcagcccgaactgctcagcgtcgggatgtccaatacggactcgatattcccgcatttcatcatgtgccgcctgccggtaggcatcgcgggactgctgatcgcggcgatcttctcggcggcgatgtccaccctctcggccaatatcaactccacggcgacggtgctgaccgaggatttctaccgccgcttccgaaaaggcgcgaccgacaaacaggcgatgggcttcgcccggctgtcgggcatcgtcgtgggcggtctgggactgctgatggccattctgctcgctacgttcgacatcgcttcgctgtgggatcagttcaactttttcctcggcctgctgaccagcggtctgggcggcctgttcatgatgggcatcttcaccgagcggatcggcacgcggagcgccttcgccggatttgtcggcagcatcgtcatcctgctgatcgtcaacagctattcgaacgtttcgttcctgctctacggatttatcgggttggcttcgtgcttcctgatcggttatctttcgagtttcgttttcggacgcggaaaataatggaagggacgatcacgaccattcagcggatgtccgtgcacgacggtgcgggcatccgttcgaccctcttcctgaaagggtgcggcatgcgttgccgctggtgtcacaacccggagacgtggagcggcggcgtgcagctgcagcagacggcggggcggtgcatcgggtgcggctcgtgtctggaagcgtgcccctcgtcggcccttagcctgacggcggagggtatccggatcgaccgcaggagctgtacggtctgcggcgactgcgtcggggcgtgtccttcgggtgcgctgtcgctggtcggggagcgcatcgaggcgcgcgaagcgctgcggcgcgtggcgcgcgacctgcctttcttccggcagacgggcggcggcgtgacggtttcgggcggtgagccgctgttgcagccggagttcgtggccgagttttttgcattgtgccgggaggcggggatcgcgacggccgtcgagagcaatctgctggccgaatggaagtgcgtggagcggttgctcccgctggtggacgagtggatgtgcgacttcaaaatcttcgacggggcgcttcaccgcgagatgaccggcgtcggcaacgagcgtatccgggagaatctcggacggctggtcgggagcggtgcgaaagtggtcgtccgcacgccggtcgtacccggtgtgaacgacaacgagaccgagatcggaaatatctgccgcatgctgctgcccttcgaggagcggctgctggggtatgaactgctgcgttttcatacgctcggattcgacaaattcgcggcgtgcggcatggagaatcctttggccggagcgcgcgaactttcgaaagagcggttcgagacgctgcggagttttgcaaaatcaatacttaagataacgaaatgatgcttatggaagcacatgcgaattacgacggcgaacttgcccggctgaaagcgaaaaagttgcggcagaccaaggagaagatcgaaaaggagggcattctggacgaggacgactacggcaggatcgtcccgcgggaaggggtgtggcggattattccgaaccatgcggacggctcgttctacgggttcgacgcatggaccgggaatttttgcagcctgatggatgtccatcaggtctacgtcgatcccgacgacgcgctggcggggcgctggtgctatttcatgtcgaagatgcgccccaacaagtggaatccggactatccctacgatcatctgcgcgagcggatcgaacgttacgacatcatacacggcatcggcgacgacgcccacttcgcccccgattacgagatggggcttcggctgggctggggaggactgctcgacaagatcgcccgctatcgggcggtcaacggcacggccgaacagcagcacttctacgacctgcacgagcgggcgatccggagcattcaggggtggattcgccgccatatcggcgaagcccggcggctggccgccgaagagcgcgacgaacgccgccggcagaacctgctggagatggcccggaccaatgaaaacatcgtcgagggggcgccgcagaccctgcgggaagcctgccagtggatcgtgtggtttcatctggcgtcgcggacctacaaccgggacggcgccggcgggcagatcgacgcgctgctgcggccgttctacgagcgggacatcgcggcgggacgcatcaccgacgccgaggcggtctactatctggcctgcctgctgataaacgaccccgtctactggcagctgggaggtcccgatgccgacgggaaggaccagacttcggcgatctcgttcctgattctggatgcggcctgcaaggtcgattcgtcgctcaatatcacgatccgcgtgcatgacggtctcgatccgaagctgctgcgctacggcgtcgagtgtctggtgaagtaccgcaacggctggccccgtttttcgggcgacaaggcgctggtggccggattcatgcgcaacggattcgacgaacggctggcgcgccggcgtatcgccgtggggtgcaactggatgtcgctgccggggctggagtatacgatgaacgacttggtgaaggtgaatctggccaaagtcttcgaagtggcctacgacgagtcgaaagccgacgccgggcggactacggagcggttgtggcgttcgttcgcgtcgcatcttcgggaagcggtgcggacggcggccgagggaatccgccatcacctgaaatatcagaaattcaacgagccggagctgctgctcaacctgctgagccacggcccgatcgagaagggccgcgacgtctcggacggcggcgcggaatattacaaccttgcgatcgacggcgccgggctggccgtggtggccgattcgttcgccgcgctggaacagcgcatcgagcgggaaggcaggctgacgtggcaggagatggaccggctgctcgacagcgacttccagtgtgaggaggggacgaaatatcggacgctgctgggccgcagccagcgttacggacaggccgattcgctgggccgcaagtgggcgcttgccgtccgcgacgagttcacggcggccgtgcggggcgagacctcggccgacggacgttacaagttcattcccggtttcttctcgtgggccaataccgtcgggttcggactccatgtgggggcgactcccaacggccggcgggccggaacgcccatttcgcacggagcgaatccctgcgcggggttcgccgtggacgatgcgtcgctttcgctggcgacggccgtcgccgagatacagcccggttacgggaatacggcgccgatgcagtgggagcttgatccctctttggccggcgcggagtgcattgcgctgatcgaagggatcatcaaggcgcatttcgagatgggcggtacgctcatcaacgccaatatcatggaccgcgagacgattctcgcggcgcacgccgatccgtcgaaataccccgatctggtggtgcgcgtgacgggattcacggcctatttcgccatgttgtcgcccgaattccggcagctggtggtggaccgcgtgttggaaaactgatcttcggaacgattatgaagcggaaatacggtttgctgggattgctgctcgtgtcgggagccgacgctgcggcccggaacaaggtgcggcccaaaaacgtgctgttcatcgccgtggacgacatgaagcccgcgctgggctgttacggcgatcgggtggcgcggacgccccatatcgacgcgctggcggccgacggggcggttttccggcgcgcttactgccagcaggcggtcagcggcccgacgcgcgcgtcgctgctgacgggactgcggcccgaagaggtgggggtgacggaactcaatacatggatgcgggccaaggtgccggacgtggtgactttgccgcaggctttccgcgaggcgggatacgaaacgcggggcgtgggcaagattttccacggcacgaaaaacagtctggacgagcgttcgtggagcgagcgtccgtcgctgtacgagtattcgcgcaacgaggagtatcagctggcggtcaacaagacgggaaagaaggcgcgggccgtggagttcgcggatgtgccggacagtctctatttcgacgtgaagatccgcaacgaggcgctcgcccggctcgaagagctgagccgttcggacgagccgtttttcctcgccgtgggtttcctgaaacctcatctgcccttctgcgcccccgaacgctaccgggaactctatgccggccgggatttcgccttggcggacacgctccgggcgcgtcccgaaaatgcgcctgagatcgcctgtcacaacagcgaggagctgcgcgggtacaccgacattccggacctcatgccgctctctgcggagcaggaggcggagctgcgcagggcctattacgcatgcgtttcgtttaccgacgacaatataggggcgatcttggaccggctgaaggagcttgggctttacgacgatacgctgatcgtcctctggggcgatcacggctatcatctgggcgaacaggagctgtggtgcaaatcgaccgtttatgaagccgcatgccgtgcgccgctggtgataaagccggcgggacggccgtgtcaccgggaggtggaggaggtcgtggagtttctggacgtctatcccacgctgctcgacctgtgcggcatcgaggaccgttacggcgtttcggggcggagcctgcggccgctgctcgacgggcggagcatgcgcaaaggctatgccgtcagtcagtttcagcgtccttatcctgcgcttacgagccttaagaagcggcgttacatgggctataccgttcgtgaccggagatggacctatacggagtgggtcgatctgacggggcgcgtggcggagtgcgagttgtacgacatgtcgccgggcggaccggagcggcggaatctggccggggagccgcggttcggctccgtcgagcggcggatgtcgcgggcgctgcaccgggtgctcaggaaccagaaaggggtgacgggcattgcggccggagagttcgggaagcgggattgattcgatcggaactttaaaaaatagaggatttttatgaaacgttttgttttttctttgctggcgctgcttctctccgctgcgggggcttcggcgcagttgaaattcgtggatgcggagcagctcggactggtcaataagctcggtccgacggaaaaccgctatcaccgggtcgatacggacaagtacgaccttacgcaggccgaagcgaacctgctgcgcatgccggccggtatggcgctggtgttccgcaccaattcgtcgcagatcgccgtgcggacgcactatctgaattacagcatggtccgccatagtacgacgggggtttcccagaccgggtacgacctctacatccgcaaggacggcggatggctgtacgccgggtcgaacgctccgaagaatgaggacgcggagctggtgctggtccgcaatatggacgacagcgaaaaggagtgcctgctctacctgccgcttttcagcgagctgggccgcatcgagatcggaatcgacgagggggcgcggatcgaggcttcggccaatcctttccgtcatcggatcattattttcgggtcgagtttcacgcacggcacgagcactggacggccgggcatgtcttatccgatgatcatgcagcgcaacacgggactgcagttcatcagtctgggcgtctccggaaattcgaaactccagcaatctttcgcccaaatcatcggtgacaacgcctgcgatgcgatcgtcgtggacgccttctcgaatccggggccggagatgatccgcgaacggttcctgccgttcgtcgcggcgatccggaaagcgcatcccgccgttccgctgatcttcctgcagacgatttaccgcgaacgggccaatttcgatctcaaggagcgggcgcgcgaggaggagaagcgccgggcggcccggacggtcttcgaagaggcggccaaggtctatgaccacatctatttcgtcgatgaacccgacttgaccgggaccgatcatatcacctcgctcgacggcacgcatcccgacgatctgggatattggcgctgggccaatgccattcagccgcggatcgtgaagattctgaagaagtacggcatccggtaacggccggtccccgctttgcggagcgtccgcaggcaggggactgcggtttcggtgttagcgccgggacggattcgccgcgccggcgatggtgccggcaggtggacggatgaaaaaaagcgaactcttgcgggttcgcttttttattggggaacgggccggggcggtctgtgtacggaggaatgccgcgccgggcgtttaccgcttgtggcgttcgaggtagatcgtgtagagcctgaagtgttcgacgatagcgtgtttgtaaccctccagatcgccgcgcttgatgaagtccagcaggtggcggtgggtcaccggttcgctgttttcgctcagctcccgctcgatcggctcgaaaaagtcgcgggactgctccttgacgaagtccagcgccgggtagatgatgtcctgaaactcggtgatgatgtggttgcccgtgatttcgtagagtttggtgtggaagcggtgttcgctgaccggagcgtatttgttgttgccgatgacctgactcatctcgacgatctcttccagctcggcgacgtcggcgtcggtgaggttgcggaagatgttgtcgctgatgccgatttcgagcgccacgcggaattcgaggatgtcgcagagcgtcgattcgttcatcagcagcggattgatgcaccgcttcatgccgccgagcagcgacggctcgcccagcaccatgcctttcttggtgcgcgagacgatcatgccggtcatcttgaagcggctcagcgcttcgcgcagcaccgggcgtccgacgcccagcgaggccgcaagttcggcttcgttggggatgctgctgcccggacgaagtccctgctccttgaaaaagcggatcaggctctcctcgacgctatctacgagcgtggtgttgcggttgtccagtttcggtccttccatctgtatgtggttgtcgtaaacataatacgaatatcgttgtcttttgtcggggcgtgagaggccccctgctgaagcggttgccgccgtatgttttgtacggagcgggtagtgcatgttttattccgttccggaccggccggacgaaccgaccgccggaacggaatctgccggagagccgtgcgtgttgattgtcagctctgtatgcgggctactttttgaacccgatcgcccggagttcttcgtccagccgggctatttcggcctcggtgtagggggcgaggggcagacggcagtcgccgcagtcgatgccgacgagtttcatgatggctttgccgccgcggatgccgccgccgtggttgatgatcacgtgcacgatgtccaccgactcctgctgcgccgcgcgggcctgttcgaggtcgccggccatgaaggcgtcgtagatgttttggtaggtgcggagcgagtagttgtaggtgctgcccacgccgccgcgcgcgccgacggccatgccgcagagcagcatttcgtcgaacccgttgaggatgtcgaagcggccgccgtcgaaacggatgcattcgatcatctccatgaagttgttcgacgtgaacttgatgccgttcaggttgggaatctctttcgagcctttcttcaggaagtcgatcatcggcaggttgatgcccgtcatcgagggaatgtggtaggcgtagaagggcagcggagcgcatgcggcggcgatgggtttgtagaaggccaccagttcttcgaccgagccgggtttgaggtagaacggggcgacggcgcctacggcgtctacccccagtccggcggcatggcgggccagttcgatgcagtcggcctgacaggtgccgcccacgtgggcgatgatgaggatacggcctgctacggctttggtccacgcttcgagcacgctcttgcgctcggcgacggtcatcgaggtgcattcgcccgtcgagccgcagacgaagacgccgtaggccccttcggcgatgagtttgtcggcgtagggctgaatttgcgaaaaattgattgcgcccgttttgtcgaacggcgtgaagacggcgggaatgagtccggatagtttgaacatgattattgagtattagttagtcctgtcggtaatgaatgggtaggtattaaatagaataatcttatttgtaggacaaatatagggcgaggaaatgaaaaaacaaaaaaatcggcgcatttttctgctttttcgatgaataatttcggtgggcgtagccgggcgagtgacggaacgggagtgaacggggaggagcgggttgagccgcgcgctgcgggaaggaacagggagaggggggcggaaaggtgcgcgggagggaatgggccggaggtgcaggatgaggcgggaagggatagggtggagcggaatgggatgcagagtggcatggagcgaggacgagtgagacggagccggacagccggaacggagcggagacggtgcggggcttggctggcggaagcctgctcggaggtggacgccgtttggtttttacggtagaaacaacgctgcaaccggagtgttgcagcgttgtttgcggcataaggcgtgttttgcgccggggcttctttacggaagagccggcgattcggcggccgtctgaccgccggattcagggcgtcagattttgtccagctccacggtgaagtgccgcaggatcggcgcctcgaacgtgatgcggtagccggtggtgatttcggcgcggcgttcgtagatgttgcggcaggcggcggcgatcacgcggatgtggttgtccgaatagacccggcgcgggatggccagacgtagcagttcgagccgcggatagcggttctcgtgcgtgtcggggtcgcggtcggcgaggatcgagccgatctccacgccgcggatgcccgcttcgaggtaaagctccacggcgagcgtctgggcgatgaactgctccttcgggaggttgggcagcacctttttcgcatcgacgaagatggcgtgtccgcctgccggacgctggtaggggacgccgtattcgtcgagcaggtcgcccagcagtttgacctgacggatgcgggcgtcgagctgttcgaattcggtgttctcgtccaatcccacggccagcgcgtccatgtcgcggcccgacatgccgccgtaagtcacgtagccctcgaacatgatgctgaaggtcatggcccgtttgtaaagctcctcggagcgcatggccacgaagccgcccatgttcaccacgccgtccttcttggccgagatggtcatgatgtcggcataggtgtagatttcgcggacgatctccttgatcgtcttgtcggcgtagccggcttcgcgggtcttgatgaagtaggcgttttcggcgaaacgggccgagtcgagcagcaggggcactccgtagcggcggcatacttcggccgtctcgcggatgttgcgcatcgacacgggctgtccgcccgccgtgttgttggtgatggtcagcaccacgcacggaactttctcgcgcgggttctcgcgcaggagcttttcgagcttggcgatgtccatttcgcctttgaacggcagctccttctgggtgtcggccgcctcgtcgatggtgcagtccacggcgtggcagcggcggaactcgatgtgtcccttcgtggtgtcgaaatgggagttgcccggcacgatgtcgccctctttgagcagcgccgagaagatgacgttctcagcggcgcgcccctgatgcgtgggcaggaagaaaggcatgccgaagagccgggagatggtctccctgagccggaaataggacgatgcgccggcgtagctttcgtcgccggtcatcatggccgcccactggcggtcgctcatcgaacccgttcccgaatcggtcagcaggtcgatcgtgacctgatcgctgcgcagtttgaagaggttgtagctggcttcgcggatccacgtctcgcgttcggcgcgcgtggaggtgcggatggcctcggtcattttgatcttgtagggttctgcatacggaagtgtcatacaaaagagcgttttaggttgtaatttgttgttcgtatactcaaaattacgaaaatattttgagatctttggtatcggtattatatttgtgaaagccggtgtgtattttttaattctttcgcgctatgaaaaagtatcgttgcaccgtctgcgagtatatttacgacccggcgctgggtgatcccgaaaacggcatcgctcccggcacggcattcgacgatctgcccgacggttggatatgcccggtctgcggcgaaggcaaatgggccttcgaacctctcgaagaacaataaaaaacgacgaagactatgttaaacctcattgtttcactattaattttaccgcttatggcaacagacactgcaaaacaggtgcgcttcactccgaaggacctgccttatgcttatgacgctctcgcaccgcaggtctccgaagagacgctgcgcttccaccacgacaagcattacgtgggatacgtgaataaactcaacgaactgattgtcgataccccctatgccgagcagccgctggaggatatcgtcgtttcggccgacggcgcgatcttcaacaacgccgcgcagatgtggaaccacgaattcttcttcgacgaactttcgcccaaggggcagacccgtcccacgggcgcgctgctgaaggccatcgacgaaaatttcggatcgttcgaccagctgaaggcccagatggagaaagccgccgcagggttgttcggttcgggctgggtatggctcgcggaggacaagtcgggcaagctggcgatcgtcagcgagcagaacgccggcaatccgctgcgctacggcatgaagcccctgatgtgcttcgacgtttgggagcatgcttactatatcgactaccgcaaccgccgcgccgatgctgtcgcagccctctgggaccgcatcgactggaaggtcgtcgaagagcgctacgccaagaaatagcgggttccgcttaggaaaggacgccgtttcccggtttcgggaacggcgttttttcgtgcccggatttcatgcggcggagggtttccgggggcggcggactatattccgccggatatacaggatcggaaatattatatatttccgtcgttcgccgcagaaaattctggcgggaaaaaattggtggaaatggcaaaaagtattacctttattcttttaccggacgtttattctgccatgaatcgctctatcgaaatttcccccccccatggtttggaggaggtctatgcggagtacaggacgtatttcgtccggatcgccgtgtcgtatgtccgtgacaggatggtggccgaggatttggtgtccgatacctttttgaaaatctgggagagccgtacggagacgacgccccggaacctgcccgcctatctgcttaccgcgctcaagcgcaagtgtctggactatctgcgcgaccaagccattcatctcagaatccaacagaacatgcaccagaccagtgcgcgtgtggtcggagagcgtatcgcgcggctcgaagccaacgatccccagaacctgatgatgtccgaggcgctcgccatcatcgaacgcgaactgcggcggatgcctgaacagcggcggcggattttcatcgcccaccgttacgaagagatgtcctaccgggaaatagccgccgtttacgaattgtccgaagggcaggtgacctacgaactgcgggcggcgaaggaggcgctcaaagcggcgctcaaagattatctcccgctgataggactcttgctgaacggcctctgacggccggatagcccccccccggaattattaaaaatatttatttgcgggattttgcgatttttttcgcaaatcccgcattgtcgtgcgtcaatatagcaacttatggaaaaggaaacattatatcgctatgtggcgtgccaagcatcgcctgaggaggaaacggccgtgctgacgtggctggaggccgatcctgcacatgaatcggaactcgcaaaggtgcagcggcagcacgatctggtggctttgagcgccccggtcatcaacgaactttacgccaaggaccgcaggcgccgtttcggctccgtcctgcgccggtggagcgcggcggcagcggcagtcgtactgctcgccttcggcggttattattttcacgccgcacgcgatttctcacggcagggcgagcggctgctgtcggtctccgtgccgcacggacagcgcgtcagcctgacgttgcaggacggcacctcggtatggctcaacgccggaacgacgcttcgctatccggcgctctttacggggcgtgagcgccgcgtggagatcgacggcgaagcccggttcgaggtggtgcacgatgcgaaacatcccttcatcgtccggacatacgcctgcgacgtcgaggtgctgggcacgaaattcaatgttgtggccgaggaggagaacgggctgttctcgacggctctgttcgaaggacgcgtcgccgtttccagccggctcgtccccggcgagcgattggtgctggaacccgacgaggtggtgacgctcgaagggaagcatctgtgtctcggacagatcgacaacgatgaggaatatttgtggacgaacggaatcatcagcctgaccgatcagtcgttctcggagctgatgcaccgcttcgaaaagaccttcggcgttacaatccgtatcgagcgcgaaccgtcgatccgtatcggacagggcaagatccggcagtcggtgggcatcgacaatgcgcttcaggtgctgcagcggtttgccgatttcgagtacgagaaggacgaacagaacaacacgataaccatccgataaactcagtctaaccttaaaaacgaccggcctatgaagtaatccaagtttgtgagaaactgtatactatgattgtcggaacctcagaaaatggcctgtgcggatggtagcacatcgcacaggccggggttcaagcaaacctcctactcaaacctaaagtacaaatttatgaataaaacatttatcagacaagcgaaaaggtcatttacttttttattcatgcttggtctttgcgctatctggtctccgcaggcggcggcccagaaccgcagcctgccccaagttacgatccggatggaccgtgtcccgatgtcccagatcatgtccgagatcgaacggcagaccaaatatctgttcgttacgggttcggatgtcaagaccgaccgtatcacaagcctcgatgttacggcggtgccgcttacggaagccctgaaccggatggtggcgggcgcggacctgacctatgacatccgttcgctgagcatcatcctctccgtaaagaaagccgagcagcctgcggccgtcgcaggttatgtccgcgacgggagcggccagccggtcatcggcgccacgatcatcgtccgcgacacctccaccggaacgacgaccgacgccgacggacacttcaccctttcggtgcccgcaccttcgacggcatggctcgaagtgagctatctgggctatgagccgcagacgctcgccgtcggcaaccgcacttcgttcgacatcacgctgcgcgaggccgcatcggagatcgaatcggtcgtcgtgacggccctcggcatcaagcgctcggagaaggcgctctcgtataatgcccagcagatcaacgccgaggatatcgtggccgtgaaagacgtcaatttcgtcaattcgctcaacggcaaggtggccggtctgaacatcaacgcctcgtcgtcgggtgtcggcggttcgtcgaaggtcgtgatgcgcggttcgaaatctatcgagcagtcgtcgaacgccctgtatgtgatcgacggcattccgatgtgcaacttccgcagcgacggcagcgaggagttcgattcgcagggctcttcggaggccatcgccgacctcaatcctgaggatatcgagtcgatgaccgtcctgtcgggcgcagccgccgcggcactctatggttcggatgccgccaacggcgccatcctcatcacgaccaagcgcggcaaggccggtcagacgaccgtgacggtgacgagcaacaccgaagtcctcacgcctttcgtgatgccgatgttccagacccgttacggcacgggcgacaagctggcgggagcctccaacggcatctactcgtggggcgaacgtctgaatgcgttcaattacaggggctacgaccctgccgacgactatttccagacgggcgtcgtgggcaccgagacggtctcgttctcgacgggcaacgagcgcagccagacctacgcgtcggccggcgccgtcaattcgcgcggtatcattcccaacaacggttacgaccgttacaacttcactttccgcaacacctcgtcgttcctcaaggacaagatgcagctcgatctgggcgccagttacatcatccagaaagaccgcaacatggtcaatcagggcgtctattccaacccgctggtctcggcttacctcttcccgcgcggcgacgactgggcggatgtagagatgtacgaacgctacaactcctcgcgcggcatctacgaacagtactggccgacgatgggcgccgatacctatcagatgcagaacccctattggatcagctaccgcaacctgcgcgagacccgcaaggaccgctacatgatcaacgcctcgctgacctacgacatcctcgactggctctcggttgcgggccgcatccgggtggacaactcgaacagcgactataccgagaagctctacgcatcgaccaacaacctgcgcaccgaggggtcgcccaacggtctctacggcatcaccaagaccaacgaccgccagacctacggcgacgtgatggtcaatatcaacaagaccttcggcgagaactggagtctgcaggccaacgtcggcgcttcgatctcggacatgcgctccgacgcctcgaaagtccgcggcccgattgcctacggagagcagaccggttacgacaaggacggcaacgccatctacgagccgaataacattcccaacgtgttcaacgtctacaacctctccaattcgaagaccgtccgcgagcagatcggctggcgcgagcagtcgcagtcggtcttcttctcggccgaggtgggcttcaagggggcgtattacctgaccgtgacgggccgcaacgactggccttcgcagctggcgggtcccaactcggtgaactcctcgttcttctatccgtcggtcggcgcttcggtcgtgctctcggagatcatcccgaacatgcccaagaacctctcctacgtcaagctgcgtgcgtcgtacgcatcggtgggtttggctttctcgcgtttctacgccaatccgacccgctcgtggaactcttcgaccaacagctggaacctctcgtcccaaagtccgctctacgacctgaagcccgaacgcaccaaatcgttcgaagtcggtcttacgatgcgcttcctcagacatttcaatttcgatatttcgtactataacacccgtacggtcaaccagacgttcaacacgggtatccccgcaagctcgatgtacagcaaggtctacaagcaggacggcgacgtgcgcaaccgcggtttcgaaatgtcgctggggtacaggaacacgtggaaccgcttctcttgggacagcaacttcacggccagcgccaaccgcaacaagatcatgaagctgggcaaagaggtggtcgatcccaacacgggcaaggtcaccccgatcggcgacctgaacgtgggtggcatgggcaacgtccgcttcatcctgcgcgagggcggttcgctgggcgacatctattcgcgcgccgacctgcgccgcgactcgaacggcgatatctatcaggatatggacggcaacatcttcgtggacaacaagacgcagaccaaggatttcatcaagctgggttccgtattccccgacgccaatctggcttggcgcaacgacttccgctggcgcaacttcaatttcggattcctgctcacggcccgtctgggcggcgtggtcttctcgcgcacgcaggccgtgatggattactacggcgtttcggcctcgtcggccgacgcgcgcgatgcgggcggcatcgtcttcaacggcaacgacctgatcgatgcgcagaaatggtatcagaccgtcgccaacggcgataccactccgcagtactacacctattcggcaacgaacgtgcggctgcaggaggcttcgatcggttacacgattccgcgcaagaagctgggagacgtttgcgacatcaccgtctcgatcgtaggccgtaacttgtggatgctctacaacaaggcgcctttcgatcccgaagcggtcgctaccaccagcaactactatcagggcatcgactatttcatgatgccttcgctgcgcagcatcggcttcaacgtgcgtgtcaaattctaataagctaaaaacgccatgaaattcaatatatcgaatatgacggtggcccttgcggcggctgcgctcggcgcggcatcctgcacggccaactacgaagatatcaaccggaatccctacgaggtcaccgccgaggatatggagcgggacggctatgccatgcggtcgttcatgaccaccatgcagagctgggtcattccggccgacgtcaaccagtgccagttcaccgatctgctgctgggcggtccctacggcggctatatcgccgatgcgaacagcggattcaatgccggaaaattctcgacctacgacccgcagtcgaactggtcgccggtattctaccgggttgtctacaccaatgaaatgtcgaacttcacggagttgtgcaaggtgaccgaagacgagaacgccatcgccgtggcgaaggtggtgaaggtcgccggcgtacaccgcgtcgccgacacctacggcccgattccctatacgcaggtaggcacgggcgccgatccggtgccgctggactccgagaaagaggtcttcaaggccatgttcgccgatctggacgcagccgtcgaggtgcttacgcgcaaccgtgcaggcatgatcaccaccgatgccgaccggctttacggcggcagtctggagcgctggggccgtctggccaactcgctcaagctgcgtcttgcgatgcgtatcgtctatacggatttcaccaccgacgacggacgtactccgcagcagctggccgaggaggccgtcagctcggagctgggcgtgatcgaggacaactccggcaatgccatgtatacgggcttcggcaaggacggcaatcctttctacgtctgcttcttcagttataagtcgggtgcgggcgatcaccgcgtcgccgccgatatcgcgtcgttcatgaacggttacgccgatccccgttgtgcgagctatttcaacgagtcggctttcgccgcaggcggctatgccggtcttcgcaacggcattcagattcccgacgatgagcgaatcaacaacttctcgcgctataacgtgacggcgtcgacctcgctgatgtggatgaacgcttcggaggtggccttcctgcgcgccgagggcgctttgcgcggctgggcgatgggcggcgacgcgcggagcttctacgaggagggtatccggctctcgttcgagcgttgcggcgtcgcggatcagctgacggcctatatggcttcgacggcgcttccgggcagttatgacgacccggcattcggctacagctgttcgaaccagtcgacggtcacgattccttggaacgacggagctgctttcgaagagaacctcgaacgcatcatcacccagaagtggatcgccaacttcccgctgggtaccgaagcgtgggccgattaccgtcgtacgggctatccgcgtctgttcccggtggtggtcaacaacaatcccgacatcaccaatctgcagctgggcgcccgacgtatgacctatccgctggaggagtacgaggcgaacggcgaaacgatccgggccgccgtggatcagtggctgggcggtcaggacaaaatgtccacccgtctgtggtgggattgcaatccccggattcgctaacctataaaaccgtcaaactatgaaaatcaacatcaaaagatatttcctgccccttgcagccgtgcttttcatggccggctgccacgaggccgtcgagcctgaggcgatcgacgtgaactattcgtcattcgaggagacgaatcccgaattgtatgcccggtacatgcaggcgctccgggagtacaaggccggttcgcacaaggcggtgttcgttacgatgaccgttcccgaaaacggcgccgcgacgacccatcgcacgcagcatttcacggcgatacccgacagcgtcgacttcatcgtggtgaacccggttccggccgtgctctgccagacgcttgtcgatgaaatccggaaagtgcatgagaaggggacccgtgtcctcttcaatatcgacctgcagacattcgaaaacgactggacgcaggtgctgaaggcggaccccacgctcagcgaggaagatgcgctgacttatctcggcggccgtgtcggcgagcagatcgcgctggtagaccgctggggctatgacggcttcatcttcacctatacgggcaaggccgtaggcagcatgcaggacgaggcgctggccgtctatacggcccgtcaggaagcgctcttcgcgccgatccgcgcttggcacgaggctcatccctcgcatgcgctcgtcttccgcggcttcaccggagccgttacggaggcgaatatgccgctgctggacgagtgcgcctacatcatcctgccgaccaatgacgtgaagacgctcgacgagatgtcgttctcggctcttaccgcagtcagcgttgccggcgtgccggccgaccgtctgatcgtgacggcccagaccacccgtcccggcgacgacaagaaggagttcggttataccggcatggtcgatgccttcggcgatacggtcgaggcgatcgaggcttgggccggatgggtgacgctcccttcgccgggctatacccgtgcggggctgctgatcgaggatgtccagtacgactattacaaccccgccaaggtgtgggccaagacccgcgaggcgatcggcattatgaacccctccatctaaaaactgacagccatgaaatacaacaaatgcttattggttctctcggcgctcgccgcagtcgcttttaccggctgcaagaacgaggatgtcgagaagcatcgtttcgataacaagttctatatcacctcgaccattctgtccgacgacctgctgatcaagagcgacacgccgggatataccaagacgatcgagtcgcgtctggccaagcctgccgcgcagcaggtcgccgtgacgatcggggccgatccgtcgcaggtagccgcctacaacatgatctatggcgacaacgccgtggcgcttcccgccgaatgctacgaactctcttccaatcggatcgacattgcggccggtcaggtgagcggcgacgcgatagagatcgtgttcaaggacatcaatacgctcgacggcagcctgcgttacgtgctgcccgtgacggtcacttcgtgcaatggcgtggatctgctcgacagccgcagtacggtctacttcgtggcccgtcagggtgcgatgatcaacgtggtggccaacatcgcgtggatgaacttcccggtcagctggtcggccgacgccaaaccgctcgtcagcggcatgaagcaggtcaccatcgaggccctgctgcgcagcgccgactggaccgacggccgcggcgacgccctcagctcggtattcggtatcgaaggcaacttcctcgtgcgcatcggcgacgccgaccgtccgcgcgaccagctccagctggcgacgggatcggccaacggcggcaactggcccgcagccaatgccgctccggggcttccggtcaatgagtgggtgcatatcgccgtggtttgggatgccgtaaacggcgagcgtatctattaccagaacggcaagcaggtggcctactccaatcagaagatgagcggatcggttacgctgaccggcaactgttacgtcggcaagtcgtacaacgaggagcgttacatccccggagagatttccgagctgcgcgtttggagcgtggcccgtacgccggagcagatcgccggcaacatgtacggtgtcagccccgaaagcgaggggctggtggcctactggaaattcaacgagggttccggttcgacgatcatcgaccatgcgaacggcacgaatctctctgccgtgggcggcacgccgacttggattcccgtaactcttcctgaagtaaaataaccaataacagctattacgcatgaaaacgagatatttcaaatccggtattctcgccgcagccgcagccttgctctactccgctgcgttcgtctcctgcacggacgatgtcacggtcggcgagtgggacggcgccggctcgatcgaaacgggcctcaatgaaacgggcgccgtgctgcaggacctcaactccgggaagtcgaacaccaccgtcgaattgtggaaggagacctacaccgccgacctgcgtctgatgttgaccaaagcccccgccgaggggttcacggctagggccaagttcgatacctcctatgacgcggggcagtacaacaaggccaacggtacggattatacgctttatccggccgacaaggtgacttttgccaacgacggtctctttgccgccgcgggccgcaatgtcgaacttacggtcgaaatgaccgtcgaggccgccgaagggcttgcagccggccggggatatctgatccccgtagccctcgaagccgacggcgtgatcctcaaggagagccattgtttctacgtggtgaaggatatgacctcgatgcctacctgttacaagggcgacgacctgccgaagggcttcctgttcttcgaggtcaacgacgtcaatccgctcaacgccctgacgttcgaactcgaagacggccgcctgctgtgggatgtggtctgcctcttttcgggcaacatcaaccatcatgcggaccgcaacgctccgttcctgagcctcaatccgcagacccagtattggatggataacaacgaagccttcatccagccgctgcgcaagcgcggtatgaaggtgatcatgtgcgtgctgggcaaccacgaccagtcgggtgtggcgcaactttccgactacggatgccagatgttcgccaaggagctggccacgttctgcgaaacatacaatatcgacggcgtatgcttcgacgacgagtattcgaacgctcccgatctttcgaatccctactatgcttcgcgcagctcggcgcgggcggcccgtctggcctacgaatcgaagaaggcgatgcccgacaagcttgtggtcgcctactgctactcttcgttccatatcagcagctggccgaccgagatcgagggacaggacattgcggagtgggtcgatatcgccgtgggcgattacggtcagtccacctcgcccaagggcaacatgacccagaagcagtgctcggccatctcgatggagttcaaccgcggtacgggcggcaacttcaccagcggcgtcgccgagggaatgctcaatccgacgaccggcaagggctggttcatgggcttcgcgcccgacccgctgaagaataccaacggcagggtggataagaatgcttggcgcaatattttcgtcaaccggctgaacaaaggtcccgaaactctctacggatcgccgctcaaggaaccggagcacttctacaagttcgccgacaccacgcgctataattatcctgaggacctgccggacacctattcgcgtccggcgcagcctgagtggccgaactattgattcgattccgccttgcgggcggggtgcggccctgcctgcgaggcgatattaaccgaaaaacagtaaacgatgaaaaacatgtataaatatgcgctgcttttcgccctcgcgggcggcgtagcgctcttcaccggctgccgcgccgacgaggaggtcgatctggcgggctaccccgaaacgccggtcggcgcaacgatctccggtactacggaccgggtggcgactttcgcgggaacttatgataatgaaggcgtgctgaatctcgccggttcgctttcgggcgagtataccattgcccttgcgcaggccagccccgaagagacggtcgtccgcgtggagcttattatcaccaacgtaccggccgagctggttgaaatcagtgcgcgcgagctggtgattcccgccggcagcactacggcggcagtctcggtaaggatgatcgaggagaactacgacttcatggagaatgtgttcgggcctgtgacctacgagctgggcgtgcgtgtggtcgaagcgcgcggttcgcaggttcccgtggtggacggcgaggcgaagatggtgatcgaaaaggctgcctatgtcgctgtcgcgtcgctcgtgggcgtcgagggcaatgccgtgactttcaaacgcaacttcatcgacggtgcgatcgtcaacgaagatccgataacatatgacgtgaaggtcgtggtggaccgtcccgtgctggaggatacgaagttcgtcgtgaaatcggcgggcattcccgaaggatttgccgatgacgagcgctttacgcccgctgccgaggtgacgattccggccggggcgaaagagtcggacgcaacgacgtggtcggtgacggacgacttcctcgaagcggacgaagaactcggcactttcccggtacagctcacggccgagctggtcggcgataccgccggggccgccgtcgatccggaggatgccggcgttgcgatttcgatcgtgaagaagtccgatctcctgactttcctgtccgcggccgatccgtcgtggaagaagtatccgacgagcggatggaccgtgcaaaccaacggcagcgcatggccggatgccaataccgctctctgggacggaagctcgtctaccgatatttatacttggagcgatccctcgctcgaacttacgatcgacatgaagacctcgcagtgggtcgccggttttgatattcaggcttacggaagtatcggctacatgggcgagtacttcgagctttcgacgtcggaagacggggagaactggacgccgcacggagagctccggcaggccgaggctcccaacagaggctatggcgcaaccaactacgttcagctgctcaaaccctgcaacgcccgctatgtcaagtgggtcggcacgaagggcagcgcctatacgcccgacatcacggagttgtatatctacggccggaacgaataaccgctatccggtccgaatgttaacggaggctccccgcagaaatgcggggagctttttctcggtcttgacttttgtcggcggaggtccgtcgtccggcaatcaggtcggtttgacacttttgtagccaaaattcatcattttgtgcattttttcgtccgaaaggtagcttttcagcgggaaagagcgtatattcgctgcgctgaaattgttttgtcgataatgctggagagaattcaatatgcgctgttcgtgctgctcttcgtgctggcgggaagtctcgacggtgcgacgccgcagggaggcgcatgccgggtacagcccggaatgagtccgcaggccgcactccatgcacccgttacggcgcagaattatttcacggccgccgtaatgctttcgggcgacgcttcgatcgagattccggcccactcttcggagcataaggccatcgtgcggcatcgtttctatgcccgttcggctgcggcggaagccgtggcgcagcaaaactcggcgctctcggaccgcggcgcgctctattccaagccggtcgattactacatcttttctctggggcggattctgatttagccccggctgtccctttttgccagccgcatggtttccggccgcgacgtcccgtccgccgggggcatgcccgtttttcgtgttccggaatataaattcgtaaaataacaggttatgtatttcacgctattggtggtcgtcatcctgacggccattgcgctggtcgcagtcgcgctgggtatcgcccgcgccgtgtcgccgcgttcgtacaacccccagaagggcgaagcgtatgagtgcggcatcccgacacggggccggtcgtggatgcagttcaaggtgggttactacctctttgcgatcctgttcctgatgttcgacgtcgagacggtgttcctcttttcgtgggccgtcgtcgtgcaggagctgggcgtatacggactggtgagcatcctcttctttttggtcgtcctgattttgggccttgcgtacgcatggcggaaaggagctttggaatggaaataaagagagaaccgaagatcaagtcgatgaaatacgaagatttcaacgacaacgaatacctcgaaaagatggtcgccgaactgcgcgacaacaatacgaacgtgatcgtgggctgtctggacgagctgatcgaatggggccgcagcaacagcctgtggccgctgaccttcgccacgagctgctgcggcatcgagttcatggccgtgggcgcggcgcgttacgatttcgcccggttcgggttcgaagtggcccgcgcctcgccgcgtcaggccgacttcatcatggtcgccggcaccatcacccacaaaatggccccggtgctcaagcgcctttacgaccagatggccgatccgaagtatgtgatcgccgtgggcggctgcgccatcagcggcggacccttcaagaagtcgtaccacgtgctgaacggcgtggacaggattctgcccgtcgatgtctatatacccggctgtccgccgcggcccgaagcgatgctttacggcctgatgcagctgcagcgcaaagtgaagctgcagcgtttcttcggcggggtgaacaagcagatcggctgcgaagagtatgaagagctgctgcgccgcgacctgacctcggagcggaacgatttgaatgtggaaggaggagaaaagcaatgagtatgacgctgaaagacaagataacggcatgggaacctcaggccgtatggtccgaggcgggcgacggcatgtggaccgtgcccgcggagaagtttcacgatctggccgcccggctcagggccgagggattcgatttcctgcgcagtctgacgggcatggactggggcgaagagggcttcggagccgtctatcacctcgaagccaccgccacgggcgaaaacgtcgtcctgcggacgctgacgccgagccgcgagaaatgcggcctgccctcggtctgcgatttgtggaaggccgccgagctgaacgaacgcgaggtgttcgactatttcggcatcgggtttctgaaccatcccgacatgcggcggctgttcctgcgcgacgactgggtggggtatcctctgcgcaaagattacgatccggcgctcaatccgctgcgcatgaccaacgaggtgtcgaaggacagcgctccgagtttcgagctgacctccgacggcagtttcatccgcaagcgcaacgtgctcttcgaagaggacgaatacgtcatcaacgtcggtccccagcaccctgcgacgcacggtgtgctgcgcttccgggtgtcgctggagggcgagatcatcaagaagctcgacgtgcactgcggttatatccaccgcggcatcgagaagctgtgcgaggggctgacctatccccagacgctggcccttacggaccggctggattatctgggggccgcgcagaaccgccatgcgctctgtatgtgcatcgagaaggggctgggcgtcgaggtgtcggagcgggtgcagtatatccgcacgatcatggacgagctgcagcgcattgattcgcacctgctgttcttcgcgtgtctctgtatggacatgggggctttgacggcgttcttctacgggttccgcgaccgtgagaaggtgcttgacattctggagcagaccacgggaggccgcctgatacagacctacaacaccatcggcggcgtgcaggccgacatccatcccgaattcgtgcgcaaggtcaaggagttcatcgcctatatgcgtccgctgctgcgcgaataccacgaaatattcacgggcaacgtcatcgcgcaggaacgtctgaagggaacgggcgtgctgacccgtgaggatgcgatctcgttcggcgccacgggcggcacgggacgcgccgccggctgggcctgcgacgtgcgcaagcggcatccctacgccatgtacggcaaggtcgatttcgaggaggtgctcttcaccgagggcgactgcttcgcccgctacatggtccgcatgcgcgagatcgagcagagcatgaacatcgtcgaacagctgatcgacaatattcccgaaggggaataccagctgaagatgaagccggtgatccgcattcccgaaggcagctactacgccgccgtcgaggggagccgcggcgaattcggcgtgtttatcgagagccggggcgacaagtcgccttaccgcatgaagttccgttcgacgggactgccgctggtgtcgtgtctcgaaaccatagcgaaggggacgaagatcgccgacctgatcgccataggcggtacgctcgattacgtcgtacccgatatagaccggtaagaggttgaaagtttcgtcggttggcggcggctcttcctgatgttttttccgccgcaggcggataagtcccctccgaggaggggatttaggggagggtcagacttgtaaacacggccagagaccgtgaattgcagccggggagagcggaaaacggattgaaaaaggaaaaacttacagatatgtttgattttagtatagtaacgagctggattcacgggctgctcacgtcgctgatgcccctcggactggcggtctttctggagtgcgtgatcgtcggcgtctgcctgctgctgatgtatacggtgatcgccatcctgatgatcttcatggagcgcaaggtctgcgcggctttccagtgccgtctgggaccggtgcgcgtggggccgtggggcacgctgcaggtcatctgcgacgtattcaaaatgctcaccaaggagatcatcaccatccgccgttcggacaagttcctctacaacctcgcgccctacatcgtcattctggcgtcggtgctggcgttcgcctgcctgcccgtgaacaaggggctggaggtgctggacttcaacgtgggcgtcttcttcatgatggccgcgtcgtcgatcggcgtggtcggcatcctgctggcggggtggagttccaacaacaagtattcgctcatcggcgccatgcggagcggcgcgcagatgatttcgtacgagctttcgatcggcctttcgatcctgacgatcatcgtgctgaccgacaccatgcagttctccgagatcgtggcccggcaggccgacggctggttcatcttcaaggggcatattccggcgctgatcgccttcgtgatctacctgatcgcgggcaacgccgaggtgaaccgcggcccgttcgatctgccggaagccgagtcggagctgacggcggggtatcacaccgagtattcgggcatgcacttcggactcttctacgtcgccgagttcgtcaatctgtttatcgtcgcgggcgtggccgccacgatcttcctcggaggctggatgccgctgcatatctccggctgggagggcttcaacgccgcgatggactacattccgggctttgtctggttcttcggcaaggcgttcttcgtggtgtggctgctgatgtggatcaagtggacattcccgcgcctgcgtatcgaccagatactgacgctcgaatggaagtatctggtgccgatcggactggccaacctgctgctgatggtcgttgtcgttgtatttaaactgcatttttagccatgaaaagctatatcaaaggattctttcacggactgggttccctgctgacgggactcaaggtgacgggccgcgaatttttcacgcccaaggtcaccgagcagtatccggagaaccgcgccacgctcaggatgttcgatcgcttctgcggcgaactgaccatgccgcacgacgccgaggggcggaacaagtgtatcgcctgcggcctgtgtcagtcggcgtgtcccaacggcaccatccgcatcacgaccgaaatggtcgccgatcccgaaacgggcaagagccgcaagcggctggtgctctacgagtacgatctgggggcgtgcatgttctgccgtctgtgcgtcaatgcctgcccgaccggggcgatccgtttctcgaccgacttcgaacatgcggtctacacgcgcgaaaagctggtcaaaaccctgaataaacgataagccatggagataacactcgaattaatcgtctttacggtgctggcggtcttcacggccgtgagcgctctgctggccgtgacgaccaagcgcatcctgcgcgcggcgacctacctgctgttcgtgctgttcggtacggcgggcatctatttccagctcaactattcgtttctcggcgcggtgcagctgctgatctatgccggcggcatcacggtgctgtacgtcttttcgatccttttgacgtcgagtcagggcgacaagtcggaggacctgaagggatataaactcttcgtggggctggccgcgacgctgctgagtctcggcgtctgcctttatgtgacgctcggacacgatttcaggccctcgcatttcgtccacggcgaactgcacgtgcagaccatcggccatgcgctgatgagcagcggcaagtacggctacgtgctgccgttcgaggtcatcagcatcctgctgctggcctgcatcgtcggcggaatcctcatcgcacgcaaacgctaaaaaagtacggctatgatacacatggaatattacctcgtcctctccacgatcatgatgttcgtgggaatttacggattcgtcacgcgccgcaacctgctggcgatgctgatctccgtcgagctgatcctcaattcggtcgatatcaactttgtcgtcttcaaccggttcctctttccggaacagctggaagggttcttctttacgctgttcgccatcgggatcagcgccgcggagacggccgtcgccatcgccatcatcatcaatatttaccgcaacatccgcaatatcgaggtcaagagcctgcgggagatgaagtggtagccgaaaacgaaaaacgactcttatggaatatacgattctgattctgctgctgcccctgctgagcttcctcttcttaggcttggccggcatgaagctcaagcccgcagcggcgggcctcgtcggcacggcggtgctgggggtggtgacgctgctgagctgctgcacggcgttcgaatacttcacggccggacgcgatgccgccggggcgttcccgacgctgattccgtggaatacggtctggctgccgatcagccgtacgctgcatatcgacatgggcatcctgctggacccgatttcggtgatgatgctcgtggtgatctcgaccgtctcgctgatggtgcatgtctactcgctgggctacatgaagggcgaacggggtttccagcgttactacgccttcctgtcgctgtttacgatgagcatgatggggcttgtggtggcgaccaatattttccagatgtacctgttctgggagctggtgggcgtcagctcttatttgctgatcggcttctactatacaaagaaggaggccgtcgccgcgtcgaagaaggcctttatcgtgacgcgcttcgccgatttgggattcctcgtcggaatcctcttctacggctattacgccgggacgttctcctttacgccggaggtgcggctgctggccgccgccgggacgatgatcccgctggcgctggggctgatgttcatcggcggcgcgggcaagagcgccatgttcccgctccacatctggctgcccgacgccatggaaggcccgacgcccgtgtcggcgctgatccacgccgcgacgatggtcgtggcgggcgtctacctcgtggcgcgcatgttcccgctctttatcggctatgcgcccgatgtgctccattggacggcctacatcggtgcctttacggcgttgtacgccgctgtcgtggcctgcgtgcagagcgatatcaagcgcgtgctggcgttcagcaccatttcgcagatcggttttatgatcgtggcgctgggcgtctgcacctcggccgatccgcatgcgggcgggctgggttacatggcttcgatgttccacctcttcacccacgccatgttcaaggccctgctgttcctcggcgccggatgtatcatccacgccgtccactccaacgaaatgtcggccatgggcggcctgcgcaggtatatgcccgtgacgcacgccacgttcctcgtcgcctgcctcgccattgccggcatctggcccctgagcggtttcttctcgaaggacgagatactgacggcctgcttcgcgttcagtcccgcgatggggtggctgatgaccgccgtcgccggactgacggcgttctacatgttccgcctgtactacaatatcttctgggggcgcgagaaccgggagctgcatgccgcgcacaggccgcatgaggctccgctgacgatgaccctgccgctggtgtttctggcggcggtgacgctcgtcgggggcgcgatcccgttcggaaagttcgtcagcagcgacggcatgccctacaccattcatatcgactggcgtgtggcgggcgtgagcctttgcgtggccgccgcgggcattgcgctggccacgtggatgtacctgcgcgagcggcagcccgttgccgaccggctggccctgcggttccgcggcctgcacagggcggcctataaccggttctatatcgacgacgtttatcagttcgtcacccacaaggtgatcttccgctttgtttcgaccccgatcgcgtggttcgaccgccacgtcgtggacggctttatgaatctgctggcaagggcggccggcggcgcggcgtacgcgatccgcgacatgcagagcggcagcgtgcagcgttactgcatctggtttctcggcggggcgctgggctttacgatcatcctgctgttaatccgttaatttgaagttgttatgaatatgttatccttgtttcccgccattccgctgctgatgatgctgggactttggctgtcgaaatcgacgcggcagatccgtgccgtgatggtggcggggtcttcgctgctgctgttgctggcggcggcgctggtggtgcgctacctcggcctgcgcgaagcgggcgagacggccgccatgctctttaccgcgagccatgtgtggtacgctccgctcgatatccactatgcggtgggcgtggacggcatctcggtcgccatgctgctgctgtcggccgtcatcgtatttacgggtacgttcgcttcgtggcggatgcaaacgcagatcaaggagtacttcctctggttctgcctgctgagcgtcggcgttttcggattctttatctcggtggacctcttcacgatgttcatgttctacgaggtggcgctgatcccgatgtacctgctgataggtgtctggggcagcggccgcaaggagtacgccgccatgaagctgacgctgatgctcatgggcggttcggcgctgctgctgatcggcattctgggcatctatttcggcgccggggcgacgacgatgaatattctggaaatcgcgcagctgcacagcattccgctcgcgcagcagtatgtctggtttccgctggtcttcgtcgggttcggcgtgctgggcgcgctgttcccgttccatacatggagtcccgacggccatgcctcggctccgacggcggtgtcgatgctccatgccggggtgctgatgaagctgggcggttacggctgtttccgcgtggcgatgtacctgatgcctgaggcggcgcacgaactgagctggatattcatcgtcctgacgacaatctcggtcgtctacggggctttggcggcctgcgtgcagaccgacctcaaatacatcaacgcctattcgtcggtgtcgcactgcgggctggtgctcttcgccattctgatgatgaacaccacggccggaacgggagcgattctgcagatgctgagccacggcctgatgacggccctcttcttcgctctgatcggcatgatttacggccgtacgcatacgcgcgacatccgtgagctgagcggcctgatgaaggtcatgcccttccttgcggtggggtacgtcatcgcgggtcttgcgaacctcggactgccggggctgagcggcttcgtggccgaaatgaccatcttcaacggcgcgttcatgaacgatgacacgttccaccgcgtcgtgacgatcatcgcctgcacgagcatcgtgattacggcggtttacatcctgcgggtggtggggaaaattatttacggcacctgcaccgacgaacaccacctcaagctgacggacgccacgtgggacgagcggctgtcggtcgtctgtctcgtcgccgccatcaccggcatgggtctcgcgccgctgtgggtgagcgacatgatccgggggagcgtgacgggcatcattgcacaattaatgagttaagcgattatggattacagcaacatatttacctctatgcaggccgaagtgacgctcatcgcggtgatcgtcctgctgtttctctatgacctgatcgcgggggagcggggacgccgccggttttcggccgtcgcctgcggactgctcgcgctgcaggtcgcggtcaatgtcgttccggggactccgggcgaagtgttcgggggcatgttccagtacgtgccgatgcactccgtcgtcaagagcgtgctgaccgtcgggacgctgatcgtcttcctgcaggccgatgcgtggctgcgccgcggggatacggcccacaagcagggcgagttctacatcctgaccctctcgacgctgctgggcatgtatctgatggtcggcgcgggcaacttcctgcttttctttatcggcatggagctggcttcggtgccgatggcctgtctggtggcgttcgacaagtacaagcgttattcggccgaggcgggtgcgaagtacatcctctgcgccctctttgccagcgggctgatgctctatggaatctcgttcttctacgggacgaccgggacgctctatttcggcgacatggcggcgcgcattacgggttcgccgctgcagatcatggccatggtcttcttcttcgcggggctggggttcaagatttcgctggtcccgttccacctctggacagccgacacctatcagggcgcgccgacgacggtgacctcctacctgtcggtggtgtcgaaaggctcggcggcgttcgtgctgatgaccgtgctgatgaaggtcttcgggccgatgatcgggcagtggcagacgctgctctatgccgtgacggtgctgtcgatcacggtggcgaacctcttcgccatccggcagaaggacctgaaacgcttcctcgccttctcgtccatctcgcaggccggttacatcatgctggccgtgatcggcgggagcgccttcggcatgacttcgctggtcttctacgtgctggtttacatggccgcgaacctcgcggttttcggtgtcgtttcgacggtcgagcagcatagcggcggcaaggtcgggatcgaagattacaacggactgtaccgcaccaatcccaagctggcgctgatgatgaccctcgcgctcttctcgctggcggggattccgccctttgccgggttcttctcgaagttcttcgtcttcgccgcggcgttcaaaggcggcttccacctgctggtgttcatcgcgctgatcaatacggtcgtctcgctctattactacctgctggtggtcaaggcgatgtatatcactccgaacgatgcgcccgtcgcgccgttccgcagcgaccgctatacccgcatcagtcttgcgctctgcatggcgggcgtcctgctgctgggagtcgtcagcgccgtatacgacggcataaacgctttcgcgttcgggctttgacggggtgaatagaaaaagagggcggcatcttctgcggatgccgccctcttttcgtgcggatgagtttttgccagcgcaatgccggcgggcctgccgccgtttcagttgtccggccgaggccgtcttgtgtgcttcttgaggccggtcgcctgccgttgtccggggccgtcgcgccgtcagtcttcgtgggctttttcgagattcagcaggtgggttttcacgcccagacctccggcatagccgaccagtgcgcccgtgctgccgaccacgcggtggcaggggacgacgatggcgatcgggttgcggttgttggccatgcctaccgcgcggcaggccgtcgggcggccgatctgcgccgcgatctggccgtaggtgcgggtctcgccgtaagggatcgtcctcagggcctcccacacggcctgctggaacggagtgccggcgggcgccagcgggagggtgaactcgcggcgcgttccggcgaagtattcggccagctcggctgccgcctgcaggagcagggggccggccgtctccggcgtgcacgcctccggggcgttgcgcggtctgcgccggttgcggtattcgcggccgaagaagatgcgggtgacggcttcgtccgaagccgtgatgccgagttttccgacgggtgtttcgatgaagagcatccgttccatatcgtctcgttttaaaggttgtccagcgtgtaacggatcattttctgccgcacgttcgccgtatcgtggggctgcatcgagtggttctggtcggggtagaccatcatgtcgtactgcttgccgcagcggttcagggcgcgggtcatctcgacggtgttctggaagtggacgttgtcgtcggccgtgccgtggatgatcagcagccgggtcttggtgtcgtcgagcatccgggcgaagttgatcggcgagttgtcgtcgtaacccgaagcgttgtactgcggcaggttgttgtagatttcggtgtagatcgaatcgtagtagcgccacgaagtgacgggcgccacggcgattgccattttgaacagtccgtgccctttgagcgcgcagctcagggccatgaatccgccgtacgaccagccgtagatgccgatgcgcgtcgggtcggtataaggctgcgccgccatgtagcgggccagcgagagctgatcctcgacttcgagcgcgcccagccgtccgtaggtctgtttcttgaatttctcgccccggaaacccgtgccgcgtccgtcggcgcagaccacgatatagcccttgtcggccagtgcgtcctcccagtcgagcgaccagcggtcgcgcaccgactgcgagccgggacccgaatactgcgtcagcaggacggggtagcggtgcgaagggtcgaagccgcggggtttgacgatgtaggcgttgagcgtgtcgccgcgctcggtggcgaaggtgaagaactccttctgcgggcggttcgcggcggccagctcatcgcgcagggccttgctgtcggccagcaggcggaccgggttgccctcgccgtcgcagatctcgacccggttgggggtcgcggcgttggagaaggtcgagatgtagtatttcatgccggcgctcggcgcgatcgtgtagaagccttcgcccgtggtcaggcggcgtttctgcgtgccgtcgagccgtacgctgtagaggttgcggcgcaggggggaggtctcggtcgagaggtaccatacgcgcttgccgtcggtacccgtgacgtcggtcacctcccagtcgcccttggtcacctgcgcgagaaaaccccggcggatgctgtagaggtagaggtgcatgtatcccgtatgactctcctgtcgtacgaggaagcggtctttgtccacgaacgtcagcgaggagtcgtccacgcgctcgacgtactgctgcgaacgctcgtcgtagattgtgcgctgggcgccgttaggctcgcagaggatcacctcgaaggtgttctggcggcggttgagccggaagaagtagagccgcccgtcgggggtccagccgatgcgggggatgtactggtcggtttcgcggcccgtgtcgatgcgctctttggcgccggtcgcgaggtcgcagacccacacttcgaccgtcgaattgcgttcgccggccttggggtatttgaacgagtaggcctgattgtagagtttgccgtcgaagcgcatcatctccatcagcggcacctgagattcgtcgaagcgcaggtaggcgatgcggcggctgtcgggcgaaaaggcataggctttcgtgaagccgaactcctcctcgtaaacccagtcggtcgtgccgttgatgaccgaattccacgcaccgtcgtcggtgatgcggcgcgtctgccgggcggcggtgtcgtaaacgtaaaggtcgttgcggtccgaataggcgatcagtctgctgtcgggcgagaacgaagcgtcgcgcggggcttcggcctcccggagtacgggcgtcaggctgttgcccgcggccagaaaatagctggtcgtataggagtggcggtagatcggcttggcgcccgaagcgatcagtatctgccgttcgtcgggcgaaaaggagtagtcggtgatcgtcagattggccgcggacgaagggagcatccgctcgcccggtcccgccgcggcgtagctgtggcggatgatgttgctgccttcgagcgtggtgtagtgctcgccgtcggccatcgagcggatgccgcggatggtctggttcatgccccgcagtcgagcgatttcggcgtattcgttctgggcctgtgcggtgcccgctccgagcagtgcggccgcaaggagtataattatcggtgctttcaatgtaaattccgttttaaatgtcctccacctcgaaatcgtagccgagccgcttgcccgtgacgaatttcgagttgtccatcttggtgttgaactgatcgaccgtcacgcgcttgttgtcctcgtaaggcggcatcagcaggtcgaagttcagggcgaaccagatcgcctcttcgaggatggcgatgagcgcgtcacggccgatctcgcttttgccgaactccgcggcccgcatcgaggtctgctgtttgccctcgacgaagtagcggcgttcgcggttgatgaagatgcggccgatgaggtagccttcgtcggcgttgcggttgaacttgaacgagtcggagaggaagttgtagatgttgatcaggccgcagtaggagttttcgcggtcgccctgcacatagggattctgccagatcgggtggtcggcggcgaattcgaagatgtcggtgtgcatctggaatatcaggatgtcgttggccacctgcagctgggcttcgaacttgccgcggtcgcggtattcgagccgcacgcggcggtcgagtttgccgtccagctcgtcgtccagctccgaggccatttcgagcagcgtctccttcagctcgttgaaggccgagaaggtgttgtcgaaaatccgttgcttgagcgtcgatttgcggatgatcgtatcgaggatcttgcttcttagcggtgtggtttccatacggtatcgtgtgttttattttatacgtatctggcggccctgttcgagcgtgtcgcccggcttgagcttgttgagcttctcgatcgagcgggtgcggatggcgtacgactgccccacggcgtaggccgtttcgccctgacggcaggtgtgggtgtgggcgttgccctcccagcgtttcttcttgcgttcgatgtagaccacctcgtgggtcatcggctgggccttcttgtccttcaggtcgttgaacttgcgcagattgcgtgccgaaatgcggaatttcttcccgatgttctcgaacgtgtcgccctccttggccagcacgtagtgcacgccgttggtcgcatagacgttgtagccgttgtgggcgttgatcgtcacgcggtagttgtccggatcgatggccgacgatgcgtcggccgggcgctccatgctggtctggtcggtgaaccagccttcgggatcggtgatcttgcggcccgaacgcgaagcgtagagccgctcgccgtcgggctggtccagcaggaagagctgggcctcctcgatgatgcggcagagccgctgcgcatagtcgggcgccgtggcgtagccggcggccttcagtccccgcgcccagcttttgtagtcggtcggggagtaggcgaacagcgagtcgtagcggggctgcgtgtcgaggaattcggcatggtcttggtacgaggcttcgaccgtgggatagctgcggaagcactcgcctttggcgtcgtcgtcgtggtagactttttcgcccgtccagttgcgtttgcacttgatgccgaagtggttgttggacattatcgagagacggctgttgccgcagtcggattcgaggatgccctgcgccatggtgatgctggccgggatgccgtaacgctccatgtgggccacggcgatggatttgtaacggtcgatatactcttcgcgggtctggcggacctgcgcccgcaggcttccgaatgccgtcaggaggattccagcgagcagtattgcatttttggaaaaattcattatctttgtttaatcttatacggacaaaggtataattttcccacgaaaattacaattaaaatatatcgctgaactatgtttaccgaaaacgcaaaccgcattttcaaccgggttatcgaagagtatcaccgctgggacgatgtggaccgtcccgtcgagaatccctatgagccgggaacgatcgatcacctgctctatcacaagaactggatcgacaccgtgcagtggcatcttgaggatatcatccgcgatccgcagatcgaccccgtggccgcgctggccatcaaacggcgcatcgacaagtccaatcaggagcgtacggacatggtggagtacgtcgattcgtacctgctcgacaaatacagggagatagaaccactgcccggcgctcggctcaataccgagaccccggcgtgggccatcgaccggctgtcgattctggcgctcaagatttaccacatggcctgcgagacggagcgtaccgatgtggacgacgcccaccgcgcagcgtgccggaagaagctcgacgtgctgctggcgcagcaggcggatctttcgaaagcgatcgaagagctgatcgaggacatcgaggcgggccgcaagtacatgaagacctacaaacagatgaaaatgtataatgatccggcgttgaacccggttctttatggtcagaaaaagtaagaagcttccgcgtcatctgatcgtgtaccggacctcggcgatgggggacgtggcgatgctcgcgcatgcgctgcgggccttgaagcgggcatatcccgatctgcaggtcacggttgccacgcgaccgctgttccgggcctttttcacggacctcgacgtcggttttctggacgtcgatgtcaagggcgcccaccattcgctgtgcggcatatggcggctggccgcccaagcgcggcggctgggggcggatgccgtggccgacgtgcacggcgtgctgcgttcggtgacgttccgcacggctttgcggctgcacggcattcccttcgcggccatcgggaagggccgggacgagaagggcgaatttatccggcgcggcggccggggtgtcaaacctgcgaaacatacagtcgtccgctattgcgacgtattccggaagctgggattcgtgttcgacgatccgaagccggccgtgcggcgcgagcatcccagtccgatgggtgaaaagacggggacgtggatcggtttcgcccctttctcggcgcagcagggcaagacctatcccgaaccgctggcccgcgagacggtgcgcctgcttgccggacgttacgatcgggttttcatccatagcggcgggggtgccgaggcggagttcgcacaggagatggagcgccttcatcctaatgtcacggcgctgttcggacgggttaagatggcgggcgagatcgacctgatcgccaatctggactgcgtggtgtcaatggattcgctggtcatgcatttggcttcgctcgtggcgacgcccgtggtgtcggtatggggtgcgacgcatcccggtctgggattcttcgggtacggctgcgatccgcgcggcatcgtgcaggccgatatggagtgccgcccgtgctcggtcttcggaaataaaccgtgccgttacggagattaccgttgtctgcatgccgtgacgcccgccatgatcgtggagcgggttgaggagatcgtcggcaaatgacaataggactgaatatgaaaagccccggaaattccggggcttttttcgtatccgggcgtgtgccgcggcggagccggcgggctttgtcgcgggacccgttttttatcggctgtttggaccggctgtttttccggcttttgagaccggctgtttggaccggttcgggtctttttaccggctttgtccggtttgtgtttccggcgctgcgtttcccgccggaggggcggtgcctttccggctttatattcccggtattgtgtttccggccgataataatcggcgctttcccggctttttgttccccggcgctgcgtttcccgccggaggggcggtggtttcccggcgctatttgttgcggcggatcacgatgcagttgggaacgccgcgctcgccttcgtggtcgaaacgtttgttgtcgcaggggtggttgaggacgccttcctgagccgtccaaagcgtcgaggaaccgccgccgtcgaggttcagtgcatcgacgagccccagctgacgggcgatgtaggccgtttcggcgatggtcgtgccgtcggcctgccccttgaagcggccgtcgatgacggccatgacgaccgtgccgtcggcccgtttgccgatcagcgtgcgggggtggcggcgggcgtagaagctgtcttcggagtcgtattcgacgctccggccgtcgcggaccagcaccggacctgcggccagcgccgagcggtaacggcgggcgatgcgggagtattgggtcgtgtcgcagcggagaatgtccattttgcggccgcgtttgtcgcgcaaagcgatgacgccgttggtgcgcatcgtctcaccgggagtcgtccggcccagaatctgcttgtcgatcagtacgaaggttacgggggcgagcgtcttcatgttgaagtagctgccgttcagggcggcgtcggctccggcggctttgcccagctcgctcgtggcgcatgctttgccgtcgagctgtatgatctccgtcgtgaaattacgggcggggtaggcgaccaccgagacggtctgccgcgaatcgaacatgtcgatctgggcgcggcggcattcggcgcccgccgcgaggggcgtgatctgccagcgggcgccggcgaaagcgaccgagtcttcgggtgtctgggctgcggccgtaaaagaaaagaggagcaggaaggctcccgcaaggaatttaatcatggctaggtagaattgacggatacaaatttaagaatttaaatcggttcgccaaattgcggccgccgtcgggacgcgtgaaaaatccccggccttttcgggaccggggatgcgtttcggtgcggcaagcggcgcttgctatttggtcgctttggtgtaaacagccttgttgccctcgatggtcagcgtgtatacgccgtcggcgtccttggcgatgatacccgtctcggtgaagtcgatggtctggccgttgccgacgctttggcctttgagcaggattttgccggcttcgccctgcagctcccacgaggtgtagcgcagcgtggccatgttgatcgaccgggcctgaccttcgatcaggatctcgatgcccattacgccttcggggtcgatggggtcgggcatggtccacttgccgacggcttcggcataggtcgggtcggtggcgactttagcggctgcggcgccgtcctccagcttgcccttatagtccacgacgaccggggcgccgagcagcaggccgttggcttcgctcttgtctgcgtccatagtcgagaaggtgaaggtcccttcggcgttctcgacggttacggtgttcatcgatgcgtcggtgatgaagccggtaaaggttttgggcgtgttgtcgccgcaggctgtcatgccgcacaaagcgatggcggcagccatgatcttgatgcttttcattgcttgtgagatatttataggtttaacgctttctgatgtattcgtcgatggctcgtgccgccgtgcggcctgcgcccatggcgaggatgacggtcgcggcgccggttacggcgtcgccgcccgcgaagaccccttcgcgcgacgtggcgccctgcccgtcggccgtgatgcagccgcggcggtcggtctccagtcctgcggtcgtggcggccagcaggggattgggcgaggtgcccagtgccatgatgaccatgtcgcaggcgatgtcgaactccgagccgggcttcactacgggcgagcggcggccgctctggtcgggttcgcccagctccatctccacgcaccggatgccggtgacccagccgcgctcgtcgccgaggacctccgcggggttggtgagcatgcggaagcagatgccctcctgcttggcgtgatggacctcctcgacacgtgccggaagctccttttcgctgcggcggtagacgatcgtcgcctcggcgcccagccgtttggccgtgcgcacggcgtccatcgccacgttgcctccgccgaccacgaccacacgcttgccgacgtagatcggggtgtcgtacgtgtcgtcgtaggcgcgcatcaggttggcgcgcgtcaggaattcgttggccgaaaccacgccgttgaggttctcgcccggaatgcccatgaagcggggaagtcccgcgccggagccgatgaatacggcgtcgtacccctcctcgccgagcagcgaatcgacggtgacggtgcggcccacgatgacatcggtttcgatctccacgccgagccgctcgacttcggcgatctcgcgcgccacgatgcgctgtttgggcagacggaattcgggaatgccgtagaccagtacgcctcccaccttgtgcagggcttcgaatatcttgactccgtaacccattttcgcaaggtcgctggcgcaggccagtcctgccgggccgctgccgatgacggcgactctgcggccgttgcgcggtgcggtgcgggacgccgcggcgccgtgttcgagtttccagtcgcctacgaaacgttcgagtttgccgatggcgaccggttcgctcttgatgcccagaatgcaggagccttcgcactgcgattcctgcgggcagacgcggccgcagatcgaaggcagcgaactgtcttcggcgatgatgtcggccgcttgctgcagctcgccccggtgcaaggctccgataaagtccgggatgcggatattgaccggacaggccgctacgcagcggggatttttgcattgcaggcagcgcgacgcttcgagcgccgcctcttcgaggtcgtagccgtagcagacctcctcgaagttggtcgcacgtactttcgggtcttgttcgcgcacggggacgcgcggtatcttgtttgccattgtagtcgtatgcttttgggggtgtaggcggagcggcgtgccggctccgccgtgcgtttatttgtccagtcctattttacattggtgtccggcttggcgctcggcttcgatggccgcggcgcgctgttcctgcgtgcggtacatgccctgacggcgcatcgcttcgtcgaaatcgacttcgtggccgtcgaattcggggccttcgacgcacgtgaagcgcgtcctgcctgccaccgtcacgcggcaggcgccgcacatgcccgttccgtcgaccatcagcgcattgagcgagacggtcgttttcagcgcgtatttcttcgtcgtgagggccacgaacttcatcatgatcatcggaccgatggccacgcattcgtcgtaatgtcggccctgctttccgatcagttcgtcgatcacctgcgtaacaagccctttgaagccttcggaaccgtcgtcggtggcgatatggaggttttcggccacggcgcgcatcgcgtcggtgtaaatgagcatgtcgcgggtcttggcgccgatgatcacgtcggccttgacgccgtgttccttgagccatttgacctgaggatagaccggggcggtgcctacgccgcctgcgacgaagaggtaatgccgcttgcggagttcgtcgagcggcatttcgacgaattcggaggggtggccgagcgggcctgcgaagtcggcgaacgcttcgcccgcttcgagcgaacagattttgcgcgtcgaagcgccgatggcctgcgttacgatggtgacgctgccctcttcggcgtcgaagtcggagatcgtgagcggaatgcgttcgccgtgttcgtcggcgcggacgatgatgaactgtcccggccgggccgagcgtgcgacgcgcggcgcgaggaccttcatcagccagatgccctctgcgaggagtcttttttcaagtatcgggtacatttataaatgggtttccggcttttatccgcctgcgcggtaaagccgcattgtcgtatctttagtcttcgacgatcgccgtcgcccgcagccgccgcatcgggcgcgtgggatcgttggttatgatcgtcacgaaatcggtcaccacgccgtactcctgcctgccggggtcgagcgtcgccttggccgtgaacgaactgccggccgggatgcgctgtcccggcatgagcgtcgtcgcgaccttgccgcccgtctccacggcgcggacgatcaactcgccgtcgcccgtgttggtgagcgtgaaggtgcgctgctgttggggcgcgttgtgttttaccgggccaaatttaataatattttcggttatctgcactttcggcgtccgtcgggtgtcggccggggacttgtcgatgccgataccgtgggctacgatcagcgttccgttgccgcggccgtcggcccgcacctccagcgcgtcgcgcagcgaaccgtagcggggcgcgccctccgggttgaggtacatgaggttgatttcggcggtctggccgggggcgagttcgcgcggatagtcggcggcgagcaggccgctcgactccttgggatgcagttccagacggaccgggcggttcgacgtgttgatgcagccgatggcagactggacctgctgtccctcgcggatataggagaaggtgcagagcgtcgaagcgagccgcagaccgccgcccgcatcgaccggatatagctcttcggtggttttggtgcgcggggtgacggagccgcgcacggtgagcgttgcgatcttgcgccgctcggaggagtagacgcccagctctttggtgaaggcgccgggacggttggtcgggtcgaacgttactttgattgtcgttttctcgcccggacggatcggccgtttggtgaattcgggtaccgtgcagccgcaggtggtcaccacgtcgaggatcacgacgggtttgtcggagcggttctcgcccgtgaacgtgtggcttacgcggccgtcggtttcggaaatcgtgccgaagtcccatgaatcgggcgtgaaaatcaactgggcgtgcgccggcgccgccaaggcgcaaagggccaagattatgagtgagatatgtcgtcgtatcgtcatggtgcgtatggatgtcggttttgcaaaggtacattttttgtgaaaaaatcgtgcaataattttgcgggaatgaaattttgctatatatttgcactccgaaacggttaaacaacaagtttcgaatgcctgaatagctcagttggttagagcacatgactgttaatcatggggtcctaggttcaagtccttgttcaggcgcagatgcgcgagggttgcgtaaggttctttcaaaaacgcctgcaaagaggtgatgaaaagagaatgaaaaattttgctgaaaaatttggagttcctgaaaattgaattacctttgcagtcccaagccatttttaacgggagcttagctcagctggttcagagcgtctgccttacaagcagagggtcgggggttcgaatccctcagctcccacaattgaaaatcaacgacttacggcaatgtaggtcgtttttcttttgtgtacctccgtggtcggtttacacgttttttgcccgtttgtgtaaaccagtgtgtaaaccgagatttacacgatgaaagctaccgtagaggttgtttgttacaagtccaagccgctcaaagacggcacatttcctttaatgctccgagttacgaaagaccgcaaacgcaaatacgtttcgctcggcctttccctgcacgaaaagttttgggatttcgagaaaggcaagcccaaacggaattgtcccaacaaggagcaaatcgaacggctgatagccgcaaaaacagcggaatacaacgatttgattgtcgaaatgaccacccagcaacgtgaatacacggtggaaacgctcgtgtcccattttcacaatcaagtccgttgcgcgacggtggttgaattgtacgataaactgattgacgacatgaaacgcggcggtaaactcggcaatgcaggcgtttacaaatactcccgtacatcgttgctgaaattcacggggcagcggttgcaaattccgttcagcgatattgacgccgtgtggttgcgtcgttacgagaattggttacggacgagcggttgcggtgatacgaccattagccaactctttcgaacgttgcgtagcgtgttcaacaaggcggtagaattgcagttggtgaaacgggactattacccattcgatgcctataaagtcagcaaattcgatacgcggacgaagaaacgggccattacgaaagaggacgtgcgcaaggttattgcactcgatttgtcgcaaggctatccctccgaacgattggcacgtgatattttcgtgttcagctatttcggagcagggattaactttgcagacatcgccctgctgaaatacgggaatgtacgggacggacgggtgcaatatgttcgcaagaaaacgggcaagcctatcaattttctgctgacggaagaaatgcggaatatcattgccaaataccagcaacaaggacagacggatgaagattatatttttccgatactcgaccgtcgtgtgcatagaacggaacagcagagatatgaccgaacgcataaggtgctgacgaacacgaatcgttggttacgcaaaatcgggcagcgggttggcatcgaacatctgactacctatgtcgctcggcatacgttcgccacggttttgaaacggtcgggagtgaatattgcaatcatttccgaatcgctcggccattccgatttatccacgacacagatttacttggatagtttcgagaacagccaaatcgacgcggctatgcaaaacttgctatgacaaaaactcggaccgacttttccgaggggtcttaaaataacccctcggtcaaagttggtcctttataattagaattttatcgctatatttgttgaaaacaaatatcatatggctgatttcaagaaagattttgcaaatcacattaacgtaataggcactaatccttatttatttatagggtctggattatcaaggcgttaccttaatatgcctacttggctgaatctattaaaggatttttccgagaaactattactccaaaaaggttttggctattatgattcgaaaagcgagggtaatcttcctgaattagcatctttgatggcttccgaatttcacgaaacatggtggacaaaccctgcattttctgatagccgtaaagaatatgaaaacaagagaattggatcgcaagagataccattcaaaattgaattgtcaaaatttgtttcgaatcataaggatttccaagaggattattctgaagaaattgaattattaaaaaaagttgtaatagatggaataatcacgactaattgggatacatttttggaagcaactttctccgactataaaacttatatcgggcaagaacagttactattttctgaaaatatatctatcggagaaatttataaaatacatggatgtgttacttctcccgaatctctaatagtttcgtctaatgactatgctaattttaaaaagagaaacgcatatttagcggcaaaactattaacaatttttgttgaacatcctgtcatatttttaggctactcgataagtgatcctaatattttggaattattattttctttaaaagattgtttagccgcacataatattgaaaaattaaaagaccgtttgatttttgttgaatggcgagccgaacaaaacgagccaattatgatagatgggacattaagtttgtctgatgggaaaattctgccaattaaacatattaagattaattcatttattccattatttgatgtactcgcgaatttgaaacaaagactgcctataaaaattctgagacgatttaaagatgctgtttatgaatttgtaaaaaccaacgaaccaacaaataaaatctatattggagatttaaccaatatagatgaaaatggaaatgacatagaatttgtcgtaggtgttggtgttgcaaactccattgccaaacaggggttgctcggaatttgcgtagacgatgtagttgaggatgttttatttgacaataaacatattcctgcaaaagaatttataacagacgctattcccaaattattaaaaaaacgaatccgcatacctctatacaaatattaccgagcagaacatttgctaacaaatgatggaaaattaataaagaaaggttccgcagtaattaacaattatttcaaagacaagtctcaaaaatcattttatccgtcagcaaaagcatatgcaaagaaagagaatctaattagaactagatataaaactcttgctgaactaatagccaataatgatgaaaaacattgtttctattttatcccgttattagaacaagaaaagattaatatagatgaattacaactatttttgatgcaatgtttcagaaatggttatattaaaaacagctatttcaaacagttagtctgttattatgattacttaaaatttggattagaacagtaggtagaaataacaaagggattatccgcttgcatcgggtagtccctcttcttttttctgcggtcgtcggttgcgacagaaagcggaattttgtaaattcgtctttataaagatactcctatgcaagaagaacaaaccttttaccccgtaacgaccgaatatttcaccgcttgcctgcccttactggaaaaatatttcggcatcacggcaggctatttcaacaaagaactttcggatgccaaatgtctgatacctcaccgagagggtaatatcgtaaagtacagcattaaagaggattgcaatttggttttgccgtttcgacacctcgaatgccatgatttgttgtcgcttatcaactcttacgggacaattaccccgataatagaggaagccctattgctggtggcctactgcatccgtgaacggcaaatcgacgaaaacgaatacaatgaccttattcagtttcatacttgggacatataccaaagcgaatgggcgcacctattgctttttatggagcaaatggaggcacgggcatttcaaggcaacgaacagaccgccatcacaattcgcaccaacaacggggaagcggaaaagatttctattccgaacagcgataactggttattccgtctgattaaaaaggaacttgcaagctattttcccgaagtacagacagccgagaaagcacggcaagatattcaacggcgcaaaccgtctgcgggacgaaaaaaggataatgccatctattcggcagttgcatacggcatttaccgaatgctccatgaagaaaacgcaatacccagccagcccgatacgccgaacgaattatgccaactcattcacgactatacacgtttcacgggttgctatcccgatagtaaaggatggagcggcgaatacgacccgaaagtaatccgcgccgaccttgccgcctatctgaaacgagcggctatgaatcaagcaccacgattcagaccgataccattgcagaggcaggttatcatgcaggattttgattttccgctattggactgatcagactatataaccataccatttaagggagccgtttatcgcggttccctttcttttttctgccaaaaatctgccagtgtcatgacatctgtcattttgtcataacagacagatttacaatattttccatgacgtatttcgcaatattttcgacagcaaaggtaatgaataggtcgatttttaagggctattatttatgtttttgcaaaggcactaaaggtcggatttatgcaggttcaaaagccagaatccgcgaataaagcgtacggttattcgagagattcggggagtagccgacagcccgaaagaggcggcaacaaaccttaataaaaaagataacgattatgaaaacgcttgtaaacacaatcactaacacgaatactaattttaataattctaaaaacatggataatttaattatttctgcgactgagccgaagaaagtaagctcgctcgccaccaccgctcagacggtgaataaaattgaagagaaacccgtaatgcgtttcgtacagatgaagtacgagaacaacgcccaaatggtaggcgttatgcagaaagccattgggctgggtttggacaccatcatcattacgcctcgcgtggatgtcgcaggttgcggttacgtttgggtcggcctgcgtaaaggtcagaccgagttgcagggcaaactcttgttgaatgctcagatttgggcctatttgctggcggctctgctgggcgaggaactccccgaaattaacaactgcgacgctgatagcgaaatttgctgtcagggtgaatggctggaaaagttggaggcggaaatccgccaatacactaccaagcgtcgagaagaatacacccaagacgcggaaagcgggacgggttatctgacccattcgtggattttcccaaatggtaaaatcaagatgcccgccgaagcaatagaagatgtaacggcacttttcgcctaacataagtcaaacaggggagcgggtttcgccgctcgctccccataattttttatctatggtcgaaaaaacgatcgaaatcaagcgggggcaggttctttccgatatactccccaataaagaaatcccgacgaatacgatccttaacaaaacgctgacgggttgcggtgctacctatggagagatcgtacatgcgaaacggcactcgatcatcattgaaccgaatgtgcccgttatcctcggcaaaaaagcggaacacccatctttatttgctgtctacgaggggataaccaaagaggatgtcaaggcgtttcttgcaggcgaagaagatggattcagaaagatcatcaccacgcccgaaggcttcgataaaaaggtcctgcctgccatgtacgaaacccatactccgatgtacgacgattatttcctcttgctcgacgagtgcgaaaagaccatacaggatgtgggctaccgcggggatatttacctgcccgtcgaggactttttcagattcaagaataaggcgatggtttcggcaactccgatcctgccctccgacccgcgtttcgaggaacagaattttgaaatggtgcggattgctcccacttacgactaccgccgaccgctgacactttgcgtcacgaacaatacggtgcggatactccgaaaattactcgtacggttgaaagatgaaacggtctgcatctttataaattcgaccgatacgattttgggactgattcagacgctcaaattagagggctgttgtaaagtgttttgcgccgataagagcgtccgcaaactcaaacagcaaaatttcaccgatgtaagcgaccgcttgtccgaacttgcaggagtaaattttttcaccagtcgcttctactcggcggtagacattaaactggactacaagccgcatgtaatcgtgcttacggatgtgttccatgctccctattcgatgatagacccgcagaccgaggtcgtgcaggccatcgggcgatttcgtaacggcatagagcaggcgtaccatataacgaatacctgcgacagattgcagagcgtttcgcgcgacaagttgttccataacctcgaatgtcaagaacggatttacaaccgaatacgggagttgcctattgagggcgaaatcgaacaccaaacccttacgcaagccttacaagggatggactataaacgcttcgtaacgcgcacgggcaatcgaaactggttcatgtgggacaacgcatggacggatgcccgactggaagccctctaccgatcctccgcaacgattgaggaggagtacaaagacgccccgttccagttggccgttcataaggtagattacgacctaaccgacgaagaccgtctgcggcggacacaggcccaaataaaaggaacgacggaattatggcgcgaggtggtagaacaaatcgaccgaatccaacggcagaatcccgacgcagaacaaacatttctctgcggacaattaggcgatacgttctcagaaatcattgaagcggcaacgattctcggtaaagagcgcatcgggcaactgggctatgacaggcgcagaatcaaggcagcgttggagaacgtggaggagaaccgattgatgacctccgaaaagatgcaacgagccgtctatgcgaaatacaatacgggcgatttggtgctctgttctgaaatactcggttttctgcggggactgataaccgataacggaataccattcaaggggcgtgtagacaggcagattgtcaagctgtttttcgagattgccgatgacaagccacgaattaagggcaacaaagcctatctgctcggtaaaaagatgtttgagttttaaagaggaaaaacggaccgactttcgcaaagggggtaaattaagacccccttgcaaagttggtcctattctttgcttgtgaagatactatctctttttcacccctcccccttttcagatggaaaaacgaatttttatccattacatataataggattccacataaaacagaccaccccctatttatgcccgaaaccatctaacagcataaaattatcggaattatatagaatcggaaagctattcttacatggagatatgccgccctttttagttggttatgaatggagttatctttttacaagtaatggggaataactctaaactttacagaccatgaaaacattaaatgaaagggcgacagagattctgcaaaccttgttggccgtgcgggctaaaaaactgaaaatcaaaaatgcaagccagacagtccatgtgaaactgactgactgcatcggaaaatacaaccttatttcgctgacacagcacatcgaaataaatggtgttcttttccgtgaccccgaagtgatttttgctttcgacactattaaacagcagtttattccgtaccactacatcaacgatttttttgaaatcgagaaatgttgtgccacaccgacggtagagggattaatacctcgcaacgaaatagaccaacacaatttagcatgtttcgtaaaccgttggctgttgcaactaacctcaaaactggaaatccaatggatgcgcaacgaatagtacagaattgtgttttgaagaatcaaagcacggttatcgaggaaatgatacgggcaaaccttatttccgaagaatatctttatccgttcgcggatgatgtcatggaatggtggctgattgattcttggctggccgaacgactgaaagagcaaggcgaggttatcatcgaggaatacggttgctactggtggggcagacaatccagcgggcaggcgatttacatggacggcgtaatacaagaaatctgtgggaacgattaacccaacttacaactaacaaagtttcgattccagagcgcaaactattggatagaaactttgttttcaagaactttgcaacaaaatttaacggcaacaccccaacggagagcattgtaattcaaaaacattttctaactttgcattgtcaccgaataggtggcagacatattgattagtgaaagtgtttcgctatattcctcgtcagaaatctggaaaatttcacgtaaacaggaataagcattacaaacgctcttcaccttgtgtagattatatcctttcgatatatctgcccaagtgtggggtgttgcttatttgtttacgggcattccagagcctctgacgaaataggtgaacaactccacactttctttttgcatataccccaccgcagtaggagttgatacggatgtaatactcattttatgggtaaaacaataaatatcaacaatctatccaaagaggaaataaattccttttatgattttgtttgcgattatgaattgaatatcaaaaataaatacgggaattataacctcgatgatactaaattaatcgccttttgtgcaacgaatcatattgcccttaaaaataagaggtcaaaactaccttatctcttttggttctcaacacatcaagataaaagaacaaaaattaatgataaggcccatcatttaatgcgacatattagaaatgcttttgcgcatgggcttattaagaaagagggcaagaatttcacgttccaagactattccacaataggaactcaaacaatgggagggcatattcgttgcgacttattttgggcaatgttggatttattgaagcacactaaattataaatatcatctacttatgaaaaaactattatccttactcatgtgtggcttattgctatttggttgtggcgataagtacgacgacagcgcattgcgcaatgatttgaatgacctcgaaaatcgcgtgacaaaattagaggaactatgcaagcagatgaataccaatatttcatcgttgcagaagattgtagacgcattacaggataatctgtctatttccaaagttgaacaaatttccgatggttatattatctatttttccgatggttctactgctactattaaaaacggcaaagatagcggtgatgctcccgttattggtgttaaacaagatacagatggctgttattattggacgcttgatggcgaatggcttaccgatgaaaagggaaataaggtaaaggcacaaggaactgacggcaaggacggaattgatggcgaggatggaaatgacggtgtggacggagaagatggtgtagatggaacgaatggaaaagacggaaaggatggaattacaccgcaactgaaaatagaaaatggtcgctggatgctttcaatggataatggtaaaacttggacggatatagggcaagcaacgggagccgatggaaaagacggagaagatggagcagacgggacggatggagaagatggtgtcgatggcaaggacggaacgaatggcatcttcaaaagtgtaacggaagatgatgataatgtctatttcacattggaggacgattctgtcatcacgattcctaaaagcgataattcaaagtttgcaattgcattcgatgcaacggatatagccattcttaatggaggagagagtaaaacaattttctatacgattacgggcgcaacggaaaatacggttgtcaaagccattgcacaggatggttggaaagcaaaagtaaatgcaacatctgcggataagggaacgattacgattaccgctcctaatccgattgtagaaagtgaaatccttgtctttgccaacgacggttcctatcgtactgttatggtgtcgctgaattgtatgcaggggcaaatcaatatagcagataactctattgatgctactcctgctggaggtacacaggaaatcaaattgacgacgaatttggattacaccgtagagattcccgacaatgcaaaatcatggttgtcgttggctcctcaaacacgagccatgcgggaagatacgattgtttttgaggtaactgctaacgaggggattcaacgctatgcaacggttgctttgaaggacgaacaaggcaatactttacaaacgattatttttcgacaattgggaacgtgtaccgagattcatgtcgaaacgaaaggtgaactggaaaatgaattggcgggttatgattatgccaatatcgaatcgttgaaaatcacgggtgtgctgaatgatgtcgatttcttgtttatttatcgcatgatgcccaatctgaaaaacctcgatattgcagaggtaaatattacggcattgccgacacaagcattttgtgaatctacaaatgttgaagagctgattcttccaaatacattgataaccattggggaaaagatgttttatcgaagcgagttgaaatcggtcgtaatatccgcaaatgtaacaacgattgaaaatattgcattttgggattgttccaaattgacaaccgtaacctttgagaaaggttctcaactgaaaactatcggccataatgcttattatgaatgcacatccttgacttcaattgaaattccagcaagtgtggaaacgattggaaatacggcattctcagattgttcatctttagcaaccgtaacttttgagaaagggtctcgacttaaaactatcggcaataatgcttattatagatgcacatccttgacctctattgagattcctgcaagtgtagaaactattgaaaagaaggcattcatgcattgttcgtcattagcgacagtaacctttgagaaaggttctcaactgaaaactatcgctggtgattcttatgatggcgctttctcggattgttcttccttgacctccattgagattccagcaagtgtggaaacgattggaaaggaggcgttcaagcgttgttcgtcattagcgacagtaacctttgagaaaggttctcagttgaaaactatcgggggaggttattcttcttcttctcattttggcacttactcggattattatggcgctttctcggattgtactgcattaacctccattgagattcctgcaagtgtagaaacgattgaagcgacagcattcaagcgttgttccaaattgacaaccgtaacctttgagaaaggttctcaactgaaaactatcgggggaggttactcttcttcttattatcatggcgctttctcggattgttcttccttgacctccattgagattcctgcaagtgtagaaacggttgaagcggcagcattcagcgattgttcccaattggcaaccgtaacctttgagaaaggttctcagttgaaaattatcgggggaggttactcttcttcttattattatggcgctttcttgggttgttcttccttgacctccattgagattcctgcaagtgtagaaacgattgaagcgacagcattcaagcgttgttccaaattgacaaccgtaacctttgagaaaggttctcagctaaaaactatcgggggaggatttgatactaatgttgggtatcgttatatttatggtgctttcagtgaattgaagaatctaatgaccgtcgatatgtctgcttgtacacaggttgagataatcgaagaatgtgccttttacaatgatcccgaactgcgattattcaaggtcagcacgaaaacgccaccaacttgtgaaaacaatgcttttgtcggcataaatccttattcggtactgaaagtgccttcgggttgtgccaatgcttataaagccgcaacaggatggaaaaactttgcaagcattacgggattagatgaataaaaacaagaacttatgagtaactatcaaaatcgcattgattttatttcccgcacgcgacaaatccttattcaatacgaacacaactgtaactatgaaaagaccctgtttttgaattgttgtgtgggactcttaattatgccgcaacaatgcgcagaccacgacaaaaatatatccgtagatggattagttgattatgaaaactggggaattgatacaaccaaaatcacagcgaatgaacacagaaaaggagttgataagaattcaatagaaaatatagcctatcatatccgtaactcaatatgccactatcggttcgatataatgaattgcaatgtagaaaacattgagaatatccatattatggataaaagcggagatgatgtaaatgcacctattacatttgatctggaattaagtttcgatgatttccgaaaattcgtgctgaaatacgcagataagttagaagaaaaattaacgaatagttgaattttcatctgaccttccgagtgacagactttgtgaaaaggttagtctataagacccttttgcagagtttgtcactttcttattttgtttattttactaataatcttatctttataaagataaataacaattaaattttagctaaaatgaacagatacaaacaacctaaaacagaatgaaagaccgacgcatgagaggataagcagataatccaaaaggcggttaaatggagccaaacagagggaatagtcctgcttgtaggaaaacccaaagacgaaatatttcccgaaacatttatttacatgtttgcccccaatatggcagacattacaaagcccgtcgaaattgtccttacaaagaatcgacaatacatatttggatgaaagtgcgaacttaacgaaatggacgggataatcggcacaatgacggctaacgaggcacaaatcgagggaacgggcgaaaaggtgaatttgttcgactaccacgtgaaagccgatacaatcctattccaatacactacacccgacggacgggacgaggtggtgaaattcccgttagctggattctgcgaaaactatctgatgcagtttgcaaagtagcggcaggaaccgtacggtagtaacgaaacagacgcacgtattagaggcaacgaatattactccacaaaaaatggagttatatatactatatatcttaaaaggttaagggcaggccgaaaaaaatgcggttttcctttgacctcaaaattaggaccgactttgcaggatggtctattttaagaccccctgcacaagttggtccgattttgttcaaatataagattgtcaattaattcactattgtttaaccagcattggctttatgcaaatgtgtaaaccagcgtgtaaaccgaacgaacagccagcgaaaaaagatttcccaaaatgaagcgaggacttgcaggaatgatttatttatcatacatttgcactcgcaattcagcaaaaggggagcttagctcagttggttcagagcgtctgccttacaagcagagggtcgggggttcgaatccctcagctcccactaagttgaaaccatccaagaggatggtttttttatgcggaaaaattctgggagcatagctcagttggtttagagcgcctgctcgacaagcaggaggtcagcggttcaaatccgcttgttcccaccaatgaaaatcagacagttgcaggagtgcagctgtcttttttcatgccctcggcggagggggctatgaggtttgcgtggaacgggtagaccgcacggtgaaccgacggctgaggtccgatgggcatgcgcgtatgtgcagcggatttttgttgtcaaaaaaacgccgcgccagcgggaccggcgcggcgtgaatatcctcgttgtcggttagaatttgtagtagaatccgaatttcagatcggacgaggagagtttcaggccgaaggcctcgccgctgccgccgttgaagtagtccttgcggtagccgaggaagccgacctgcgtcaggaagctgaagtgctcgttgatcttcacgctcagtcccggtgtaataccggcctgaaagccctcgtgatcgcagcaggcgaagcctacgccgccgtcgaggaagagcgacagaatccccttgttataatatttgtaacgggcatagggcgacgccgtgaagacgttggcgctgccgccgtcctttactttcaggtactcgtaaccgagcgccacgcccaccgaccatctcttgttgaaatcgtaacccgcttcgggagcgatcgagaacgaatcggttgtgacgccttccgttttgtcgtgccagtaacccagcttgccgccgatccacaaacctttctcctgcgccgaagctttgtcggccgccgtaaagcttgcagctgctgcaagcagtacgataatgattttcttcatctttgttgcgtttttagtttgactgaaaaatggagctgtttttctgttccgaaagcaaagaaacagcgcggatttcttacgtgcaaataaattcaacgaaccggatgtttctaaaaatcaacgcatagaatttataaattgaacgatcggccctatgccggcgaaagtgcggaaaaggggaccgggggggaaatcaggctgcaagggatctcttgcagcctgattcggaggatgagttgtctgcggcttaccggtgcgagcgtttggcgacgaagagcgccagaatgaacgatacggccgacgcggcgatccagaagacgatcgccgagtcgaaattgtagctcgtcacgctgtccagctccgttttgccggagttgatgagccagccgctgacgatatcctgcaggccggcgccgacgtagctcgccatgccgacgattcccagcgcggcgcccgtcgcttcgcgcggtacgatgtcgatggccatcaggccgcccagaaaacagatcagcacgccgatcgccacgccgaacagaatcatgctgaggatattgacgaccagcccgtcgccggagtagaggaacaggcagagcgcgacggtgttcagcacgccgaagccgaaggccagcacgttgcgccgcccgtggaagaaggcgtcggagagccagcccgaaaagaccgtgcccacgatgccgcagagcgcattgaccgaaatgacctgtgtggccgcggccagcgtatagcctttgatctcctgcaggaaaagcacgccccagccgttgatcgcatagcggctgatatacatgaacgcgctggagagcgccagcacccagaccagcggattgcggatcacggagcgctgcaggtcggaagttttgccgtggtcgcggggcgtgccgggagtctcttcgccggtcagctcctcgatcgggggcagccccttcgattcgggggtgtcgtgcatcagcagtacgatcgtcagtacgccgagcacgccggcgaccgacgagcctacgaatccccattgccagccgaagaagccgacgaccgcgccgacgaacaggaacgacaggaattcgccgaggttgtggctggcgctgaagaatccgtagtaggtgccccgcttgctgagcgggtaccaccgcgagagggcgatgatggccgggggcgcgcccatcgactggctccagccgttgacgccccacatgacggcgaaggcgacgaacagcaccatgttgccgacgatgccgcctccgttggcgaagccgaggagaccgaccagcaggttggcgaccgccgataccgcaagacccgcggccatgaagcgtttgatgttgctgtggtcggagagaaatccgttgacgaatttgccgatggcgtaggcgaacagcagcgccgaaccgatgacgcccagctgcgtggcgtccagcgccccgctttcgaggatgggctttttcaccacgttgagactcgtgcggcagacgtaatagagactgtagccgacggtgccggcgatgaagctctgccagcggagttttttgtagagacgcatcatggcgtcgtcgtccttcggcaggcgcggcgccggtgcgctttttctgaaaaatgagagtattgacataagcaggttggttgcgttatcaggttaatcggaatgttaccgcttcgtgaattccagttcgacctgcacggggaagtggtccgacggagtccgggcccggaatttccgctccccgccgtccgggttttccgaacggtaggtgtcggtcaggattccgtagcggagcacccggaagcccggcgttacgaagaggtagtcgatgcggcggaaggtcttgatgtcggggtcgaaccagttttcggtgcccgtttcggcatagcggatttcggccgtgtcgtaggtgtcggacaggatgccggagtcgcgcaggatcgcatagctccggctcgtctcgcccacgttgaagtcgcccgtgaggatgacccgctcgccgcggcacaactcttcgatcttcgccagtatcaggcggcagctctcggcctgagcctgttcgccgcggtggtcggtgtgggtcgtgaagaaccagaaccgctgacggctctgtctgtcatagaaccggccccatgtgcagatgcggacgtatttggcgtcccagcccttgccgggcttcgaggggtcttcggagagccagaaatggcccgaatcgagcagtcggaagcggccgcgcttgtagaagatcgcggagtattcgccgcctgcggccccgtcgtcgcgtccgacgccgacgtaatcgtagccgggcagcgccgcgagcatgccctgcagctggctgtggaagacctcctgcgccccgaagatgtcgaagtcgtggaaccggatcagcgacgagatcaccgggagacgctgctcccagccgttgccctcggccgtgtccttggcgttgagctggcggatgttgtaggtcgcggccgagaaactctgcgccgcggcgttgacggccgtcacgcatgcgacggccatgcagatcagtaatttgttcatgtcgctcggttatttgcgccgtccctgcgcttcgaggtagcggatcagcagttcgggccggtcggtctggatgatcgaagcgcccatgtccagcaggcggccgtacacctcgtccggcgattcggtgaaggccttgtcgtcgctcagaccgccgcagagcgagtcccagagcgaattgacccacagtttcgaaccgcttgcgacgacctgccgcatgcaagcttcgacttggggcgtatagtcgtcccagcacacttcgtaagccagcgggacgacgcccttcgaggcatattcctcgaaaagctccctgccctgcggcttgaggatgtcgatgatcggcatgtacatcatgttgtgtccgtattccgcgaattttgcagagacggtctccaccggacgtttgcctttgatgagcacctgatccgtgacgcccagctcctcggtgatggcgagcgcgaggtcgtaatattcatagccttggtcgatattcaccgcgatgcggtccttgcagacggcgagcgcttcgcgcagggtcggcattttgagcgaggtcttcacgccgtggccggttttcagcacgcagcgccggatcgagtcgtaggtgatgtcgcagacgcggccgcggccgttggtcgtgcggtcgatcgtcttgtcgtggcacaggaccagcacgctgtccttggtgagcttgaggtccagttccatgatgtctacccccatgccgatcaccgattcgatcgccgggatggagttttcgggccagttgcgccagtctccgcggtgcgagaccaccacgacgtaccgtgaggaggggttgtggagttccgcgcggacgaaccgggctttgtccgtcgtttcggccgccggctgcgaacaggcgtacagaccggctgttgcgcagaggatgagtaggtaacgtttcatttcgttcggtttaaaaagggagaaccggaaagttccggttctcctgaagagttatttttccagtacgggatagctctccgatgccgtccacttgcgcaggacgacgtcgggcttgcccggcagcgtttccgccggagtgtcgttgaagagcgctgcgccggcgttgagcgctgcggcgaagtttgcgcacgactcgccgctcgaaggtacggtgacggcgcccgacttcatctcgtcgagcgagagcagggcgaaggtcgtctttttccagaccgttccggccgccttgtcgctgccgacggcggagttcgccgcagacttggacggacatgccgagttgccgtagatgttctgcaggttgcctttcttgctgtaacccaccaccgatgcgtaggagctgttggctgtgatcttttccacggtcgagtagcagttgatgacgaagctgtcgtcgctgacgatgccggcgatgccgccgacgtcgttgtgtttcgcttcgagtctgtccacccggctgtagcagttgatgacatagcggcccagcccgtcgccgcctttggcgatctgtccgacgatgccgcccatgttggggtctttcggggcgtcggtcttcatcgtgccgccgaggttggcgcagttgaccagcgtacccttgttctggcctgcgatgccgccgatggtcttggcgccttcgccgcccgtgatgtcgcccttgaaggtcgccccgtcgatgacgccggcgtttatgccgacgatgccgcccgcgatctcgaattcggtcgaaagcgcgccttcgacggccagatcgcggatcgtgcccttgttggcgccgaatacgccgcaggatttgcccggagcgacgagcttcacgttgaggagcttatgccccgcaccgtcgaattcgccctcgaaatagatcgtgttgtcggccgcaaagccgatcggcgtgaggttcttgttgtcgaagtcgatatcggccgtgaggcggtagtaggccgacgatgtgtagacggcgtcttcggcctgccggttgatcgacgcggcgaccgtgttccagtcgctcacggagttgagctgccacgggtccgcggccgttccggaaccctcgaccacgtcgggtgcgggtttctcgtagtcggtgtcgaactgaatcgtcagggggcagtggtccgaagggtagatgttgccgtaaacggtgttgtccaccttgtaggattttagctccacgtcgccgcgcgagtagatgtagtcgatgcgcgccgtggcctgcgtgaggtcggctgtgattttgtggccgttgaaggtgccgacgggaccgctgatgaaatccgattccaccgtgaggaacgagtcgttccaatgggtgcggagcgtcttcgacgaggcgtcgtccatggcggcgttcatgtcgccgaccagaatcgaggggatgccgtcggggttgtacatcttttcgcgctcgatcagcagtttggcgccctcggcgcgcgccgtggcgcccagcggggcgtgggtgaccatcatgaagaactgcttgttatacagtttgtcggtcaccatggcgcaggcggcgatgcggtgatagcccagctcgtcccagccgtagctcatttcgtcgggcgtgggcgaaatccagaagaagtgcttgtcggtcagctcgaaacgttcggggttgtaggcgatgcccagcgcttcgccgctgacgccgtcctgcgagtcgcggcccacgaaccaccattcgtatttgccgccctgctgcccgacgagtgtcggcagctcgttctggatcgttccgttggcctcttggaagccgaagatgtcccatttgtttttgacgatcgactgcgccagcaccgtgcggcggttggtccacaggtagtcgcccgtgcccttgcccgaaatccagaggttgtagctgccgagcgtgagcgtctgctcggtgatgtcgggtttgcgggagggcgtgtcgtcctcgtagtacttgtcgttgagtaccgttttgaaatcgtcggcgcatccggctgtcagggtgcagagcgccgcgaacatcgcgagaattattgtttttttcatgttcaggttccttatatttcccggaaggcggggcggccctgccgaccgccgcccctccggaattctacattcggttatttctggtagttgctgtgacgtgcgttctgtccgtactgtgaccacgccgaagctgcgggcgaggtgacgccgggcagtgctacggagtaaaccttgagcgcacctgccgccgagtccttgccgaggaagtaggagtagccccattcggagatcgtcggcgagccgtccaccgagtcggccagatgctccttgtagcggagttcgccctcggcgctcagcacgacgtaatcgcccgtcttggtgcagaggtggatctggccgagattatcgacggccgggatgctgttgcttgccgcgtcgagcgtgtacgaccagcgagtcgaaccgttcgaggtgttcagcgcgtagaccaccgagggggtggccttgtcggcgacgatgtagagcgtcgtgccgtcggcgctgagcgatgcgcccgtctgctggaatccgtcgggcaggttcacgctccatttcggggtcttcttcgacgatgcggtgaggttcgtgcagtcgaagctcgcgaggttccaagtgcccgatccttcggcgatgccgggaaggtagacgcagttgtcggcatcgacacagggctggcagcggccggccgagagaatcttgttgggagcgaacgtgtcggaggtcggaaccggcgaccagacgaacgatgcgtcgggaaccatgatgccgtagccgtactgggctgtgttggtgaagatcaccacgccgttcttgagcgcgatcgtgccggaggtgccgccgccgttggccggggtggccgttgcggtgttcttgccggtggccttctcgaatccgcggatcgcgccgttggtgccgcggctgccgacgatgaccatgctcggactgatgcagggcgtcgagaaggcgatgcgcgccgccggggcgtaggccgtcgtgttcttccagagcaccgaacccgtcgcgccgtcgaacgcatagacgagcgatgccgacgaggagccgccgtaaccgtgcgccacccagtaaaccgtgccgtcggtgtccaccgaaggataggagatttcgctcttgaggtatacgccgtcttttgccatggcgtcgtattcccataccttggcgccgtcggtgttgagcgcgaccattttgccgtcgcccgataccgaatagatatagcccatgtcgctcgctgccacgacgctcgccgcgcagagcgcatcggcggaggctaccgcagtggaccagagcagcgtaaaggcgttgacgtcgcctgcgcggacgttgatggccttggaggtgctgttcgagccgccgcggtcgtcggtcacggtcagctggacgttgaacatgcccatttgttcgaacgtgtaggtcgcgttgatgtccgtcgaggtcgtgccgtcggggaagagccattcgcgcgatacgatttcgccgtcggaatcggtcgatttgtccgtgaaggtcacggtcgtgccgatgctgatcatctggggcgagtagctgaagtcggccgtcggcagcacgttgtccgcaaggacggtgatcgttctggtcgtcgtggcgcggttgccgtcggcgccccatgccgtgagggtgaccgtgtagtcgcccggacggttgtagacgatcgggtcgggagcggcctcctcggaccagttgccctctccggcgaagccgaagtgccagaagtattcggaaacggtcgtcccttccgctgtggtcgtattggtgaaggtgaccggagtgatgcccgcgatgatctcctctccgccgaacgtgaagccgggggtgatgaccgagttgtaggccttgtccatctcgctgctgtccgaacatgcgaccgatgcggagagcaacacgatactcagatatgatagtattcttttcattgaaattgattttttgaaattttaaggtttagcgtttccctttgcctctcaggtattcgtccatcagggcggggtagtcgcactggatcatgcgcaggcccgcggcgacgaagccgtccatcgtgacggtgttgccgttgcggaaggccgcgccctcgtcgtcgagcaggttcgagaccgaaagccctttggcattgagcgacgaaatccatgtgctgttgacatagcccgtcgaggtctggatcatgtagacgggggcgaatgccgacatggcggccagcgccgaggcgttgttggcgtgcggggcgatgattcccggctgctcctgacgggccagccaagcggccctgtcgctgttggttccgacatagaactgcacccggtccagacagccgcagcgtttgacgacctcgtagaccttggcgatgtccacgtcgtcgctgccgcatttgtcgaggttgaaccagaccttgccgcgcagctccgtgaggacctcctccagcgtcggaatctgttcgccggtcaccttgccgtcggtggttttcagccggaatttccgcagctcctcgcgcgtgaagttgatgacgtaaccttcgtcgccggcataggagctgtagtcggtgaaccgcttgaggtagttgtcgtgcagacagatgacctgcccgtccttggtgatctggacgtcggtttcgatgaagtccacgcatcccagttcgacgcacttgcggaacgccgccatggagttgggggccagatcgtagccgttgttgaagttgccgcggtgggccatgatccacattttgccggtgtcgaaattcagacacgagcggctcagggaggggccttcgaccgtgacggtctgcgtcagggtctgcgtcgtgccgtccgtgtaggagatggcggcgccggccctgtactgtccgtcggcttcataccggtgttccacccgctgcgtcgggtcggttacgcgctgcgccgcgctgccgtcgccgaaattccagacgacggccgacacgccggggatgcggctgagcgcgaaggcgacctgctccatacgggccggatggtcgttgctgacgacgatcgcggcctccgtatcggcgacggcgaccgtggccgagagttcggtcatcgggccatgcagccgggtgacggtcgccctgaccgtgtaggtgccggccgtccggtaggagtgttcggccgattcgcctgcgcccgaagtcgcggtcgcgccgtcgccgaacatccacaatacgctgcggacgttatccggactgccttcgagcgagaagacgactgcggcgtccctgaccggaactgcgggcgtccagacgatggtctgagtcccgttttccggtccgggggcctccgtgccgccgtcggagcaggcagcgaactgcccggttccgatcgcccagaggatcaatatgattctgtttgtgaatcgcatgacgtcgtcggtttattttacgccgtagcccggattctggtaaagtccctcggtgttgaggatgcgttcgttgtaggggatcggaagcagcaggtctttcagcccgaagttggggttgatcgcgttgaaatgttcgatcatctcctgcttggagtacatgcgcagcaggtcctgccagcggagtccctcttggatgaactcgttgcggcgctcgtcgtagatgccctgacgcaggtcggtgcccgaccagtcgcccagtccggcgcgtttgcggaccatgttcaggaaactcttggccgtcggctccgtgccctgccagtagtaggcttcggccagcatcagcgctacgtcggcgtaacgcatgacgatccagttgttgccgccgtagccgttcgcaccgcactccagatcggcgtacttcatggtgtggtagtaggttacgcccgcaacggtcgtctcgcgcaggtagttcttgcgcacgtcctccttggcgaaggcgtcgtagacgctcttggtggtcatgttctgcatcaggcccaccttgttcgaggtgatgccggttttgctgggaccgaagaggtagttccaagtggagccgaggtcggcgttgttctggatgtagttgatctggaaaatgttctcggcgcaggacttctgcgtggagaggtcccagatcgcgttgtaggggatgtcggacagttcgccgaacgaccgcaggttccatgcggcggtgagcttttcgatggccgaagtgagcgccgccgacttctcggaggcgaaatcctcgtcgcaggcgtattggagttttgccttgccgtagagcgtccacgcggcggccttgcttgcacggccgcactccgatgcgggctgcatgtcggccaacgggctgccgagcacgtagtcgaggtcggcgaagaccgccttgtagacctcgctcttcggacggcggtagttgttggcctgtacctcgtccttggtcttgagctcggtcaggatcaggggcacgtcgccccactcggtcaccagatggaaataggtcagcgcgcgcaggaagcggatttcggcttcgtaggtgttgcgcgcgtcgccgttggaatagctcacgtcgtccagatgcgcgagcagcgtgttggcccgcgaaatggtcttgaagagctgcgtgtagcggttgtatacgtaggagttctcctcggtgagcgtatagttgtagaactggtagggaatgccgctgttggcgccgctgtccgtcacggccgtgtcatgcgagcggacgtcggtgaagtagtggttgttcgtgtagtagtagctctgcgtgagcgacgcatagacgccgttgagcgaggtgacgatgtcggcttcggacttgtagaagttgccgaccgtcgtggagttggggtcgtattcgtcgaggaatccgcaggacgccgtcgagaccgaggcggcgagcaggatgaacatatgtttgatcttcatattcgtacaagatttagaaagttaagtttaaaccgaccgaatagatgcgcgagagggggtagcatccccagtcgaagcccggcatcatgttgctgcttttatacgacacctcagggttgtaaccgcggtagggggtaatggtgaagaggttgtcgccgctgacgtagacgcggcacgaggtgatgtgcagcttgctggtccagcgtttgggcagcgtgtagccgagcgtgatgttcgcgcagcggaagaacgaagcgtcctccacgtaatacgaagagagtttgagcgaggtgttggtcgtcgagatacgcgacgcgatgggcacgttgttgcggcccggctgtgcgtccgagatgtagcggtcggcgacgatcgaatactggttgcccgatccctccatgttgtagaggtagtagtcttggaagttgatgacctcgccgccgtacgaataggcgaagctggcgctgaaatcgagtccgttccatgacaggctggtcgagaagccgcccgtgaagtcggggtaggcgtcgccgatgatcgtcttgtcgtcggtggtgatgacgccgtcgccgttggcgtccttccagatggcattgccgtaggagaggttgtcgagggcgtacgaagccacggccggacccttgagctggtagccttcggggaatttgttgccgttcttgatgtagacgtcgcggtcgagcagggcgttggcatagtcggccttcgacatgatgcctacggcctgatagccgtagaacgagccgatgggcttgccctctttggtgatgtgggagcctaccgagcgttcggtggtggagatgatgtcgtccagaccgcccatgctgacgaccttgttgcggttgaccgaaatgttggtgctgaagttccagtttaccttgccggtcagcaggcgcgcgtcgagctggacgtcgaaaccgcggttgcggatcttggcgccgctcatgttggtcgtcgtcgaggtcgcgcctgagatcgaggagatcgggtatttgtagaggatgtccgtcgaaatggagttgtaccagttgccgatcacgttcaggcggccgttgaagaagcccagatcaataccgacgttggtctggcgggtggtttcccagcccagcgcggcgtcggtgaaggagccttcgtaagtcgtcgatacgggagtctggccgaaggcgtagctgcccgacgagatgccggcgaggctggcgtagttgccgatgtcgttgttgccgctcttaccccagctggcgcgcagacggatcgaagccacgtccttgagcgcatccttgaggaagggttcgttcgagagcgtccagccggccgataccgaggggaagtagccccagcggctgtcgatgccgaaacgcgaggaaccgtcggcgcggaacgagccggtcagcgtgtagcggtcgtcgaacgagtagttgacgcgggtcaggaacgacatcatggcccatgcggccttgcgggtgctgtaaagcgagatgtccgaggcgttcgagccgtggcccgtaacctcgtggatgcggtcgtcggcgaagcccgtggcttcgacgcccagacggtcgtaggtcttcttttggagggtgtagccggccagcgcgtcgatgtggtggcggccgatcttcttcttatagctgagcgtgaactcgcccagacggtccacgtcgtaggtcgaggtcgtgcgggcgatgttcgacgagcgcagctcctcgctgtaggcgggggcggcatcgcggccgatgctcatcgggcggtaatagaaatagcggtagttgtaccactgctggccgagccgggccgagagcttgaggtcggggagaaactcgtaaaccagattgagattgaggttgtggcgcgacatcttctcgttgatgtccagctcgttggcgatcgccagcgggttttcggggaagttcatgccccagtccgtcttcatgcggatcatggcgctgcgggcgtaatcgccgttttcctcgtaggccggcaggttgggcaggtacatcagcgcgctctggatcacgccgtcgttgatcatgcggccctcggcctgtacgacggtgttcttggcgtcgtacatcgagtagctgatgctcgccgtcaggcgcttggtgatctgggcgtcgaggttgatgcgggcgttgatgcggttgtggttcgacggtgcgatgataccgtcctgatccatgtaaccgacgctggccatgtacttgatggccttcgtgccgccgatgaccgatacgttgtggcgcatgatgccggcgttggagaaaagctcgtcctgccagtcggtgtcgtactgcggcgttacgggggtgcgggtcgtgaagtcgtagaacatcgggtggatgcccacttcggccagcgagaagcctttggcggcgcggatcgtgttgtcgtcgtagggactccacgacacgccggcggccgtggcgcgcaggcggtaggagttgttgcgggcgtcgatcagcaggtcgcggaactgcgtcgagttcagcaggtccaccttgtggtcgagctgctggatgccgtacgagaagtcgtagctgactttggcggcttcgccgtccttgccgcgcttggtggtgatgagtacgacgcccgacgcaccgcgcgaaccgtaaattgcggccgaagcggcgtccttcaggatgtcgatgctttcgatgtcgctggggttgatgaatacgtcctccgaagcgggatagccgtcgatcacgtaaaggggagcgctgctcgccgagagcgaattgacgccgcgcacacggatggttacgccgtcgcccggcgcaccgctggtctggtggacttcgacgccggcgaccttaccgactaacgactggcccacggtgggcgtggtagcggagagttcgctggctttgacgctggcgatcgatcccgtaaagtcgctcttgcgcatcggagtgtagccgacgaccagcacttcggagatctgcttgctgtcctcggtcagcgtgatgtcgaacgacgtctggctgccgacctttatctgctgcgtgttgtagccgaggaaggagacggagagcgtctggcccggcgtggcctcgaccgagaagtcgccctcaagaccggtgacgttgccccggttggtctccaagacgattacgctggcgccgatgacgggttcgcccgaaatcgttttgaccgttccggtcactaccccccccttacgggttgcgccgtctgtacgcgtgcggcggccggtttgcggctgacgacgatgcggctgccctccatgcgggcggtcaggttctgggcgctgagcgcgcggatgacgacgtctacgacgttttcgtcggccgccttgacgctcacgcggcgcgtgaggtcgatttcggagttgttatacgcgaatgtataaccgctctgcgattccacggttttgataaattcccggaccgggacgttgtccagatcgacggtgattttcttgttctgcgccgctgccggcagggcggccagcagcatcaggacaagcgacacgacaagtctccgcacggagggtgtccggtcggaaaaattcaggcgttcatcttttttcatgactgagttttaagttttgattgatagtttcttgagtttctttgaaagaagatccggggaggtctcccggcgttcatgtgttgcgttccatggtcggttttcttggttatttgtgtattattacgtagtgtttgtctatctggcggcagcgaaggtgcgtcagcgtttcgatgatcttgagcgtctcttcgagggtttcgggccgcagggtgaacgaaatgcgtatggaggtgtcgatgcgttcgtcgatccggaagcggatgttgtaccagtgttccagattgacggcgatgtcggccagcgtcatgttgtcgaagatgatcgagttgcccgtccagctgcaatagttgctggccgcgacgttgcgcacggcgaccgcgcccgaaccggcgtcgtaggagcagctctggtccggggtgaggacgaccgactggtcggcgcggtagcccgacacctcgactttgcccgaaaggagcgtcacctcttccgtgttgaacgccggcatatggctggccgtgaagcgcgtgccgagaaccttgacccggagtttgcccatctccacctcgaaggggcgcagcgtgtcgcgtttcacgtcgaagaaggcttcgccttcgagccggaccgcgcggctgcccgaagccgtgaagcggtcggagtaggccagccgggagtcggcgttgagccataccaccgagccgtcgggcagcgtgaagcggcctttgctgttttcggcggtcaccagccatgtcgtggtgtcggccgagagacgtttcacgacgaagaattcgacggacatcgccagcaggacgattgcggccgcagcggcggccgtgcggcgggtgatgctgaacagtccccgtttcggggcggccggaggcgtcatttcgcggtgcaaccggtcgagcttgcggcggtaggccttttcgtccgccgggaggacggacgccgggtcgagccgctcccattccttccataaggcgtcggtcttttcgcctgcgcgctccttgttcaggcaccatgtccgaaactgctgctgtacctgttccggcatcggattgtgcaggaacgtgtgtattatcttttttatcatgtccgttctttctgtgcgtttgtaatagtatgacgggaaaaagaggggcgtccctagtcgggatctgaattttttttgcaaataaaaaaagacaacaattttcgtgtcgtctttgtctgccgggaggcgtgaggcggaagaatcagaagaagaaggcgatgacgccgatgatttttttcagttcggcgagcgccgtgcggatgtgatattcgacggttttgggggttacgcccagtttttgtgcgatttgctgatgggaaagcccttcgtagcggctcaggcggaagacccgctgacgctgctcaggcatctgctccacggccatgtcgataatcatcagcaggtcctcggtggcgaccttcgtcgaaatgtcgtccgtcagaaggtcctcgacgtgcaggagccgctgttcgtaacgggtttgcacgttcttgtgttcgaagatgtcgaaaacggcgtttttggtcatccggaacagatagctgcggaacgatttgatgtgcccgatcgactcgcgtgtttcccagagtttcagaaagatatcgtgcgccagatcctcggcttcgctccggtttttcagcatgcagaaggcaaacgcctccacatgcggggcgtaacgcatgtacaacgcatcgaatgcatcgtaactgccctgccgaagactctgcaagatcaattcgtccgattgcctgtccattctttcgtcgtgtggtcgaaaatccgagtgttatccgggtgtgtaaattgcaaacaggggctaaagtacataaatttttcaggaaacgggattgtgatacgttaaatttttaatatcggatgttttccgggaccgacgtccgtgtccggaaagtcttggtttctaatgaaatgattcgattcttgcaaaactttgcggcacagtgttctgtttgcggttcgtcgttcaaattctgtgcctttcggctgccgcagggcggcggtgcggtgcgtatttcctatttcgggcgtccggagcgtcgtgatttttcgcaccggaatggtacggcttccggctgcgcgcatgcccggttttgcggaatgccggcggcgtttcacccccgatttttgccgtttggccctctgcgatgtctgccggatggccggaagctgcggattttatccgcagggagcgcaatcgggccggtcgggaatagcagttgcatgcgcttttttcgtatctttgccctgactccgaaatcaaaccttactcgctgcaatgaataaaagaaagaaatggatcgttacgaccgttatcctcgtcgtattttgtgccgtgctgggcgtttacagacacttcggccccggctcctccgcttcggacgccgatccggccgcggtgagcacgccccggaagaagagcgttctgaacgtgaacggactcgtcgtgcgtccgcagtccctcgccgacggcattacgatggtcggcaacctgctgccggacgaagaggtggacctctcgttcgagacttcaggcaagatcgtcgagatcaatttcaaggaagggtcgatcgtccgcaagggcgaactgctggccaaggtcaacgacaaaccgctgctggcgcagctgtcgcgctacgaagcgcagctcaagctggccgaggaccgggtttaccgccagagcgcgctgctcgaaaaggacgccgtcagtcaggaggcctacgagcaggccagcacggagctggcgatgctcaacgccgatatcgacatcgtcaaggccaatatcgcgctgacggagctgcgcgcgccgttcgacggaattatcggtctgcgaaacgtcagcgagggcgcctacgcctcgcccagcgtggtggtggccaagctgacgaagatttcgccgctcaagatcgacctcttcgtgccggagcgttatgccagccagatcaggccgggaacgccgctttcgtttacggtcgaaggccggaacgagaccttccgggcggaggtctacgcgcaggaatcgaaggtggatatcgccacgcgcacgctggccgtgcgggcgctctatcccaatacgcggggaacgctgctgccgggacgtttcgtgaccgtgaaaatccgcctgcacgacattcccgacgccatagccgtgccgaccgaagccatcgtgccggagatgggcgtggacaaggtatatctctacaaaggcggaaaggcgcaggccgtcgaggtgaagaccggcctgcggaccgagtccagcattcagattatcgaggggctgaacgtgggcgacacgctgattacctccggcacgctgcagctgcggaccgatctgcccgtcaaactcgacgtcgtcgaataatcccgccgccgtatgaatatttccgaactcagcatccggcgtcccgtattgtccacggtactgacgatcatcatcctgctattcggctttatcggatacagctatttgggcgtgcgggagtttccgagcgtggacaatccgatcatctcggtgacgtgctcctatccgggcgccaacgccgatgtgatcgagaaccagatcaccgaacccctcgaacagaatatcaacggcattcccggcatccggtcgatgtcgagcgtcagcagtcagggccagagccgcatcacggtcgaattcgaactttcggtggaccttgaaacggccgccaacgacgtgcgcgacaaggtgtcgcgcgcgcagcgctacctgccccgcgactgcgacccgccgacggtgaccaaggccgacgccgatgccacgccgatcctgatggtgaccattcagagtgacaagcgttcgctgctggagctgagcgagatcgctgacctgacggtcaaggagcagctgcagacgatcagcgacgtgagcggcgtgcagatatggggcgagaagcgttattcgatgcgtctgtggctcgacccggccaagatggccggatacggcatcacgccggcggacgtcaagagcgcgctcgaccgggagaacgtcgagctgccgtcgggaagcatcgagggcaacaccaccgagctgaccatccgcacgctgggactgatgcacacctcgcaggagttcaacgatctggtggtgcgcgaggacgccgaccgcatcatccgtctgagcgacgtaggccgcgcggagttgggaccgcaggatacgcgcagctatatgaagatgaacggcattccgatggtcggcatcgtggtgattccgcagccgggagccaaccacatcgagatcgcggacgaggtctacagacgcatggagtcgatgaaaaaggacctgccggaagatgtggtgaccgattacggattcgacaatacgcgcttcatacgcgcttcgatcgacgaggtgaaacagaccgtctacgaggcgttcctgctggtgatcatcatcattttcctgttcctgcgcaactggcgcgtgacgctgatcccgtgtatcgtgattccggtgtcgctgatcggcaccttcttcctgatgtatgtggccggattctcgatcaacgtgctgtcgatgctggccgtggtgctctcggtgggactggtggtggacgacgccatcgtgatgaccgagaacatctacatccgcatcgagcgcggcatgtcgcccaaggaggcgggtatcgagggggcgaaggagatcttcttcgcggtcatttcgacctccatcacgctgatcgcggtctttttcccgatcgtcttcatggagggcatgaccgggcgtctgttccgcgagttcagtctggtgatttcgggcgccgtggtcatctcgaccttcgcggcgctgaccatcactccgatgctggcgaccaaactgctcgtgcggcaggagaagcagagctggttctacaacaagaccgagccgtttttcgtctggctcaataatttctacagccgcacgttggccggtttcctgcggcggcgctggatagccctgccgctcgtggcgctgatgatcggcctgatcgggtggctgtggggaagcatcccggccgagatggcgccgctggaggaccgttcgcagattacgatcaacacccgcggatcggagggcgcgacctacgaatacctgcgcgactataccgagggcatcaaccggctcgtcgattcgctcgtgcccgaagcccgtgccgtgacggcgcgcgtctccagcggccgcggcaacgtgcagatcgccctgaaggacatcgctacccgcgaacgtacgcagatggagatcgccgaggtggtgtcggccgccgtgcgcacgaggaccaaggcgcgcgcgttcgtgcagcagcagagcaccttcggcggacggcgcggcagcatgccggtgcagtacgtgctgcaggcgaccaatatcgaacggctgcaggaggtgctgccggaattcatgcggaaagtctacgaaagccccgtattccagatggccgacgtggacctgaaattcagcaagcccgaagcccgcatcgcgatcaaccgcgacaaggccaacctgttgggcgtcagtacgcgcaatatcgcgcagacgctccagtacggactcagcggccagcgtctgggctacttctacatgaacggcaagcagtacgagatactggccgagatcaaccgccagcagcgcaacaagcccgccgacctgaagtcgatctatgtgcgcagcgacaagggcgagatgatccagctcgacaacctcatcacgctcgaagagaacgtcgcgccgccccagctctatcactacaaccgttttctgtcggctacggtttcggccggactggcgaaggggaagacgatcgggcaggggcttgacgaaatggatcggatcgccgagcagacgctcggcgacgactttcgcacggcgctggccggcgattcgaaggagttccgcgagagttcttcgagcctgatattcgccttcctgctggctatcgtgctgatatacctgattctggcggcgcagttcgagagcttcaaggacccgctggtcatcatgctgaccgtgccgctggccattgccggcgcgctggtgttcatggcggccaacgggcagacgatgaacatattcagccagatcggcatcatcatgctgatcggtctggtcgccaagaacggtatcctgatcgtcgaattcgccaaccagaagcaggatgcggggctgaacaagcgggaggccatcgagcaggcttcgctgcagcgcctgcgcccgattctgatgaccagcgcttcgaccattctgggcctgctgccgctgacggtggcttcgggcgagggtgcgcagggacgtatcgccatgggtatcgccgtggtgggcggcatggtggtttcgacgctgttgaccctttatatcgtgccggcgatttacagttacgtatcgaccgaccggatccgaaaaacgaaaaagaacgcgaaatgaaacgactgattttaacggttctggctgcgggggccgtcggcacggccgcggcgcaggagtgcggcgagccgatgaccctgcagcggtgtctggaactcggactggagcagaattacgatgtccgcatcatacgcaacgagcagcgcattagcgacaacgacgcgacggcggccaacgccgggatgctgccgagcgtcgatctgacggccggctacagcggggcgctggacaacgagcgcacgactccgcgcgagggggacgccgtgaccgaaaacggcatttacgatcagaccttcgacgccggcgttgcggtgaactggacgcttttcgacggattccgcatccgcaccaactacaagcggctgcaggagttgcagcagatgggggcgctcaggacccgcatcacgatcgaggacttcgtcgccacgcttacggccgagtattacaattatgtgcagcagaccctgcgcctgagtaatttccgttatgcggtgcagctctcgcgcgagcggttgcgaattaccgaagagcggttcaagatcggcagcttctcgcgtctcgacctgttgcaggcgcgtgtggatttcaatgcagacagttcgaaatacatgtcccagcacgagctggtgaccgcatcgcgcatccgcatcaacgaactgctggccaacgacgatctcaacggcaggctttcgatctgcgattcgctgatcgaggtgaacagcacactcgaatgggatcgtctggaggctgaaacgcgcgctgcgaacgcttcgctgctgctggccgggcacgacaacacgctggccgaactggacctgaaaagcatccgttcgcgcttctacccttatctgaacctgaccgccgggtacggatatacctacaaccggttcggcaacggcgccactcagtcgcgcggtacgctggggctgaacgccggggtgaagctgggattcacgatcttcgacggtaaccgccgccgcgagcagcgcaacgcccggatcacgatcgaaaacaccgaattgacccgtcagcagctggagcagtcgctcatggcgaatctgtctaatttctggcaggcctaccgcaacaacctcgaagtgatccagctcgaaaccgaaaatctgatcgccgcccgcgagaactacgagatcgccatggagcgttacctgctgggcgatctgcccggcatcgagatgcgcgaggcgcagaagagcctgctcgacgccgaggagcgcatcctcacggcgcagtacaataccaagctctgcgaaatatcgctgcagcagatcagcggaaacatcggggtctatctgcagtgaccggaagcagtcgtccttccgatttgaaaaaaccactctctgtctgggagtggttttttcgtcctgtgtgagccggagcctcggttgcgtcgtatcggaatccggtcttagggccgttaccggctgaaaattttcgtcagtcggctgcccgtcatgcacatgcgcaagcgccccatgacgtcgctgccgtgctccttgtgttcgggagcgtgcagccattcgtgaaattccagataaatcccccggtcgatcatgaattcgaaagccgcgttcttcagtcgtttttcttcgttgtatcccgcttggatattggataccagatcctcgaacgcggcaatgttgtagggattggaaactggaatttcggctgtgtaatgttgctttctcataactttttatttttatataaatcgactggtgagacattttcggccagagacctccgaaagcatatggaaccgaccggatgacagcgtgtgtcgtgcgctgcaatttcaccggtttgtccggttcggaatgtgggttgtctggtgtggcgtcgaaaaaccggtacatcctccgaaaagaacggggctgcacggcgcggcagtgacgggcactgccgtaatggttttgcaaaggtaaaagataatatgctgaaatacaagctttttgtggaatttttcaaggtgtttttccggcggaaaaagttgcaggcggttttattattatatataaatataataatacgttttgcggagcggccaagaaaaccgccgatttttttcttggctgcggtttgttcgcttatcgaattaataatgttcgaaacctccggttggtaaaaacggcttttttattggagcgagcgccgtgcggaaccggtccgcggagtcttcgcggaccggccggggaatttgccgggcgaagccgctggaaaaccggaacggttttgtactttttttgtacttttgccatatgatgtctctcggattacgaatcatatgtgcctttgccgccctgcttgcctgtacgcgggcggcggccggaacgccggagagcggctatcccgtaaacggccgcgtcatcgaccgtctgacgcggcgccccgtggcctatgcggcggtcgtgccggtcgggcaggagcagcggggcgtctcgaccgactctgccggacgctttacgctccggcgcgtacggcccggcattcaccgcctgtcagcttcgtcggtgggctacaaaagcgtcgttacgccggaatacatcgtgtcggcggccacgccctttatcgagatcgagctggaggaggacgccacgcagctcgaagccgtgaccgtcgtgccctcgccgttccgggccacggccgaaagtcccgtcggattgcaggtgatcggcctgcgggagatcgagaagagtcccggcgccaaccgcgacgtctcgcgcatcgtgcgctcctatcccggcgtgtcgttctcgcccgtgggctatcgcaacgacctgatcgtgcgcggcggaggcccttcggagaacaaattctacatggacggcatcgagatccccaatatcaaccatttcgccacgcagggagccacgggcggtccggtgagcatcgtcaatgccgacctgatccgcgagatcagcttctataccggggctttcccggccgaccgttccggggcgctgagttccgtgctggatttccggctgcgggacgggaatcccgaaaagcagactttcaaggcgacgctgggagcgtcggaagtcgggctgagcggcagcggacatatcggcggaaaaacctcctatctcttttcgctgcggcagtcctatctgcagctgctgttcaagatgatcggtctgccgttcctgcccaactatatcgacggccagttcaaggtcaagacgcgcttttcggagcgcgacgaactgacggtgctgggactggcgggcttcgacaacatgaaactcaacctcgacgagaaaggcgaggaggccgaatacctgctgagctacctgccccgaattcgtcaggaaacctttaccgtcggtgcgtcgtggcggcactacgcgggccgtcatgtgcagaccgtcacgctgagccacacttacctgaacaaccgcaacctcaaataccgcgacaacgacgactcttcggaggagaacctcaccctgcggctgcgttccgtggagcagaaaaccacgctgcgggctgaaaaccgcagctatctgggccgctggacggtgcgcgaaggcgcggagctgagttattcgagttatacgaaccgcacgttccagcggcttttcaccgacgagacgctgctgtccgattaccggacccggctgggaatcgtcggctgggggcttttcgccggggcggattacgcttcggaggacaagcgtttcacggcttcgctcggcctgcgcgccgacgggaacgactactcgccgcgcatggcccggctctggcaccagctttcgccgcgggcttcggtcggctatcggctcggcaggggctggtcgctgagcggaagcgcggggctttattaccagctgccgccctatacggcgctcggattcaaggatgcggatgcgtgggtgaacaaatccctgcactatatgcgcgtcggggctttcagcgcaggcgccggatggcggctgcgcgaccggctgatcgtgtcggtcgagggcttttacaaattgtacggggatattccgctttcggtcgcggacgggattccgctctcctgcaagggcaacgattacggcgtggtgggcaacgaagagctgcgttcgtcggccgagggacgctcctacggcgtcgaggcgatggcccgctggcagattcccggcaaggtcaatctcgtgggttcggtcacgctgttccgcagcgaataccgccgcgattcagcggctccctatatcgtttcggcgtgggacagccgtttcgtcgtgaacctcagcggcacctacgacctgccgcgcagctggagcgtaggggcgcgcctgagcgctgtgggcggaatgccctatacgccttacgatgtcgaaaaatcgtcgctggtcgaggcgtggaacgtgcaggggcggccttattacgactatacgcgctataacgacgggcggctggacgccttcgcccagctggacctgcgcatcgacaagaccttctatttccggcattgcatgctggggctttatatcgacttgcagaacgtaacgggcagcaagctgcgccagcccgacgtgctgatgtccacgggcgtggtggagaatcccgaagcgcccgccgccgaacagcgttaccgcatgaaatacatcaggcaggagagcgggacgctgatcccgacgctgggaatcaccgtcgaattttaagcggcggggcgcgaacggcgtcgtgccgaccggtttcgaccgttttcgatcgcccttgaccgggattacggccggttggccggtcggtcggttggctggaacggcgggcggcggattgtcctgtgcgcgtgcgtgtttgccgcgcggcgatattggacggagcggctcaattttcttcgggcgtcgtccggaatgaaaaaccgcagaaaccggacaaaacggtttctgcggtttttgtcgtgtatacactgccgcccggtcagaagcggaatgtgcagacgatcgggtagtggtccgagagatactgcacgccgtatcccgtgctgtcgagcagctggtagcgcagcggttcggcgcagcggtagaagatgtggtcgatgtggagcggtttggccttgccgaagccgtggtaggtcggccggggatcggtctggggtgcctcttcgcaggccgatttcagccatttgaaatagggttcgaggcatacaccgcccggcgtgcccgccgtggcgttcatgtcgccgacgatgaactgcggcgtgcgtttgccggcgatgcttcgcatccgttcgacgttgagccgggcgccttcgagccgggccgttttgccgatgtggtcgaggtgcgtatcgaaaaggcagaattcgcgccccgaggcgcggtcgcgcaggcacgcccacaccgtcacgcggcggcagcggccgtcccagccctgcgacacttcgtccggtgtttcgctcagccagtagtggccgtggtcgaggagttcgtatcgctccctgagatacatgatcatcagatgctcgccgggatcgtccttggcgccgaagtcgcgtcccatttcgatgtggccgtattcgggcagctgttcgacgaggtaggcgacctgttggcggcggggttcctgaaagccgatgacgtccggccgcacgtcgcggatcatgcggatcgaagcctccttgcgggcgtcccacgcgaagtcgccttcgtcgcccggcgcgccgatgtagcggatgttgtaggagagcagtttcagctctgcgggttcgctgcccgctgcggcggcagccgcggcgcagaacagaagtgtaaacagcagttttttcatgttgcgggattttatgcatgcgggacggccggagccgccccgcacgcagtgttcatcagaattccgacgtgaagagaatcgggaagtggtccgagatgtagggaacgccgtagccgtcgttgttgatggtgcggaaccggacgggcgtcaccttgcggtagaagatgtggtcgatgttccacgtaaagcgcggagtgccttcgccgaagttgttgtagctgtaaacgtcgtcggcttcgccgtcgggcgccgtttcgcgcgccgaccacatgaattcgaagaagccgtcgaggcaggtgcggcggccgtcgcccgcggcgtaggaggcgttcatgtcgccggtgacgaagatcggagcgtagcgtcccgcgatttgcttcatctgctcgacgatgagtttcaccgactcggtgcgcgccacctgatcgatgtcgccgccctcgacgggcgacgcgcggtgcgcgaggtgggtgttgaagaagaaaaactccttgccggtgctgcgctcgcgcagtttgacccacaatgccgtgcggaactggttgtgcccccagcccttgatcggctgggtgatgtccttttcgttgaggaagaaatacccttgggcgagcatctcgaagcggtctttgcgccaccagaccgcattgcggtgctgcgagtccttgtcatcgggggccagatagtagtgctcgtactcggtcaattcgccgatcagatactgcgcctgcgagaagcgaggctcctgcatgccgatcacgtcgggcttgacgtcgcggatcatcgtgacggaagcctccttgcgggcgtcccacgccgcgtcgcccttgtcgctcgcattggcgtagcggatgttgtagctcatgacgttgagttcgcttttgggggctgcggattcgccttcgtggttggagcatccggccagagcggtgaataacagagctatcgaaaataggaatcttttcattgttttggtttttagatcttggagttcgggttatctgttgtagcgtacggccaagtagtccatcgctccggcggcgttgtagcccatcgggatcgtgccgtcgaggaaaccgagtcccgacgaaagccggctggcgggctggatgcggagccagaccttttcgcggcccatgatctcggcgggcagcgggatttcgacctgtttataggccgggagctgccagctgcgctgcgtggcgaataccgggaagtcgggctgcgtgaaggtgtaggcgctgccgtcgggcgcggtctgcgccgcttcgacgtcgaaccacccttcgtcgctctcgtaatcgcccgtcgcggaccactgcactttccagaagtagggaccggcgttgaatgtcgcgcggccgctctgcacgctcatgatcagcgatacccggtcggacgaaagcccggcggtcgagaactccacgacccacgcatagggccggtcggtcgaagcgttccaccagtaggtcgtcacccacgccagccagttggcttggtcggtgcctttgccgtcggtattgactgccgtgcttttcacggcgtaattggtgccgtcttcgaggatgacgccgaagcccgaatagccgtcgttgccgatgtggctgcggaacggagccgtgccgcgcgccgtgccgcaccagcccaagtagtgccagcaggccgcattgtagacgccgttggggtaagccgacttggaggcggtctgcgtgaagcgtccgttggtgccccacgtcggataccagtaggcgtagccgtcggcggccgcggccttgcccttgacgtaacagtattcggtcagcgtctccgagaagctctgcgagcggtcttcggcgaagcggatgtcggcgaaggacatgtggcggatctggtaggagccgatgatgccgttggccagatcgtccgccgtatcgacgtactcgtactgcgggaaccgctcgtggacgatcacgcccgccagttcgcccgaaccgtagggcaggcgggtgccgttgcggcggtaggggcaggtggtgttggtcagcaggtggatcaggccgcctctgttgtcgcgcaccagccgcgggtacatgttgagacgtccctgcgcgtcggccagcgtgtagccctcgtgcacgggggtgagcgagcctttgcggacggcgaattcgcagtcgcggagcgtcacgaaggtgtagatgtcttcgtcggtcagctccgagatgtatttctgcttgaccggaagcaccgaggcgtcgttgcccgtcacgcgctcgacgatcatcgacgagcggatgcctttgatcatgtagcggtccggatcgggttcgaagaccagctcggcgtctttgagcaggattttcaccttgtcgtaacgggtgaaggcgttgtcctccggagtggccgtttcgacgcagaagccgtaacggccgtcgggcgattcgaggtagacggtcttctcgcatccgctgtaatcgacgctcatgtcggtcggcatcgggttgttgccggcgttcttcgaatcccggtcgctgacgacgtagccttccagcagccagtactcatcgactttcgagaccgtgagcgctttctcgcgcagttcggcgaacgaaatgtcgtgtcccagcatgtcgttcttcgtacgctggatgacgttgagcgtcagctgttcggtctcctcccagccgttgacgtaggagacggtgaccgtagccgtgcggagttcgtccgtgtcgttgccggcgtagtcgaaattgaacgtgtattcctcctccccggcgggttggagcgtgatttccgaaagccactcttcggcgggttcctccccggcgtcgtactgtgtggtgaaggtcagctcgtcgggggcgatgttggtgccgaaccgtacggacgccttgccgcccgaactgcccggtacgttggtcgaggtgccgccctcgaacgccattgcggggacacgggcgccccgctggcgcagtacgaccgtgtcggaccgtactgcgtcggcgctctgtatcagtacgcgcgtcatgcgcggaaagcccgcgttgtcggcgtagtcgatgtagaattttccgtcgagcggcaggcgcgtgtcgctcaggtcggcccacgaggccccgtcgtcgaggaacgacagcacggccggctggttggaatagacctgtatgtcgacgtggcccgccgtggcgttgacggtgaacgaattctcgaccgcgcccagctcgatcagcggaatatcgtcgccgtggtccatgcaggccgtcgcggccagcgccgcgagcaggatgcccgccgagccgatctttgccatgtatctctttgcgtatttcatgattgcgttttttacgtggttagaaatatttgaccgaaacgtcgccgaagcggaaatagacgtaggtcttcgtcgtcgtgccgttgtcctcgcccgtggtgctgccgcataccttgctggcggcctgcagccggatggtgacgtccttctgtccgaagcaggccgacggcaggtcgaagtcaacttcgtaaagccccggaacgtaccactgcgggccggcccaatagacgagcgtgcggatgggcacggtgtcgaaccgggtgaaggtgctgccgtcgagcgagtaggagacgtcccagtagagcggagcgacgatcgtggcggcgctcaggttgcccagtgcagccgagaggatcatcttcatgcacgagccgctgacgccctcggtcgagaagttgaaggccacccattcgccctcgttgcgcgacgagttccaccagatgccgttgtagcgcacggccggggatttgatgcctttggcgtagtccaaggtgttgtagtcgagcgtgcaggagacgcctgccaccgttgacgacgtgttgagcttgttgctcaccgacgagaacatgcggccttcgcccagatagggaacgatgctgccgtccgcgtgctgcttgatgccggcgttggtggtcatgccgggccatgcccagcgtacgagcgtcgagtagttgcgggtgctttcctcgcgcgagaaggcgatgtcggcctcttcgaccgggcggatctggtaggtgcccacgtcgcccttcacgccgtagcgcggcagtttggtgtggacgatgataccgcttatggggccggagccggccggaacgccgtcgcccttgcggcgccagcgcacctgcgtgttgagcaccatgttgatcttatcgccgcggctgtcgatcacgccgcggatggcgcagtcgaagcgcggatccagtacgccctgcgtgttgaggtcggtcttgtagcagtagccgtcgtgaacgttgatgtaggcgccgccgttgagcatgaattcgcactccttgagcgtcacataggtgtagatgtcggcgtcggtaagctccgaaatgtgcttctccttcttcgggaggtcggcggccgttccggcgttctggttgaggacatgctctttggtgaagcccgtgagcgtatagcgttcggggttcgactccttgaccagcttcagtccattgatcgagagctgtaccgagctgtagcgcttcaggatgttgtcggccggaagtttggcgacgatgcgcaggccgtactgaccgtcgaggctctcgatgtaggcggtcttctcgttgaccgagaagtcgatcgaggtgtccgtcaggttggggttggtctccatgttgtagttgccggcgtcgctgatgactacggccgagagcatcttctcgcccgtcagttccacttcgccttccgcgccgggaatcagtgcgcgcaggtcggcgatcgagagctgcttgacctcctgcgtcagccggagcgtcgagctgcactccacgtcggtatccttgtaggtgatcttcagactggccgaacggggctggtcgcccgtgttctcggcaacgacgaacgatacggccgattcgctgaaggtcacgtccgtgatccactgcgtgcctgcggggtcgtatgcgatgtcgaaggcgaagtgcgccggatcgacgtcgaagttggccgtcagcagtgcgctgcggttgtgctggtcgcccggaacggagacaatcgtatcttcgtccttgaaaacgaccgtcgcattgtcggtggtctggacgacggaggcttcggcttgggcgagaatcttgccgtcggcgtcgggaatttcgagccggatcgccgccttgcggtcgctgctgccgtcgttgcggtcgattccgaagaccagcacgatgttctcctcggcgtctttttcgagccggatctccttcagccagccgacttcggcgggattctccgcgtcggtgacgtcggttgccgtgatgaggatgcattcgagcgcctgcgtcatgttggtcgtaacgccgatctggacgcgttcgcgcggcagacgcacgaactcgaattcggtttcggcgagcgccagcgtcggttcggtgaccgcgccggcctgcgtgagaacgatctcctgctcttcgccctcgccgctgacgaggatgcgcgcgcggcgcgatacgccgttgttggcctcgtacgtaaagaggaagtcgccgatgccgttgcccgacacctcgctcacttcgccccatgcgccttcggccatttcggctttccagcgccccgtggagtagaccgtgacgcgcgtcgagccggccggggaggtgaggttgagtccgttttgggtgacggccagcggctcgttccatttgaagtccttctgacagcccggaccgagcagtgcggcggtcagtgcgacggccagcatgcgcagcaggggatatattttgtttttcggtttcatgtcggttgatttagaatccgtacttcttgtattcgttgttgtccaaagcgccgcccgaatagatcacctccgtgtcggggatggggtagtattcgtggcagggctggatcgaggtcttgaccttcgcatagtccgaaagcgccgccgtgcgttcgtaccagatgccccagcgcaccatgtcgaacttgcgctggaattcgcccagcagctcgcggccgcgttcgttctggatctcgttgagcagcagcggataggtgcggaaccgcgtgtattcggcgatgcccgcgcggcgtttgaccttgttgaggtactccatggccttgtccttgtcgagcagggcgcagtagcattcggcggccatcagcacggcgtcggcatagcggaagaccttgtagttgttcgagtcgtaggcggcctgaaggtcggggcaccagaatttgggacccatgaacggccgggtgacgatcgcgtcgcccgaagtgaacttcacgccgttccactcggtgattatctgcatgtcgcgccgcaggtcttcgccgccttcgggcatgaggttgccgtagaagaagctgttggggcgcagcggcgaccatgtcgtggcggcgtcgcccagctcctcgatcaccacgttcgagtagacgttgtcgctgttgcgcggatagggcatgcagatgctggcgacgttggaggtgtagatcagtccgccggcggtataggtgtgctgcacttcgaagatcgattcgggcgtgttcttcatccggaacggaatgtccgaaaccgggtagaccgagaggtcgtcgccgtagatctgttccagcacggcgatggcttcgagcgccttgtcgtaatccttgttccacatggcgagtttggcgatgagcatgtggcccatggcggctccggcgcggttgcccgcagcctcgctcgtgcggatgaggggcagtgcgcccagacacgattcgaggtcctcgatcagcgcggtgcgcgtcgcctcggccgacatgcgcggcagtttggccacgcggtcgagcacttcgtggtcggagacgtcgtccgtgtagaagggcacgtcgccgaagaagctcgtcagcaggtagtagtagaacgcgcgcagcaccttggcttcggccacgaggctgttgcggtccttttcgtcgatcgtcgaattctcgatgcccgtcacggccatgttgcagtacatgacgccgcggtagccgtaggtccacatgtcggcgccgaagcggggctgcgacggcgagatgtcgagctgcgcgtcctgcgttcccgatgcgatatacatcaggtcggtgacgccttcggtggcgatcatcattttgtaggtgtagaggtttttcaggggtatataacacgagttcaccgccgactgacactgggtcttggtcttatagaagtcgccgggggtcgagaacccttcggtgtcctcctgcagtgagcacgacgccgtgagccacgccgtgagaatcagcaagatgtattttgttttcataatgttctcggattacggttaataacgcagctggatgctgaacacgatggtgcgcggcttggggtatgcgcccagatcgacgcgccgtagcgccgaatcgctgctgtcggtcgagacgtcggggtcgaagccgttgtactttttccagatgtggaggttttcggcgctcaggttcagcgtgatgtcgcggatgaacttcgaacgcttgctcaggtcgaacgtgtaacccaccgtgatgtttttcaggcggatgtacgatgcgtcgtagatcatcaggtcgctcggcacgtgcgcgtccaccgcaccggcgcgcggcaggttcgactgcgggttgcgcacgggatgccacgcttcgagcatgtagcggtactggttcgacatcgaactgccggccatgtaaagctccgagtagttgtagattttgccgccgagcgaataggtgaagtagatgccgacgttgagcctgccgaagcggaagttgttctgcagaccgccgtacaggtcgggatcggcattgccctgatagacgaggtcgtcgttgttgagcgagccgtcgttgttgatgtcgtagtagcggggcatgcccagcgaggccttgcgcgacgcggcgtcgctgttgatcgccagcgccgaaacgtaggtgttcgtcacgctgttgcgctcgaactcctcgacgctcttccacgtgccgccgtacttgaatccccaaagcgcgttgagcgggtagcctttgacgtaaccgtacatcatgtaggggttgttgccgggcgacgagagcgccgtgacgaaatcctcgctgccgatgtcgtccacgttctgtttgttgtgggcgatggtgaggttggtcgtccacgagaatttggggcggacgatattgcggctctcgatgctcagctcgacgcctttgttcgaggttttgccgatgttggcgtaacggctggtgtagcccgtcgccgaagcggtctgcaccgtgagcagcaagtcgcgcgtcttggagatatagccttcggccgtaatcatcaggcggttgttgaagaacgccagatcgagcgccgcgttgtagaggtcggtcttctcccacgtaaggttgggactggccagacggctgcggtaataggcgcccggctgcatgccgtcgaacagatagccgctcgtggtgctggacatggccgccagcgaacggtaggccgagatggcgtcgttacccgtgcgtccggcgctcaggcggagcgacagttcgtcgatccagcgtacgtccttcaggaaattctccttggcggcgttccatttgagggccaccgaggggaagaagccccacttgttgttggcggcgaagttcgacgaaccgtcgtaacgccccgttacggtgaggtagtagcgctgtttgtagttgtagttgaagcgggccagcagcgacattttcgttcgcttggtcagccctgtggcggccgaataggtctccttgtcggtcacggcgttcatgttgttccacagcacgtcgtcgtccatgtagccctgtccgctcagcgtgaagttgtcgctcttgtagcggtaggcggtgaaaccggccagcgcgtcgatgttgtggccgcttttggtttcgagcttgtagctgagggtgttttcgctcgaaaggctgaattcgtggaattcggcgcggtaggcctgaccgccttcaccctcgttcttggcgggaagcgatcccggatagtagcggtaggtgtggcgctggaacgaatagtaggagttctggctgcgcagtttcaggcccttggccagcgccacttcgagataggccgtgtggttgagcgaggtccgctcgatggagtaggtgttctggtcgatcgtcgcacgcggcgtattgatccgctggccgttgccccaaagcgggttgtagttctcctgcgggtcgatgtggggcgaaagatacatggctgcgcggtagtaggccgtgccgccgatttcggcgaggttctgggcgttgtcgcgccatgtgtagctgccgcggtagccgaccttcagccatttgaacagctggtggtcgagattcagacgccccgtgatgcgctgcagaccgctgttgtcgatgataccctgcgaatcgttgtaacccagcgaggcgtagtagctgctctttttcgagcggcccgaaatcgagagcgaatagttctggtagggcgccgtgcgggtgatttcgtcgatccagtcggtgcctttgcccagcgagaaggggtctttgaagggatatttcgactggggcgtgccctcgccgatgtcctcgtagccgctctgggtgctgaagtaggcgaagtcgttgcggtagagtgcgaattccgtggcgttcatcacgtcgagcttgcggggcagctgcgagaatccgatgtcggccttgagcgtgatcgaaggtttggtgttggtctggttacccccccccttggtggtcacgatgattacgccgttggagccgcgtgatccgtagatcgccgtcgaggaggcgtccttgaggatcgtgaccgattcgatgtcggccatgttcaggtcgttgaggtcgctgacggcgtccatcacgccgtccaccacgatcagcggctcgttcgaggctgaaatcgagcgcgtaccgcggatgcggatcgaagtcgtggcgcccggttcgcccgtggtggacatgatgtcggcgccggcgacgcggccctgcagcgcttggtcgacggacagcaccgggaggtcctttacgtcggagattttgatgttggccaccgaacccgtggcgtcgcccttcttcaccgtgccgtagccgatgacgaccacttcgtccacggccatcgccttcgaaggctggagcgtgacgtcgagcgtggtctgcccgccgaccgagacggcctgcttttcatagccgagatactggaattcgaggatctcgccgttgcggacctgcagcgtataggcgcccgtcgccgaggtggtcgtgccgcgctgcgtgccgacgacgatcaccgtggcgcccgtcaccggcgcgccgttatcgtcggtcacggtgcccgtcagcttgtgcatcggcatcgaactctggtcgctgcggcgggccgtcaggatcaccttgttgttggaaacctgcacgttgacttcgggcaggcattcgcggacgatggattcgatgggacgttccttggcgtgcacggtcacgacgcgcttgaggtcgatgtcggcattgttgtaggcgaaggtatagacgccctgtttctcgatgcgggtgaataattcgttgattgtgattgcctttgcgttgatgctcacgggcgggttctgggcccggacgccggctgcggccagcagcgtgaataacagcgtcagcaaaaagaatcttccgggcggaagtggaataatcccttttccgccggattttccggattttttcataattttgtaacgatttaaggttctgtcatttcgtaattcggttacattacgaagcacgtcggggttttaagtcggagcggatgttgcagcatccgctttttttcgtggatcacggaggaggaattcccataggcttttcggttttttcaggttatcttgatctggtggttcgtgcggtgtggaacgtggccgactcgccgtcgagcgtgtattgcagtcccgtgatgagcgagatgacctgcagggtctcttcgagcgattcgtggcgtacgtggaacgacagacggatggtgcggtccaccgaggcgtcggtgccgatcggaacgttgaaccagcgttcgaggttggtgatgatgtcttcgagcgtcatgtcgaagaaggtcaggttgggctgtatccagctgttgtagttcgaggcgttcacctgttcgatgatcatgcttccggtggtctcgttgaagaccagccgttcgtcgggccggagccggacggactgctgcgagcgcgacgtgcggacgcagatcgagccgctgttgagcgtggtctcggcgatgccgctggtgcgttcgtaacgggcgtcgaacgtggtgccgagcacttcgatctccatgcggttcatgtcgacgacgaagggatgcgacgtgttgcgcgccacttcgaaataggcttcgccttcgagcgtcacgcggcgctccctgcggtcgaatgtttcgggataggtcaggcggctcgatgcgttgagccataccttcgtgccgtcgggcagctggaattcgcctttgctcccgcgcgccgtcagcaggcggatttcggccggaacggccgacgccgagcgtacgtagtaatattcgccgacggcgaacagcagcacggcggctgcggccgcggcgtagcgtatgcggcggaaaatgcggctgcgccgctgctgcgcttcacgcatgcggatggtgtgacggagccgctgcagctcttcgctgcggtcggccgcagcagggctttccacgacggcggtccactcctcgcgcagcgcggcttctttttcgtcgccgtcgccgggctggagcatccagcggcggaattgcgtctggagttcgccggggacgtcgttgtgcaggaatctgccgatgagctctcttatttgtcgtctctccatcgtatgcggtctttatccgggatatgcttttatagataagacggcatggcggggcgcaacccccacccggcagcgatttttttcgtattttttcggaaggcgccttcggacgggcgttttcggggcgcgttttcagacgaagagggcgaggagcgtcagcagccggcggagctggctcagggcggcggtcatgtggcgttcgacggttttgacgctgaggttgagccgctcggcgatctccttgttggaaagctcttcgtaacggctcaggctgaaaacccggcggcgctgttcgggcatgcggtccacggcgacggcgatgagcagcgccagctcctcggtctcgattttctcgctgagcggagcgtcgcgccgctcggcggccgagttgatatgctcctgcatgtatttgtcttctacgatcgagtgcgaaaagatgtcgaatacggcgttgcgggccatcgtgtagagataactccgcagcgagcgtgtgccgcccagttcgcggcgcttctcccagacgcgcaggaagatgttttgcgtgacgtcttccgcttcgccggggtttttaagcagccggaacacgaattccctgaccttgggagcataaaacaggtagagggaatcgaatgcggattggttccctttggacagagcggtcagcagttctttttctttttccggagtcatagtctcacacaaaattaaaaaaaaacggaataaaaaaatattatattccggaagaatgtgccgagccggtgaaaaacgacctttgcgggggcttcgttgcggcccgcacggtgtcctgccgccttctgcggcatgcaaaaaacttcttccgtccgcgtcgcatgggacgggacggaagaagcgtgaggaaattttccggggcgtgccggttccggcggttccgctgcggttatcggccggatggcttgtccgccgcgccggcggccctgcggtccatgacgaaactgatgacgaacgggatggagaggaagaccgccgtgccgacgaccaccagccacgtatacatggcgggactgccgacgggcagctgcgagggcgggaagaaggtgacgatgaacgagaagagcaccgcgaggaatccgatgccgccgaccagccacatgcccgcattgccgcccggtatgcggtagctgcgtgtcaggtcgggctgcgtgtagcgcaggcggatgcccgcggcgtacatcatcatatacatcagcagatagagtcccacggtcagggcgctcagcaggaagaacgccacgctcacgtcgttcatgacgatatagagcgacgacagcagggtgacgatgcagccttggatgatgagaatgttgatctgcacgccgttcttgttggtcttctgcaggaagcagggcagcacgccctcctgcgccgtccataacaggccgcggctggggcctgaaatccacgacatgactccggccagtgcgccgaacgctacgagcagtcccatgacgttcgtgagccaccccacatggtagtgttcgaagacgatctggaacgtggtgaacagtcccgactggaggttgatctggtcatagggcgtgatgatcgccacggccagcgcgcccagcgtgaaaagcccgaacgagatgagcgccgccagaaacatggcgcgcggaaactgcgtctgcggctttttgagttcgggggcgtgcacggcgtgcacctcgacgccggcgaacagcagcaggatgcccgcgaggaaggcgatgtcgctcatgcccgtaatgtgggggaacagccgcggatggacgtggtgcgcggcgtcgatattgacgacttggctgacggtgtccggaatatgctccagcgcgacggagttgccgccgatcatccagacgaccgccatgacgatcacgacgatgccgggcaacaccgtgccgatgaggaatcccttgctcgtgatgcccgatatggccgaggtgccgcgcagggtgacaagcgtggcgcaccagtacatggcgatggaaaacagcccgacgaaaagtccgttctgggcgaggtcgggcatgccgatcatgtaggcgatcgacgccgcggcgaagccgagtacggtgggataccagacgacgttctgtatccattgcaggaagatggccgtgaagcccatgtgtttgttgaaggcctctttgacccatgtgtagacgccgccgcctttcgaggcgaaggcgctgcccagctcggcgcctaccagcgccgccggaatcaggaacaggaaggtggcgaagaagatgtagaagaacatggtaagctcctcctgcgccatcatcggaagcccgcgcagactgatgacggccgccgcggtcatcagcgcgagctgcgttgtggtgatgtttctgttttttgccataatgtggaattgtggtttacacctgactgccactcagtttccgtgccgtaaccggacgggcggaatgtcgtttcgggcgggtgcgtgattcgtgcgggcgtttttttgcaggcgaaaacacacaaaaacagcagggaatctcacgattgcctgctgccttccggaggattgccctcctgaaactactaacccaaacttaaataaatgaagaaacctcactgcggttgctgttccgcagttgacagggtatattgcaaaacccgtgccggagcggcggaccggaagggcgcctatgcggttcgtgggggcgggtcgtgtggcgcctgcgggccgggacatgaattaaccgggctgcaaactgacagaactgcgaacgggatgggcacaaacgaggggcaggatgcccgcgaagacatcctgcccgtttccgtttccggcatggcccgaatgccgggccgtatcatcatcgtttgtcggtcatctccacgttgccttcgtaggtgccgctgaccttgtaccccttgtcggtggtgaagtcgagtacgaagcggtaaccgctgcccgatttggtgatcgttacggtaccggacgagacgaatccgtagaaggactggaaattgtcgttccgctcctcgcagtaggtgccgacgggaagcatcgtatccatgaattcggtctggtagcctgcggcgtaggaacccggcgcgcccgatgtggagacgctgtaggtcccttcctgcagctgcatttccgtcgaaacggcagtcgaaagatcgagcgacaccatatgtcctgcctgtccgaggtaatcggagccgtaggagatggtcggctcgacgtcgtaaagattcacgatgcagttgtcggccgtcgcggagtcgctgtaatatttgcccagcgcgcggatgaaggtgaggttcgttacgtccttgtcgagagtgggaaggtcgggaatctcgctgggtgtcttgttttcgatcgtcagcggaccctcgtagctggccgtgaactcctcgtcgtcggtcgtggtcagcgtcgcggtgatcgtataggtcgagccggccttcttgacggagatcgtacctgccttgaagtcggttcgggtgatattgcctttgccgtcgttgaccatgcagtaggttttcacggggtcgaacgtcgtcaggcccttgttggtggcgtacttgtagtcgcgggccggcagggtgatcgtcgtattgggattgcttaccgccatctggtagaggtcgatgctcatggcacggcctgcgccggtggtggcgtagacgcccccggcttcggtggtttcgccgtcggcgagcaccaagaggaattcaccgatgtagctgctctcggtagggtagtatccgcctgctgcctgccggtcgaacacgatcgggccttcgacggcttggtcggtggtcatctcgaccgtcttgacgtcggagtataccgttttgttcgatgcggcgacggcgacgatataggtcgtgccgggtttcagctcccggatctccgctgcatctgccgatacgggcaggtcggtgccgtcgcggagaatctcctcggccgaaggaatcgtcgggttgtcggttttctcgatgcagacgtatgcggctttctccgcatcggtgagtttgaaatggaacgagagggtcgtttcggtcggagtgcctgcgatgaccgtgacgacgggcgtccgggcgacggtctccatttcgagggtttcgacctccgaatagacgccggtgttggcgactgccgccgcgatgaggtagacggtggcgggtttcaggttctcgacgaggagctcacccgtctgggcgatggcggtgccgtcgcggagaatctcttcggctgtgggaacggtcgtcccttcggtcttttcgagacagacgtatgcggccgtttcggggtcggtcagggccgcggtgaacgaaagggtcgtcgaagtgggcgtgccgggcgtcagaacgacggccgggtgtacgtcgggggcggaggtggtgtgttcgatggtttcgaccttgccgttgaccttgccgttggaggcgactgccgagaggcggtaggtggtgctgggttcgaggtcgccgatcgtgatgagatccgatgcggttacggatttgccgtcggcgagaattttctcggccgagggaacggcttcggaggatttggtgcagacataggtgcacttgtccgcgtcgctcagggtgagcgtaaatttcagcgtgttggatgcggcgtcaccgacagccagcgtgacggacggagcaggcggattccccccccctcgtctttgtcgtcgcacgaggccagaagaccggagcatagcaccagcagcgcagtactccacgaaagaatcgatctaatcatagatgtgatttttgggattagtaattaataacagtttttgttcgggtgcagtcgggacctgcgggaagatccgttctgcggcaagtgacgggctaaaagtaaggtttcctgcagataaatccaaatatttttccgcttaagtcgccgcaggaccggataaaacgtcaagatgggcgggccggagcggaaacgggcgcaatatatgacaaaacagcagggaatctcacgattgcctgctgcctgcggaggattgccctcctaaaactactaacccaaacttaaataaatgaagaaacctcactgcggttgctgttccgcagttgattgtctgaatcgcaaagcccgtgccaaaaacaagtcccggtcgtggggaccgggactcgtctgccgtatggagtatccttccgtcttagcggaatacgcccgtgtaggtcgagggggcgagtgcgcgcagctcctccttgaccgtttcggccacgtcgagcgtctcgatgaatgcggcgatcgactcgtgggtgatgtgggcgttggtgcgggtcagggccttgagcgcctcgtagggcttggggtagccctcgcggcgcagaatggtctggatgccttcggccaccacggcccagttgttctccagatcgcggtcgagcgcttcgcggttgaggatcaccttgttgagtcccttcatcagcgatcgcagcgcaatggcggcgtgggccaccggaacgccgatgttgcgcagcacggtcgagtcggtgaggtcgcgctggaggcgcgagacggggagcttcgacgagaggtgttcgaagagggcgttggcgatgccgaagttgccctcggcgttctcgaagtcgatcggattgactttgtgcggcatggcgctcgatccgacctcgccggccttgatctgctgtttgaagtactccatcgaaatataggtccacatgtcgcggcagaggtcgatgaggatggtgtcgatgcgcttcatgttgtcgaagatcgcggccaagttgtcgtaatgttcgatctgcgtggtgtactgcgagcggcagagccccagcgtctcgccgacgaacctgttggcgaatgccacccagtcgtactgcgggtaggccgcacggtgtgcgttgaagttgccggtcgcgccgccgaacttggccggaacggcgatgtcgtgcagcatggccagctgcttttcgatgcgttcgacgaaaaccatgaactccttgcccagcgtcgtgggcgaagcgggctggccgtgcgtgcgcgccagcatcggcacctcgcgccactcgtcggcgaaagccgccagtttgtcgcgcacctcttcgacggcggggtagtagaaacccgccatcgcctccttcagcgagagcggaatggccgtgttgttgatgtcctgcgaggtaagcccgaagtgaacgaattccttgtaggcttccagtccgagcgtgtccattttttccttgatgatgtactcgatggctttgacgtcgtggttggtgaccgactcgatctgcttgacgcgctcggcgtcggcgggcgagaaatcgaggtatagggcgcgcagggcggcgaatttggtacggtcgatgccggccagctggggcaggggaatttcgcagagcgcgatgaagtattccacttcgacgcggatgcggtagcggatgagggcctgttccgaaaaataatcggcgagcgtttccgttgtattacggtagcggccgtctacgggcgaaatggctgtaagtttgttgagcatattgtgttgtgatttgttttccggcaccaaatttacgacaattaattgaaatccgcatatttttccctacctttgtagggttgtaaactttaaattgcaatgaattttctgaccgcaatcataaacgctctggtgggattcgtgcagcgcaatccgctgacggttttggtcattctcatcctcgccatcgccgctccggcgctgctgaagggcgtcgcactgttttttctgtatgtcgttatgagtattctgatattggccgtggcgctgatactggtgttccgctggcggatgaacaaggtccgccgccagatggaggagcagttcggcgaaggcttcgatccgcgcaatttcggcggacagggtttcggctcgcccttcgccggagagcctcgcaagggccgcgaaggcgaagtgaaggtgcgcaaaacctccggggcgcccgaaaaacgggtgtcgaaagacgtcggcgactacgtcgagttcgaagagacgaaagagccgaaacaagagtagcgtatgctgaagatattcgagctgataggccgctatttcatcctgatggggaaagtcttttcccgtccggagaaggccgccatctaccgccgccgcatcgtttacgaaatggagtcgctgggcatcgactcgatcggcctgaccgcgatcatctcggtattcatcggcgcggtcatcaccctgcagatgtgcatcaacctcgattcgcccttcatcccccgctcgctggtgggctacgccacgcgcgagacgatgatcctcgaattttcatcgacggtcgtggcgctgattctggccggcaaggtcgggtcgagcatcgcctcggagatcggcaccatgcgcatcaccgaacagatcgacgcgctggagatcatgggcgtcaattccgcgtcgtacctgatcctgccgaagatcgtcgccgcggtggttttcttcccctttctgaccatcctgagcatcgcgatcggcattatcggcggctgggcgatcgcctacctgaccggcatcatgatcccggccgactatatcgacggcctgctgatggatttcaagccctattcgatcgtctattcgctgatcaagaccgccgtcttcgcctatatcatcacctcgatttcggccttctacggctattacgccaagggcaattcgctcgaagtgggcgccgcctcgacgcgcgccgtggtggccagctccgtagtgatcatgatctttaaccttatactgacgcaagtcctgctcatatgatacgcgccgaacatatcaccaaatcgttcgacggtcgcgtggtgctcgacgatatttcgatcgaattcgagaccggacggaccaacctgatcatcggccgcagcggttcgggcaagaccgtgctgctgaagacgctggtgggactccacgaacccgattcgggcgacgtctggtacgacgacaccaacttcacgcagctggatttcagacagcggcgcgccatccgcaaggatatcggcatgatttttcagggcggggcgctgctggactcttcgaccgtcgaggagaacgtcaagctgccgctggacctcttcacctcgcagagcgagaaggagaagatggagcgtgtggatttctgccttcagcgtgtgcggctggaagaggccaaccacctctatccggccgaactgtcgggcggcatgatcaagcgcgtggccatcgcccgcgccatcgtgctcaatccgcgctacctcttctgcgacgaacccaattcgggactcgacccgcagacatcgatcgtcatcgacaacctgattcacgaaatcacgcgcgaatacaatatcaccaccatcatcaatacgcacgatatgaactcggtgatggaaatcggcgagaaaattgtatacatacacgaaggccgcaaatggtgggagggcaccaaagacgatatcctgcacgccgacaaccccgaactcaacgacttcgtcttcgcttcggcgatggccaaacgggccaagatggcggcgaagtaggcaggaatcggattcctaaaaaaatttaattttttacttgcgtaatatacataaagtatgtacttttgtgcagtgaaaaaataacgcattttttattaacaaataaatcataacattatgtcaaagatcaaagtaggtatcaacggtttcggtcgtatcggccgtctggtattccgtgctgcgtgcaacaatgcagacattgaggtggtaggtatcaacgacctcgttccggtagactacatggcttacatgctcaagtacgactcggtacacggccgtttcaacggtacgatcgactacaacgtggagaagggccagctcatcgtcaacggcaacgtcatccgcgtaaccgccgagaaggatcccgcaaacctgaagtggaacgaagtaggcgccgagtacatcgtcgagtctaccggtctgttcctcaccaaggagaaggctgaggcccacatcgcagccggtgccaaatacgtcgttatgtcggctccctcgaaggacgacaccccgatgttcgtatgcggcgtgaacaccgatacttacgcaggtcagcagatcgtttcgaacgcatcgtgcaccaccaactgcctcgctccgctggctaaggtcatcaacgacaacttcggtatcgtcgagggtctcatgaccaccgtacacgctaccaccgcaacgcagaagaccgtagacggtccctcgatgaaggactggcgcggcggccgtgctgccggcggcaacatcatcccctcgtcgaccggcgctgcaaaggccgtaggcaaggtgatccccgccctgaacggcaaactgaccggtatggcattccgcgttccgacgctcgacgtttcggtcgtagacctgacctgccgtctggagaagggcgcttcgtacgacgagatcaaggctgccatgaagaaggcttcggagaacgagttcaaaggcatcatcgagtacaccgaggacgacgtggtttcgaccgacttcacgggcgacgccaacacttcgatcttcgacgctaaggccggtatcgcgctgaacccgaacttcgtgaagctcgtggcttggtacgacaacgagtggggctactcgaacaaggtagtcatgctgatccagaagatggccgcttacaacaacaaatagtcgtaagccgacgcataaagcggagggattcgggcaaccggatccctctttttttgtcgtttattgttatttgtcctgacgatccacccgcatctcgaccgatgcgcccgaccattggttgataaggcgtttttcgctgcggagcactttgccgccgtatgcgatgcggagggtgatttcgaacggctgcgtgtcggcgatatcgttgcctgcgggcagcgtgtggggtacaatataaatatagagcagcaggtggtcgcacgcagcggtttcgagccgcaggctgcggtcgcccgccatgtccgcgggttttgccgtcaggttcgcgccgacgtccgcgacgtgcgattcggccgaggcgaatccgatgcgttcgtcgccggcgtcgaagcagccgcacatcagcgctgcgttgtaacgccaccagccgtcgtaacggcttgatatttcgatcgagaatccttcagttgctgccatacggtgcaaatatagcgatttttcgctcttcggcgaatttcgtgccgggaaaatcgctccgccccgccgcagacggtttgccggacgggcgtctggagcgcggggtgctaaaactgagcgatttctttgcaaatgtcttattttttcgtaactttgtgccctaaatgcgctcgtatgggggtaactaaaaggtatacgattgcttacaaagggctgaaacccggtttgcatgactttcgtttcgaggtcgacggctcgctgttcgaggagttcgaaagtccggagatcaaggacggagcgtgcgaagtgacggtcgccttggagcgcggcgaagcgatgcttacgctcgacgttacggtggacggaagcgtcgtcgtggagtgcgaccgctgtctggaagagtgccggattcccgtgcattatcagggacggctgctggtgaagttctccgacgaggtgcacgaatacgacggcgaggtgatgtggctgctgcccatggaagacgaaatcgacctgaagcagtacatttacgagagcatcgtgctgtcgctgccttaccagcgggtgcatcccgaaggggagtgcaatccggagatgctcgaacgcttccgcatcgtatccgactcggaactcgcggccgtcgaggcgcgggccggagcgcaggagcacgacggcggcgaatgggccaagctggccgcgctcaaggagcggatggaggcccaagagccgcaggaagaggaccgaacgccggaaaaatagcgccggcggcaataaggagaatcgataatacgttaaacttataatttatattgtaaaatggcacatcctaaacacaaagtctcgtcgacgcgacgcgataagagaagaacccactacaaggctgtcgttccgacggtagttacctgctcgaactgcggcgcagccacgctgtaccaccgtgtatgccctgagtgcggtttctatcgcggaaagctggcgatcgagaaaaaagctgctgaataaatcagacggcaagaagagtgcatccgcgaggctgctctctttttagtttacagaagctccctgtcttcgccgtgtgcggccggacggtccgtgatgcgggcctgccgacgggtacagagcgggatatgaagttaaaccaaatcgcacgattatgttaaagattggtgtagatgccatgggcggcgatttcgctcctgaggcggcggttcagggcgccgtattggcacttgaagcgatcgggccggacagccgcatcgtattgttcggcgacgaagcgaaaatcaaagccgtactcgaagccgagggctgctccgcggagcgcttcgacatcgttgcgaccacggaggtcatcgagatgggagaccatcccgccaaggcctttcaggccaaggccgattcgagcattacggtaggtttcggctatctggccaaaggcgccatcgacggttttgccagcgccggcagtacgggcgccatgatggtcggctcgatgtatgcggtaaaaccgatcgaaggggtcatccgtcccgcgatctcgtccatcgttcccacgattgcggggcgtcccgcgcttctgctggacgtggggctgaacgtggactgcaagcccgaagtgctggcgcagtacggactgataggttcgatctacgccgaagccgtgctcggaatcgggaaaccccgcgtcgccgtactcaacatcggcgaggaggagaccaagggcaacgcccagaccaaggcgacctacgaactgctgaaggaggacggacgcatcaatttcgtgggcaatgtcgaaggttcgtacatctttacgggccaagtcgccgacgtgatcgtctgcgacggtttcgtgggcaatacggtgctgaagatggccgaggggctttaccgcatcaacaagaagctgggcggcggcaatgcgttctgggacgcgatgaattacgaaaacgtgggcggtacgcccgtgctcggcgtcaatgcgcccgtaatcatcggccacggcatctcgtcggcccgcgcgatcaaaagcatgatcctttcgacggagcagtgcatcaaggcggaccttaccgtcaaactgcagcatgctttcaaaaattaatcacacaatttaggagagaaagttaatgggtaaaataacagcagcgataacgggtgtaggtgagtatctgccggattacatccttacgaatgaagagttgagcaccatggtcgatacgtccgacgaatggatcatgtcgcatatcggcgtcaagacgcgccatatcctcaagggtgagggcgtaggttcctcctacatgggcgcccgcgcggtcatcaaccttctggacaaagcgggggtggacccgatggagatcgatctggtgatttgcgctacggtgacccccgatatgtttttcccctcgacgggcaacctgatcgccgatcaggcgggatgcaagaacgcctttgcatacgacgtttcggcggcgtgcagcggcttccttttcgcccttacgacgggtgcgaaattcatcgagtcgggttcgtgcaagaaggtcgtggtcgtcggcgccgacaaaatgtcgtcgatcgtggactacaccgaccgttccacctgtccgatcttcggcgacggcgccgccgccgtactgctggaacccaatgaagagggatacggcgttctggacgagattctccgttcggacggttcgggcgagctgcagctctacatgaaggcgggcggttcgcgctatccggcttcggtcgagaccgtgcagaacaactggcatacgatcatgtgggacggacacgccgtgttcaaggccgccgtttcgaagatggccgacgtgtcggtcgagatcatggagcgcaacggacttacctccgcggatgtgcgttatctggtgccccatcaggctaacctgcgcatcatcgacgccacggcgcgccgcatgggactcgaacatgagaagtgcatgatcaacatcgaccgcaacggcaacacgaccgccgcgacgattccttcgtgtctttacgattacgagaaggagctgcgcaagggcgacaacctgattctgtcggctttcggcggcggttatacgtggggcgcgatctatgtgaagtgggcttacgacggttcgaaagcctgccagatcgattcttcggaaaaatagttttgcggtgcgggcggatgcccgtcggagaaatagactacagagagacggaaaccagcgatggtttccgtctcttttctgcatattccggggtgccctgcgtttcgcggaaccgggaattttcgtatatttggctttcgcggaacgtgtgcggtttcagtttcttttcggattcgcgcattagttttgcatctggaaaaagtgcggttatgaagattctgattgtcgaagacgaaccctccctgcgggagatcatggtgcagaccctgcgccgggaacagtatgtggtcgagcaggctgccgattatgcatcggcgctcgacaagatcgccggatacgattacgactgtattctgctggacatcatgctgcccgacgggagcggcctgcagctgctcgaagaactgaagcggcagcgcaggcaggcgggaatcatcatcatttcggcccgcgattcgctcgacgacaagatcgagggactcgaactgggggccgacgactacctgcccaaacccttccatctcgcggaactgagcgcccggatccggagcgtcgtgcgccgtcaccagcgcggcggtcaggagagtctcgatgccggaaacgtgcggctgtttcctgacagccgccgggtggaaatcgcgggccgggaggtcgaactgctgcgcaaggagtacgatatactctattatttcatgagccgcccgaaccatatgatcgacaagacgacgctggccgaagccgtgtggggcgaccacatcgaccaagccgacaatttcgatttcgtctacgcccagatgaaaaatctgcgccgtcggctgcacgacgcgcaggcggacatcgaaatccgcgccgtttacggcttcggctataaactcgttacgccatgaaactcgtttaccgcatcctgctccatatgtcttgggcgctctcgctgctgctggcggcgtgggcggtgcttttctatttcacgatgatcgacgagatcaacgacgaagtcgacgattcgctcgaaaactatgccgaggtgcttgtgaaacgcaatcttgcgggccgtgagcttcctgcggcgttttcgggcagcaacaacggctatttcctgcacgacgtctcggccgaatacgccgccgcgcggccccatatggtttacagcgacgaggagattttcattccggagaaggacgaggaggagccggcccgcgtgctgcggatgatcttccgcgaccgggagggaagctataaggagcttaccgtgatgacgccgaccatcgagaaggacgatttgcaggaggcgattctctggtggatcgtctatctgtatcttttcctgctgctgaccattctgctgatcaacatactggtgctccaccgcaccctgcggcccctgtatgccctgctgaggtggctcgacggctacagggtaggcggaaagaacgctccgctggccaacgatacgaagatcgccgaattccggcggctgaacgaggcggcgatccgcaatgccgagcgggccgaagtgctgttcgaccgccagaagcagttcatcggcaatgcgtcgcacgaaatgcagacgccgctggcggtttgccgcaaccggctggagatgctcgtaggcgacggctcggcgctgagcgaggagcagttgggcgagatcatgaaggtgcagcggacgctcgattatctggtgcggctcaaccgttcgctgctgttgctgtcgaagatcgagaacggccagttccccgaaacggagcaggtcgatttcaatgcgctggtcgggcgtacggccgaagatatgtccgaaatttacgccgggcggggcatgcgcctctccctgcgcgaagagggccggcttgcggcccgcatgaattcgtcgctgggggccagtctggtcacgaacctgctgaaaaacgcctatgttcacggagatgcgggcggcgaagtgacggtgaccgtttccggggatcgtctgagcgtctgcaacagcggtgcgggcggtgcgctcgatgcggaccatatcttcgaacgcttttatcagggggccaaaaaggagggttcgacgggactgggcctttcgatcgtcgatgccgtgtgccgtctttacggtttgcggaccgaatatgcgtatataaataggtgccactgtttcacggtgcattttcccaaataaaattcaaaaaaaagcgtatcggggcgtttatttcaaattcgtttcagctttaggtcgcaactttgcattgtaaacgataaacaatgttgaaccaaaatagcaaaacgattatgaaaaagctcatgatgattctcgcaggcgcagccctgctcgcaacttccgctcccgccttcgcaggcaacgaccgtccgatcgccgtcggcgaacttccggccgtgtcgcaggagtttatcaaaacccacttcgcaggcgtcgaagtctccttctcgaaggtggacgaggagcttttcgacaaggattacaaggtcgtattcgtaaacggcgccaaagtcgaattcgccaagaacggcgagtggaaggacgtcgaatgcaaatacggcgaggtgccggcggcaatcgttccgcagcagatccgcgattatgtgaccaagaattaccccaaaaacaagatcgtcgctatcgaccgcgaccgccgcgattacgaggtggagctggacaacggactcgacctgaagttcgacctcaagttccgtctgatcgatatcgacaattagtggacagccccttatgcgaggtattatgaaaaagttcgcagtgttgatgctggccctcgcgtcgctgggtgcgatgacgggctgcgatgacgacgacgattcggtgaaggttccggccgcagtgcaggatacgttcggacggatgttccccggtgcgggacatgtcgaatgggcggggaagcagggctatctggtcgccgaattccgtgaaggcggaaccgacatgcaggcgtggttcgacgccgcgggcaaatggtacatgaccgaagaggacgtaccttacgccctgctgccgcaggcggtgcgcaccgctttcgaaagcggcgagtacgccgcatggcatgtggacgatgcggacaagctgacgcgtgaaggtttggagacggtctatgtgctcgaagtcgagcagcgcgacgctgagtatgagcttgtctattcggaagacggcgtgctgctgcgcgccgtgcccgatgcggacggcgaccgcgaccacggggatatgctcccgcaggagcttccgcaggctgtgaaggattttatcggacggaaatatcccggcgcccgcatcgtcgatgcggagcgtgagaaaggcggtctcgaagtcgaaattatcgacggccgtacgccgcgcgaggtttatttcggcgccggcgacgcttggctccggaccaaaaccgaagtgcgcaggagcgaggttcccgcagcggtgatgcaggcgtttcagacatcgcagtacgcgggctgggagatcgacgacatagaccattacgacagccccgaacgccagtggtatctcttcgaactggaggacccgcagtcggaccgcgaagcggaactgcgcattcaggccgacggcacgattttctgacggcataccccggcagggacggaatcttcacggcgaaggttccgtcttttttgttataaccggggactattgtgttataaaataatatgatgggatttccgcacaaatcggcgaaaactattgtatatttgtatcaggaaagaataacacaaacttaaaacaatacagctatgttaagcaagaaattacatgacgctctgaacgagcagatcaatgccgagctttggtcggcctatctctatctttcgatgtcgatggatgccgaggccaaggggctgaagggtgtcgccaactggttcttcgtacagtttcaggaggagcaggaccacgcccgcatcctgatgaactacatcaattcgcgcgacgccaaagtcgagctgaagccgatcgccgaggtgcgcaccgagtgggcttcgccgctggacatgttcaaggatacgctggagcatgagaaggtggtgacttcgatgatcaacaaccttgcgtcgatcgctgccggagacaaggatttcgcttcggccaacatgctcgtatggttcgtggacgagcaggtcgaggaggaggagtcggcccgcgacatgatcaccgcatgcgaggccgtcgagggcaacaagttcgggctttatacgctcgacaaggagctggctgcgcgtgtataccagcaggcttcgccgctggccgcgaacaacgcctgaccgcatcacatgccgtagtattgagcaagccgctccgggaaaccggggcggctatcgttttaccttgtagtctattcccgccttgcgggcctgcgcgtgctggaaccggcggcggatgcggtacagccggccgtctttgacgagccgtgcccccgtctggtggtagcagaaggggatatccgcatcgagacactgccggcggatcgaaagcacccagtcgaagtcgcacggacgagcgtcgctgcccgattcgccgcccgcggagacctcctcgatctcggacgtgaggtattgcgcgatgtcgagcggtccgagcagcggtgcgcagacgatcagcttgtggcgcaggggcgctcccagcaacagcggaagccggcggtcggccgccgcctgattctcgactgtgcagcccacgatcagattctcgtagccgtcgccccagtcgggcggcaggacctgcatcaggcggtctatgcgtttggtgatgaagaagaagcgcaggtcgctgcgcgtgcggatcatctcccacgcctcggcgcgccatgtgtcggcctcttcgaccagaaaatccgacgtgaagcaggtgtagaccatctctccggcaggaaccttgaaccgtccgtcgcggctgcggcgcacgggcagattgaacgccgaggttttacgcacctcgctgctgtccttgtcgtgccgttcgtcctgccggtatacgtagcagtggcggcagccttcgctgatcttgcggcatccgtgccacgggttccatccgaccgacatgatccgttatctcagctccatgcgcaggcgcaccatatggcggcactctacgccgttttcgaaaatcggagcggggtagtgcttccggaagtagtcttcgtcgatgccgcagcggacgaaaccgcaccgttcgtacagggcgatctgtcccgcgccgatgtctcccgtgccgatttcgagcagtcggaaccccgcatcgcgggccgttcgtacggcatgctgcaataacgccgtggcgatgccgcggcgctggtattcgggcgcgacggcgatgttgaccacttcggccgtaaagggccgcgtatgcagcaatacgtactggccgaggatctgcccgctccggcatgcggcataggtcgtgccgcggccggcatagtcggccacggactcttccgattcgtcggccagtaacagcaggctgcggtccggagtgtcggtttttacgatttcgaattccatgcgttgaagatttatagaagcgatgcagcgccctgaaaagtcgccagcacgacgatatagcggagtgttttgccggcgagcatcgagccgcccgtgagccagacgttgctgcgcatcaggccgagtacgatggcgatggcctcgccgatggtgggcaggaacgagaagaaggccatcatcgccccgcgccctgcgagaaaccggcgggccttgtccagctgtttctcctttacgcccagccgggtgatccattcgctcttgccgagcgtgccgatccaataacagctcatgccgcccagcgtattgcccgatgccgcggagacgacgcacagcacggggtccagccccatgtgcaccagtacgagcatcacggcttcggaactgaacggcacgatgctgccggcgatcagcgccgagaagaaaaggccccagtagccccagtcgatcagaaattgcgtgagtgtctccatgcgtcgtgtccggttttgtgcaagagtagtccgcctgcgggacaaagatagtttttttgcccgaaaggggttgcaggtgccggatgaaaagcgctaattttgtctgaaacgaattctcactgcttatgttgaaaaccggactttgtatcgtattgttcgctttggccgccgggtgcgcgccgacgcagaaaccccttaccgactatgtgaatcccctgttgggaaccgcgacgctctgggacagcgtcgatctgggcttcaagcccaccaaacgtacgtggggagccgaggtcttccccggctcgtcgctccctaacgccatggtgcaggtcagccccgtcaccaaattccacagcggggcgggctaccagtatgaggatagcgtgatttacggctttacccacaccaacaaggggcattggaacctctgccatattccgctgctgcccgtcacgggcacgccgcttcccggagactactgttcgccctacagccatgcgcgcgaatcggccgctccgggttattaccgggttttcctcgaccgctacggcgtcgatgccgagctgacctcgacgctgcgctgcgcgtttcataaatacacctatcccgccggggcgcaggcggctctgctggccgacctgcagcgttcgaacgaacatgttcgcgcatgggatatccgtaaggagggcgacaacgccttcgccggatggcagcagacgggcgagaagatgtatttctatgcagtggccgaccgtcccgtgaccgggatcgagccggttgccgagggcgatcgtgaaatccgcatcgtccgcttcggcgacggcgacggtccggtcgaactgcggatcgggttctcgttcgtgagcgaggagaacgcccggaagaatctcgaagccgagatgctcggcaggagtttcgccgacgtgcgctccgaagcgaccgctgtatggaacgatctgctggggcggatccgtgtcgaaggaggtacggagcgtgaaaaaggattgttctattcatgcctttaccgctcgttcctctggcccgcgctgcgcagcgacgtgaacggcgagtttaccgatgcggacggcgaggtcgtcaataccgggtttcgttattacaccgggccttcgtattgggacgattaccgcaacaaactgattctgctcggcctgctggctcccgatgtcgcggccgacgtcatcagctcggacaccgaccggggcgaaaaacggggcggattcatgccgaccttcttccacggcgaccacgcttcggcgttcgtggccggagtgtacctgcgcggcatccgcggtttcgacgtgcggcgcgcctacgagctggtcctgcgcaacgccaccgtgcaggggccgagccgcccgtggctcgacgagtatgtcgcccgcggctatatccccgaaatggatgtcgagaatcccgtgacgcagaccgtatgcaaggccgcggttacgaaaacgctcgaatacgcctacgacgactatgccgtggcactgctggccgatgcgctgggagatggggcgaaccgggatatgctgatgaagcgcacgtcaaattacaagaacctcttcgacccctcgacgggcctgatgcgcggacggctcgacgacggctcgtggatcacgcccttcgacgatcagtatccctattacgaatacatgtaccgtgaagccaacgcttggcagcaggcgttcttcgcgccgcacgacaccgaggggctgatcggtctctatcccagccgcgaggcgttcggggcgcagttggacaagctcttctcgattccgtggaaaggctacgaggtggacaacctttcgggttttatcgggcagtactgccacggcaaccagcccgaccacggcttcccctacttgtattacttcatcggccgtcaggagcgttcgcaggagctgctcgaccacattctggaccgattctacggcatgggacccgaaggactggcgttgtcgggcatggacgatgccggcgagatgtcgtcgtggtatgtcttcaacgccatcgggctttacacctattccccggccgatcccgaatatatcgtgaccgtgccgttgttcgacaaggtggcggtaacgctgggcgacggttcccgctggtcgatccgccgcgagggaacgggccgccggattacgggcatcacgtgcggcggaaatccggtcgggggttggttcgtgtcccacgatgcgctgggcaaaggcgaactggtgattgcgacctcggaaaaatagacggttgcggacgccctgcggatgatacgatgcgcgggcatgctcagtaaccggccgggattgtccggacgacagcggcggcggaatcggtttccgccgccgttttttgtggcggaaacgctcgatgcggttcgtccgttcgggatatgcggaccggaatccggaccggggccggtcacggaaagcgaaggccggggcgttcgtgctccggccttcgctcgttccggtgttccgggcggcattactcctcggcccagctgcggatgacctgactctgtacgtttacgccgtatgtagcggccttggcgaggatgcgccgggccagagccgcctttttgttgtcgggcgcatagcggaagtaggcttcggcggcccgtacgtgctcggcgtctacgagcgggaattcgcgcgtttcgggaatcccgaatgccgagtcgggcagttcgtgccgctcttcggcggtaagccggtccgcagtcttgtgttttgtcgctgtcgtcattgctttcccttgtttggtgatccgtttcgggaagatgcaatttttcggccagcgcgtccgcttgtcttctgaattgcggccggactatccgattagggtggcgacgatgcggcggcccgaagcgcggttgcggaattcgcagaggtagatgccctgccatgtgccgaggttgagccggccctgtgtgacgggtattgtcagctcgacgcccgtgagcgtcgatttggcatgcgccggcatgtcgtcgtcgccttcgagcgtgtggacgtagtaggattcgcgctcgcggaccagcctgtcgaagatggccgagaggtctgtgcggacgtcgggatcggcgttttcgttgatcgaaagacctgcggaggtgtgtttgatgaagagatgcaccagcccggcgtcgggcagcggcggcaggttggccgcgatttcgtccgtgacgaggtgaaacccgcgggtgcgggggcatagtgtgaattcggtctgctggatcatggcgatgttgtaaattgctgcggtaaagatagcaaaaatcggagcatgctccctttgccgttgcacgctccggggcatatcgtgtgcggatgtccgaaattgtgtggcggagtgttggaaattccggcatttattgtgatattagagcataaattcccaagattatgtatgcaatactgagatttctgtttccggacaaaccctataccgccggcaattcgtggctgctgctcgcggcccgcattattttcggaggactgctgatgtcgcacggcatcgccaagtggcagaacttcgatgcgctttccgcctcgtttcccgatccgctgggtgtcggcggcggtgtttcgcttgcgctggcgatcttcggtgaagtcatctgttctgccgggtttatcgcggggttgttctaccggctggctcttatcccgatgattttcacgatgtgcgtggctttcttcgccgtacacggcggcgatccgttcgcggcgcgcgaactggcgctggcctatctgtcggtttacgtgctgatgtacgccgcaggtcccggtctctatgcggccgatacgctgatcgctcggcatcttccgaagccgcggcggtagtcgcaccgactcccttatccgaattccgccccgataccctctcttccggaagaggcgatggatgtgtgtcgcattttcgcaggcagaatgcttaagacacgttcggtagatttcttgtccattcgataaagcgacgagaccgacaccttctgatcggatgtcggtcccggtttgtttttgattatttaccgatgcagaaaatgaaatcagttaatatttagactattaatcctttttgggtacaaatgaggtacaaagtagtcaattctagatctgatttccattttactaaatgcgtttcaaaatatcatcaattttaaccaattgtttccttacatcataatcccatcctctctcttgaatttctttctcaagccataatttagcttgattcaaatatgaaacagctctatcatttccgtatttattataataccttacggcttgatctgcatatgtttttgcatgaaacgtggttcgtagatcagaattaatacattgactaagaatatccatacttgcatctagctgtctttccgcatcagtgctatctacattatagttagcgtcaaataaaattatcgcatgagagttacggattgagaagtgtttattgtttgtcattgttatggctctatcaatccaagaaaaagcatcatgatacttctttttcatagataaatataacgcaccttgttgcaagacatatgggtttttaaagtcatacaaaaaggctctctcataaaattccttgccttctttccagtctggaaatgcttttgaaacaatgcttttatcaaaagcatgcttcttaaaggtgttataattatatatttgcaccgttggtactctgtcgattaccttattcattacctgttttaagacatctctgggagcactttttattattgattctgctataaaataagatcggggataatagaaatccatatcttgatccaacaattcattactataataatctttcaataggtcatcaagatcatttctcatctcaagtacctctctataattatatagttgattgggatcactaaaataactacatgccacctcaaaagacaatggaacacgagaactatgcatatagccgcaaagcactaaaaactcagctaactcgtgatgttctcgctccaattttttaagaactccatcataccggcttgcaacattttggccttttatatttcttataacgaattcaaagatagaatcatcttcatattgattcctttgttcctttttgatcgactttcctcgaatcgacggaggcaaagaatcaaatatattttgtgtatcggattctgttaattgcgttacgtttattatttcatacttacttgtcgggaatttgtgatttaccatattaagattgtggcttctatctacccccacaagtttcgcattttttaattctgccaactttaggaatgcatttatatcatccgtgaaattctcgataaaaataagagctactttatctccgattaatttgctgtaatattcagcacttgataatgttaggttgttaaatattaacttcaccccgttatatttcacattgtatgctatttgcatcatcaatgtggtttttcctgtaaccggagctccagttattataatgtgcttgtcgggaacaaatatagagttgtgaatcgtattgtaatgagatgttttataaatattattattaatgacatctccccatgttggtgcttgtcctttaaagaattcgtctataggtcttactacttgaccttttatgctcgttggaattaagtttccttttaacaaggagatcaattcgtcactttttttcttggagtttatggctccctgatctaaagaaacattctctatatactctaagaactctttggtattagctattattatgctaaaacccaaagatttatagtattctctgtcatcctcgtcatcttcaatcaataatatccatttttctttttgggcattattaaatgttttttgagatgttaaggcctgaattgtagaactatcattaagcccatatccaacaaagattgtagggtatttctccaccgcatgactcagaaaggaccatattctactagcatcattatatatatttgccaaagaaacaacatcaaaaacaaaatttggctcagcatcttcaacacttccatgtaatggaagatatggtatggctttgctgtcagtaggtactccattttgtgcctgattatgtaaatatctttgagggttggcagaaactatttttgagataagattgtcaatatttgtagtataaacacccgtaagattcagcttatttatagcataataatattttgggaattctgcaaccgtgaatttttcaacaagaaacttatagaaattcgcacggtttgtcttctccaacaatgttgaaatctttggcaaattatcacttgcctttttgccaaatttttcacataattctaaagctaagttttttcctaatggcaatttatctccctttttattttttgcatcaatggaaaaaccagctcctacaaataaattcacccctgatctaaaagcttctttcagagaatgttcattttcaatttttatagttcccatatactatagtctgttttctacaaaaataataaatataaaggataattcgtaacagttgatggattttacgtagaatatttgactatccttgattgtatcaaacaacaccatcgctgctgaattacgcaggcataatatattcgtacaatctaatccttatgagaatgaaataaccttcgtatctttgtttcgaagctgtggctcaacctgaattcagaaaccagagtaatttagaaaagataacacttcagcatacgccattatttgattttattctctgccatctataatcttcttaaatttacttcggttaatacctcctgccgggttcgatatttccagaatagggttttgcgatgtgatgatattggaggctattagagtgtcaaccacaatattctgaaacatgttttttacccgtgcatagcggaaaaatactctgatgtcgctcgatgccttcggaacgagttcctttattttgcagtcgaagaatgtcggcagggtttcctgaatcagtagacggtattcgcgtttggtgataccatgaggattcagtttggatttccggcggtaattaatggtcgtatcctccgtgttgagggcgaatggggagatgtcgataatcagcaggccgatttggttgcaacggtcgataaattctgccttgtcgcggattttcgtgcctaagacatattccagatcgctcttttgaaagaactgggtgaatggtgtagcaggattgtaaatgtaacttttggacttgccccataacggagcttcggcaatcatcagatagttaacctcgtctattttgtagaggttgtcgaaccagattcgattgatctcgtcgaatgccgattcgaggtaggtgttgtcgcgttcaaaacaatcggtcaagtcgtgccgggcatagaactcgcgtagaatctgcccgtttttgtcgtactccataggtcagtctgtttctccgaccctgctataaaaatgcgtgggtcattagatgtctgcacagaggtacgaccaagcacccgaagcccaacaagtaatgcccacgcaaaacgtaggcatttcacttattgttagcaggcttctaaaatttggtcgttttctgtgcctataacaatagcaaaacgctattcaatatgttttcgacctcaaagataggaaatattccgggatgttgaaagtgtgtggatcatcttcgatcctgtcgtgaatttacgcgcggagagcacacgcctgaaatgcggcgaagaataggcaatgaaaaaccgaggttattaaacctcggttatcattggggggggcagattgtgcgcgtaaagggtgttttcattcaatctgccgcacctaatcttttatgccatataaatccatatggaatggccccgaattgaaataagggtggttatatgcgatcctgtatttatttggaatacagccttatttcccgtttgtgagatggaaaaatgttccgatgtgataagagtagccgtcctttttcagggccgcatcgaactgccggtcggccttatccggattgtagtccgggtaattttggctgaccatatggtatagcgtcctcccactctctccgaactcgctgattagggcgcaggcgatttcgaaccagttttcataaaccgctgtggggtctgttccatttctgatgaggtctgcaatccgcgatgcgattttccgagcgttcgggattttttctttcggtgtagaaatgcggggcttattatggtcggctgccgtgtatatggtgcggacggttgctgttcgttcgtaagtggcggcggaaggattgatgtaggccgtatcgtcgtaggaataaatccgcaggcgagttacatctttgccgctcttgtctatcgttatgccgcatcgggcgaaatcctgtcggagagcctcgaaatgctccttatgcttctccggagaggctatagggataatgacgaaatagccttttccacctatggagtgtccgcagtaggccacatagggaatgatgctgatcagttcgttcagacggtcgaactccgcgacatccggattgtccttttcgtcgatgtcaatgcagatcagaccgctgtgggcgatcaactccgcactgttccgcttgctgaatgttccgcttaccgtaacggcagggagactcgtttttaaacggtttttgtcctcgtcaccagcggcccgatacctgtctacggttgttttgtatttcgcacggaacgtggatccggataaaaaatcgcacaggaaaatttcgcggacgggcattccgctggctttgcagttctgaaataaactaacttttacatccaatctgtttttcataattgtctgctgtttttatggttagggggacagccacaaggggcggtttctcctgcataaaattgtggtatgtgtataagcgcctatataggcgcatacacaacacaatgcacaatcaaatcgaatcctctttttgtgtgagcgtgatgatttgtttttcgtcgat

SEQ ID NO: 12043 - DNA, 10116 bp, Unknown
  gut microbiota DNA sequence
acaagaacgttaccagagcataaccgcttcgagctgcctgagggctgaaaccggagccggaaaccgggtggaaagtgcataaaaaatgtgcggcatcgttagatgccgcacatggcgccagaggagagcgatcccgcctgcgatgttctataaaagccggatcggaaccgtccgggaactcttcatcacagccgctccgtttttgacctcgtcgggaatcgcggcgcgcacataaacgcccgtctccgcgacgcccgtggcgctggtcagcgtcagcgtattgcccgactcgtcgaaagcgatgtcgtaagtgctgccgaacggcttgccgtcgctgtatacgccgccgagcacgtcgtttttgacctcgtattttcccgaatacttctggtagcccacctgctcgatccgttggtatatttcgaacgaacggtccgcgccgaaggagacataggcatcgaaatcccgcggagcttcgccgttccacgttttgagctgccattcgcctgcaagctgttttaccagcggcggcaccttctccttgtccgacgatccgcagccggcgaacagacacaagcccagtgcggccagtacgatatagatagtctttctcataatcttcatgcgtttatattacaaccaacctccgttttcggtctgtaccgcgcgggcgatgacggcgaactccttggcgatctccatgccgcccatcgatgtccccgtgccgagaccgctgcctccggcaaccgccctgaccgttattcgggccacgcccggcttggtgcagtgcagcctcagtttcccggacacgaaggtcggctccgccgaaataccgagcttggtcctgtcagcctgcgagatctcgacgccgagataggtcaggttcgccgaagccttgccgaagtacttgtcgagcgaaagctgctgctgtacgccgactttcgctttcaggcagggtgtgccctcgatctgcatgagcagttggtaggcgtcgatcgctcccgtacccatctgcttgcggtagttgcgcagctgcatggtggtcagggattgtttggtgccgtcgaggtaggtgtcgatgtcgttcaccgaagtcagaagcatcgatttgaattcggccaccgtatattgcttccctttggccagcgcgtaggaaagccccagcgcggcgacgcccgatacgtgcgggcaagccatcgaggtgccctgcatatagccgtaatccgactggtaaagctcggacggaagcgtcgaaagcacctgcgcggcgctgcttcccgaaggcgagatataggcgtcgccgcccggagccgcgacgttgcagcccggaccgtagttcgtgtagtaggccggcagatagtcgggcgaaaaggcggtgaccgaaatgtaatcgcggtaagcgcccggataaccggacatggccttggcgtcgttgcccgcagcgaaaatcacaagcccgccgtcgagaacggcgttgtttttcgtcgcgatgaagtagtcgatcgcctgcttttcgatccgcgccccgctggcgtaggcgttgtcggtcgtgactgctccggccggatacccccacgaacactggagaatcgacgccccgttgtcggcggcgtatttgatcgcttcggcggaaacggcggccgaaccgccctcgccgcccgaaaatatctggcacgacatgagtttcacgccgtcgttcctgcccgtgcctcccgcgatgcccgacacgccgacgccgttgttgctgacggcggctaccgtacctgcgacgtgggtgccgtggcccgaatcgccgatgttcttgcctttgtcgtcataagcttcgacgtcccatgtcagcaggctcgtgcccagcgcgaagttgtagccgtaaacgtcgtcggcatagccgttgccgtcgtcgtcgcggcccgtcgcaccgctctgctcggccttgttgatccacatgttggccgccagatcgggatgcgagtacttgatgccctgatcgacgatcgccacggtcagcgacggatcgcccgcggcgagtttccacgcctcctccacgttgatatccgctccggcgcgcgtcgtttcggcaaatattctgtcgccgttgttgctgtagtgccactggtccttgtagccgggatcgttgaaacctccggcggcggcgcgcgtcgccgccgaaccgcccctgtagggacaggccctgttgtccgaagccagctgcagtttggtgttgaactgcacgaagctcacctccgaaacggcggcgagccgccgtgccgctgcgtccagatcgacttcctcgccgaacgttacgatataccatttatgcagtcccgccgcgcgggtgcgctcttcggcggccggattgcagggaaatacgcggcgcagcgaagtgacgcccagttgtgtaaagatgtcgtccacgggcgctatcccggagcgcgtcgccgccgtacgcgtaatcgccgcagcagcggcggtctgttcgacgtccccgacggcatcgccgtcgaaatagatcagcagttcgccccgcgcggcattcgcgggagcattgacgatcttgcgcatggcggccgccggagcctccttgccgccgctctcttccatcgggtccgaggcacagcccgcaaggaacagcagcgcgagcagtaaaattttcttgtcagtcatggtaggtgaatttaaaaagggaaccggcctcgcgggccggctccccggtgatagtcgtactgtccgaacgacagttttttattcggttattttcgcgccggtcctgcgggtgaagtccgcactccgggcggcgattccctgacggaattccaccttggccttggcggcgcccaaagcgggcatgccgacgatttcgcactcacggccgcggtcggcaggcattctgttttcgccgacaattactttcgcaagctccggcccgcggagttccacgtaattgccgggctgcacggagagcgcttttaccacggaagccatatcggcggccggatacaaatccgggtctgcgagcagcagccattcatggaagacgatgcctccttcgccgccggagaatttgttcgtcgcaggatcgtagcccgcatagattccgaaccacatgcccgtgaacgtcagattgttcgacgcctgaagctggggattgggcacgaaagccaccagtccgtcggccaccggcgcgcccagaagcaggccgcgtccgctgtaaactccgtcgtcaccctcggccgtgtaagccacgttcacgaagtaatccgttccctgaagcgtcacgttgccgatcagctgcggagcgagtacgtagagaaggccgccgctccatgccatatactgcgattcgccggcattgaacgcctgaggagcgcccgtaagtccggacaccttcacatagtcgctgaatacgttgtcgaaatccgcatatccggaagtcgttcctccgtcttcgacgactacctgtccgaagtactgacgggaggtgttgccggtcttgtcataggcatcgaccgcataataatcccacgttccgcagtagcccgccttggtcaggccgttttcgacatcgtcgtacgtatagtgtatctgcagcggatccggtttgcctgccgtagtctgttgcacgctgtacagtttgccgtaatagccgttgtaagcccacaccagcagcacgtaatccgtaccggcgttcaagcctttatgaagcagcgagagacccgtgtcgttgatcttgtcaatttcttcagccgtaattgccttgccggacgttttggctatttcaatcaggtcctcgctgcttttaccggtcaggtcggcactcttgaagagtcccatgtagcccgattcgatattttcaccgaatataatggagcggatagagttttcgggagtgtgtccctgcgcttcgaactcccacgtaagctccgtacggacgctcagcacgacgggtttgtcgtcgccggccttgacgtagccgaatgacaggaattcgtagccctgaagctcgcccgcctcatcgtaaatgttggcaacgacggtgtatttgccggtctcttcgaattgggccacgatggttccgtccgccgtgatctccttcgattcgaccgttcccgcgtcgatgcccgccgaattcgccttggcgatggcgtcgccgaagactccttcgaagaaggcgtatttcaccttggcgacgtcggcgcccagtttggctgcgatctcgaccttgccgtcggccggttcgctgtcggtcagggcgagcgagtagtcgtactcctcggctcccggcagcatcagacgctgcatgccgccggcgttgccgacataccagccgtcgtcgccgaacatcaacagtacgcttttggccgggaatgtgatgactccgttcacgttggtgccgtacccgctgccgttgaatccgttttccggcacctgcgaggcaaagctgacgataccgtcgctgctgttgaggaacacgcccgtagactgttcgggcagccagaccttatccggattcgtcgcgtcgatataggtaatgacgtccgaacggttgcccgacacttgggacggagacatgttcagcagcgaagccagatactccgccgagtagacgttgctgatgcggtagtagccggggttgtcgtcgcgttcgtagatctccacctcgccttcgccgtaacggttgggaattccgtaggcggaactgagaatgtcgtcgcgccatttgcccttggtctcgcctttcggaccggtcacgaggttccatttcacgcgggtgacggagaagcttacgcccgaagccttttcaccgtagatgaaggcgtatttcttgtcttcgatctggatgttgcaggaataggtcgtaccgatttcggcgtcgggaaaagagacctgaaaggtcgtttccgtcgccccgtcgtcgaacgagatttccgaagcggagaagatcgcgtcctcgctgcccgtaacggtcacgggaaccgtgatggcgtcggcgtcgttggtacgcatggctgtgaaggtcagtaccgtcggatcggccggatcgagttcgaggtccgcggcgttgtcctgcgaggggaagtaaaccccgtagcagccgtcggcctcggattcgccgcgggtgtaggtcggatcgtcggaacaccctgcgaacacgaaagtcgcaataagcgcgtataagaaatatttgattgctttcatatgtttttcggttttaaatcatccatgaaaacttacgttactgcacccacggatcgatgattcccacgggattggggttgttctgcgattcgagcgcggtgttctgctgggtctccgtttcgggaatacagaagttccaccacggtgcgcggccgtcggtcgagaagcggcagtccgaaggtacgttcgtgccgacgtagccggttttcaggctgtaattcagacgcttgaagtcgtagaatacgacgccttcgccccatagttcgatacgcttgttccagataatctcctccacgacgtcggcagacgacacggccgaggtgctgaattccgggtcgcgcttggccatgaaggttttgagcagctggagacctgcggaggcgtcggcgtgcgccgtagcctcggcttcgatcaggtacatctcctcgacgcgcatcatcggaatatcggtaacgttgccgacggaataggtcgccgtctcgccttcggcgggatggaatttcaggttcgcataggccgggaggttggcgaactgcgccgccgtcaggttggtaatgtcgctgtagtcggcatatttggcgtcaggccccacgaacgcgcgcttgcgccagtcggtgtcggatatttcgttgtagaaattgctggtaacgccttcgaaaacgtatttgccgccatacccccacgtagcctcgctcgaacgccatgccgcgaaattcacgaggttggcgatgccttcggtagactgcgggaggtaccacatccacgaattgttggctttgttgaagcccgttttggggttcagccactccgtttcggtcatgatcgtgcatttcgaggcgtcgatggccttgcgggcatacgtcgcggcatcggcatacttcgacgaatcgaagccgcccagccagaggtaagcacgcgccttgatgccgtagatcacggccagactcggattggtcttcgacgaagaggtgtagttggccagcagcgcctcggcgtcgtcgaggtccctgaggatgaattcgaacatcgcctcgcgcgtcacgcgcggattgttgcgggccatatcctcggtggtgttctcgtccacgatcgggacggtcagccccttgacgcccgaaacgtcggtgtacttgttgtcgagcggatcgtacagccgggccagatccagatagagctgggcgcgataagctttggcgaagcccagatagcttttctgcgcgtcggaaagttccacgcctgccagcaggccgaccacgtcgttgctcgatttgatgaacgtatagtagcagttccacgggaagcggcatacggtctgcgtcggaccgatcagaatgcccgactgccagtaggtgaaccagtcatatcccgaaccttcgtcgccggaggagcatatcacgtcgcccgtggcggcgtccgtagcgcacatcatgcccggatagccgaagtcgaagccgtagttgttcgtcctgccgtacaccgaataggggtaagtcatgttgacggggatggcattgacgatggcctccaccgcagtcggcgaatcgctgacctgtccggaagtcgcgctgtcggtggggaaggtctctttgatacagcccgtgagcgccatggagcagacaagggcgagtgtcgttgttttcaatatgtttttcatttcaatccctgttttatccgttagattagaactgtacggttacaccgcccgaaatagtgcggatcggcgagtagttggagaagttggtcgctcccgtgaacgaataacgcgggtcgagtccctgacgcttcgaccagtagaccacgttgtcgcaggccagatagacgcgcagtttctgtacgccgaatttctgggtgatcttcgacggcagcgtatagccgacgttgatgttcgagatgttcaggtagctcgcgtcggtcaggaaacggtcggagacgctggtcgtatactgatcgccgtattgcagacggggaatgtccgagcctttgttttcgggcgtccacgccttgaggatgtccttgtggtagttggtgccgacggtggttccgtagggcgacgacatgaagctggcgtaacccgaatcgtagaccttgccgccgatctggtagttgaacgagatcgagaaatcgacgccgtaggccgaaaccgaggtcgagaagccgccgtataccgaaggaatcgcgctgtcgtgcaggtagcgggtcgcggaggtgtagtccgaagtcttggtccgggtgatcttgccgtcgtcgcccttcacgtccttgtaccagagcgaagcgcccgtttcgggatcgacgccggcgtacgaacgcaggtaataggtgtagagcggcagcccttcgccgacgaaataactgccgtcgatatagcctttgtagccctccacggtcgtggatttgtgttcgggagccagataggtgacctcattcttcacatgggtcaggttcaggttgaagctccacaacacgtttttcgtgcggatcaggtcggcgttcagctccacctcgacgccgcggttgaccatgtcgcccacgttggcgtaataggacgagtaacccagcgacgaaggaaccgagaatgcgaagagcatgtccgaagtcttgcggttgaagaaatcgacgcttccgctcaggcggttgttccagaaaccgaactccgtaccgatgttcaggttggtgttggtctcccacgtaatgttgggattgcctttctgcccgaagagcacggcgatttcgccgttgttgttctcgatcgaataggtgtcggtgtagaggtagtagccgatggtgctgttgccgatgttatcgttgccctgcgaaccgtaggaagccttgagcttcagcagattcacccacggcgcgtcgaaccagttctcctgattgaggagccacgcggcgcccaccgaccagaagttgccccagcggtggtcgggatggaagcgcgacgatgcgtcgcggcggtacgaaccgctcacgaagtagcggcccgcatagtcgtactgggcgcgcatgaagtaaccctccgagttgtagtcgtcgatgtaggagtgggcgcccgcgccgtcgacgacggctccgccaagctcctcgttgtcataggagaagagtttcgacttggtgccgctcaggtagtaatattttttctgatagtactcgtgaccgaccatcagccccacgttgtgcttgccgaaggtctcgttgtagttcagaatctgctgaaggttgtaggcgatgtcgcgggtgtggtacttcgaaatagtaccgcccgcctcggcgaactgaccgtaatactggttgttgagataagtcgtgcgggtttcgtcgatgttggtgctgccgtttaccgtcagcttcagccccttgtaaagcgagatgtccacgaagccgctgcccgaaaaggcgttgccctcggctttcttcttgttgagccagctggtctgcagtccgttggcgccgggcagcagcggacgggtcagacccgcattgcccttgtcgccgtagtcgtacatctgatagccgttgtcgtctaccatgatgcggcccgaaccgtcgcggatatataccggatagatcgggggcatctgcgacgagaatgcgaagatattggccgtcgaggaatccgatccttcgttcgagttgccgttgctgctgctgaagtgcgcatacgacatgttgccgccgaccttcagccacttcttggcctgataatcggccttcagacgtgcggtgtagcgctccagcgccgagcttttgataatacccgtattgtccagataaccgagcgaagcgtagaacgagctgcgctccgtcgcaccggagatgttcacgttgtattcctgacggaacgccgactggtaagcctcgtcgatccagtcgtcgggcgtcagccaatactcctgtccgttgtagatgatcttgcggcccagcgtcgcgttcggattcagcttgccgttggtgccgatcagcgcctgcccttcgggaaccgtatagacgttgtatcccagaccgcccgtgccgttggaagtcaggccgctgctggccagcgcataggctttcgccgccggattggtctgcgcataatagccgtagagcgccttgaaatgcgtctcgtaatactgcgcgggcgaggtgatcacgtcgtactcctccagcgctttcgagtttacgccccacttggcgtcgatcgtcacgacggcgtcgcccgacttcgcctttttagtggtgaccataatcacgccgttggcgccgcgggcgccgtacagagcgttcgaagcggcgtccttgagtacggtcatcgactcgatgtcgttcgtgttcaggttgttcaggtcgccttcatagggcatgccgtccacaatccagagcggctccttgccggcgttgatcgaaccgaagccgcggacacgaatcgagggggtcgtaccgaggtctcccgacgtgctggaggtctgcacacccgccacgcggccgatcagcgccgtcgccacgttggaagtctgcaccttggcaatctcatccgactttatgacggcggccgaaccggtgaaagcctctttcttagccgtaccgaaagccacgacgatcacgtcgtcgatcgcttgcgcatcctccttcatcgtgacgttgatccgggtttttccggcgataggcaactgctgcggctcaaaaccgacaaacgtcaccacgagcgtgccgttcgccggagccgaaagcgtatactcgccggccgtgttggtcgtggtccccagagaggtcccatccacaatgacggtcgcgcctgcaaccggatgtccgtttgcatcggaaactgtaccggagatctgcctattctgggccgtggcgtatgccaagaacacgaatacggcaattaacgatagtacaatttttcttaccataagcgttaattttaattgattttaaaat

SEQ ID NO: 12044 - DNA, 126725 bp, Unknown
  gut microbiota DNA sequence
cgggtcgcggggcgaagcagcatggccgtccgcatcaacgaacagctggccaatatccggttccacatcgaaagatgctacaacacgctcttttacgagcaggccttcgttactccggtgatggtcaaggagatgtatttcggcggcaatcacaagcaggagaccgtggtcgccttcttcaagcagcacaacgacgaattcagacgcatggtcggcgtcagccgcagcaagaccacatattataaatataggtgtgtatgccggcatctggcggacttcgtctgggacaaatacaaccggaaggatttaatgttcaaggaactcaaccgcgaattcctcacgggctttcattcctacatcgcgcaggagtgcgcccataagaaaaatacgacgtggatctacatgatcgcgctcaaacatatcctgatgctggcacgcagcaagggatacatgaacaaggatctgtttgcaaattacaaattacagagcgaattcgtaacacgcaattacttatccatgagcgagataaacaaactgatgcagtacgagggcgacactcccaccttacaacttatccgggacgcatttctgttcagctgcttcacgggcttgtcttatattgatataaaggaccttacgctggaaaacatccagcaggtgaataaacagttatggatcagtacgacacgccgcaagacgggttccgaggtgaatgtccggctgttcgaagtgccttacaacatcctgctcaaacataggccgatgacccgcaacaagcggattttcgcccttccgagcaacggctggtgcaatgcctgtctcgacaaaatcatgtccgaaataggcattatgaagcagattacattccattcggcccgccatactttcgccacgacgatcaccctgtcgcagggcgtagctattgagacgatcagcaagctgctgggacatagaaacatacgcaccacgcagatttatgccaccatcacgcactcgcagctcgacggcgaaatggaacgtttgtcgaaacgaatcaactcgctttaccgcaatttgatcccttcggatgcgcccgaaacggggacaaagctcatctgagcgccgtcatccgccccttgcgccccttcccggagggaaaatcaccggaaatcaccgaaaagtccgaaaacaggcggttacaatctgtaacccgcccgatgctttgtcgaaaaaactgtaagtgagcaacattaatccacagaatatgtgtaatagtagtaaattattttaaaaatttatttgtatatgaatcgccaaacgtttatctttgcttgtgaactttttattttaaaaaattaactaatagattaacgcttatggtaaaaaaaatcctactatcgttaattggagtacttgtgtttgcagcgggggcattcgcccaagccaaacaagtgcgcggtagtgtcgttgatgaaaacggagcggccgtgatcggcgcttcggttatcgtcaaaggtacgaccatcggtgtatccaccgatcagcagggatttttcgttatgaacaatgttccggcgaaatccgaggaactgcaaatctcctatttggggtatgttacgcaggatgtgaagatccgtccgaacatgcagattacccttgttcctgacgagcagactatcgagtccgtcgtggttacgggtatgaccaagaccgacaaacgtctctttacgggtgcggcggaccgcctttccgccgaggatgtgaaactttcgggtatggccgatatcagccgcggtctggaaggccgttcggccggtgtctcggtgcagaacgtatcgggtactttcggtaccgctcccaagatccgcgtccgcggtgcgacgtcgatcttcggcagctcgaaacccctctgggtggtcgacggcgtgattatggaggacgtgatcgacatcgacgccgacgcactctcttcgggtgacgccacgacgctgatcagctccgccatcgcaggtctcaacgccgacgacatcgagagcttcagcattctgaaagacggttccgcaacttccatatacggtgcacgcgcaatggccggcgtgatcgtcgtcacgaccaagaagggtcgtgcaggcgagagccgcatcagctataccggcgactatacgttccgtatgacgccgcgctacgccgatttcaacatcatgaattctcaggatcagatgtcggtatatcaggaaatggccgccaaaggctggctcaacaactcgactatcgcaaacgcctcttcgagcggtgtttacggtaagatgtgggagctggtcaacacgggcaaactcgaaaatacggaggctgcgcgcaaccgctacctgcgtaaggccgagtaccgcaatacggactggttcaaggagcttttccggagttcgctgatgcacacgcactcgatcagcctcagttccggtaccgagaagtcgcagtactacgcttcgatgagcgccatgttcgatccgggatggaccaaggccagcgaggtggagcgttatacggcgaacctcaatgctacctataatatcttcgacaatctgacgctgaacctgatttcgagcggttcttaccgtaagcaaacggctccgggtacgctggcggcgacgaccgacgtggtattcggcgaggtgaagcgcgatttcgacatcaacccctactcttatgccatgaattcgtcccggacgctcgatcccgatgaattctacacgcgcaactacgctccgttcaacattatcgacgaacttgggcgtaactacatcgatctcaacgtcgtggatacgaaattccaagcggagttgcgttacaagcccgtcacgggtctcgaactgagcgcactggccgccatcaaatattcggctacgacgcaggagcacaatattacggactattcgaatcaggcccgcgcctaccgtgcaatggctactacggtgatccgtgacaacaacccgttcctgtataccgatcccgacaatgcgtatgcagtgcctatttcgatcctgcccaagggcggtatctacaagcgccgcgacaacaacatgctgtcgtacgacttccgttttgccgcttcgtacaatacggagatcaacaaccagcacattatcaacctctacggaggtatggaagtcaaccagagcgaccgtcacgaatcttggttcaacggctggggtatgcagtactcaatgggcctgatccccttctacgcctacgaggtattcaagaaaggcaaggaggagaacaccgactacttcggtctggccgacacccattaccgcaacgtcgctttcttcttcaacggcacctattcgtggaaaggccgctacaccctcaacggaaccttccgttacgaaggaacgaaccgcatgggtaagagccgcagcgcccgctggctgccgacatggaacgtcgccggtgcatggaacgtacacgaagagaatttcttcgaggcgctgcgtcccgctctgtcacacttgtcgctgaaggcttcctactcgctgaccgcagaccgcggccccagcttcgtgaccaactcgcgcgtcgtcatcacgagcaataccccgtggcgtccttcggccggtgttaccgaatcgggtctgacgatttacgacttggagaacagcgagctgacttacgagaagaagaacgaggtgaacgtcggtatcgacatgggcttcctgaacaaccgcatcagcctcgcagccgactggtacaagcgtgacaaccacgacctgatcggtgtgatcaacacgcagggtatcggcggtcaggtgatgaaatacggtaacgtcgccggtctgaaatcttcgggtgtcgagctgactctttcgacccgcaacatcgaaaccaagaacttcagctggtctacggacttcatctattcgcacctgaaagaggaggtgaccgacctgatgtcgtacaagcgtgccatcgacctcgtatcgggcaccggtttcggtatggaaggctatccttcgcgttcgatcttctcgttcgacttccaaggcctgaacgacgagggtatcccgcagttcatcaacgagaaaggccagcttacgaccacctcgatcaacttccaagagcgtaacaacctcggacacctgaagtattcgggtacggccgatccgacggatttcggtagcttcggcaacatgttccgtctctacggcttcaaactcaatgtcttcatcacctactcgttcggcaatgtgatccgtctggatccggtcttctccgaatcctacagcgacctgctctccatgccgcgcgagttccgcaaccgctggatgcgtccgggcgatgaaaaccatacggatattccggttatcgccaacaagcgtcaggtcgagaaggacaactacctttcgcgcgcttacaatgcctacaactattcgacggcacgtatcgccaagggcgacttcatccgcatgaaggaaatttcgctgacctacgacttcccgaagcgctggatcaagaaactccgtttctcgaacatgtcgcttaaacttcaggcaacgaacctcttcctgatctatgccgacaagaagctcaacggtcaggatcccgaattcttcaataccggcggtgttgcggttccggtgcccaagcaatttacgctgacgctgaaaatcggtttataacagacgctaaagatgaaaaatatgaatacgaaaaaaataaccacgctaatcgtactcgcggctgccctcgtggcgcttcccgcttgtaacgactttctggatgagatgccggacaaccgaaccgaactcgattcgagcgacaagatcaccagtctgctggtttcggcatattccgaacatacctaccccgtaacctgcgaatacgcatcggacaatgtcgatgaaacggcattggtttcaccggacttcgaacccgaacaggaagagtattaccgctggcaggacgttacggcggccgttaccaacgaagcgccgcaggccgtatggagtcagtactacatggctattgccgccgccaaccaagcgctcgacgccatcaaggagctgggcggcgccgacaccccgcagctgaaagccgccaagggcgaagcgcttatctgccgtgcatacgctcatttctgtctggccaatatgttctgtcaggcctacaatccgcagtatgcgtcggaggaccttggcattccctacatggagaaagccgaaacgatactcgaccccaaatacacccgcggtacgctggccgacgtctactccaagatcgacgccgacctgatcgagggtctgccgctgatcaccgacgagttctactcggtgccgaagtaccatttcaaccagaaggccgcctatgcctttgcagcccgtttctacctcttctatcagaagtgggacgagtgtatcgccgccgcgaaggtagtgctgggaagcgctcccgaaacgatgatgcgcgaccttgaggcgaacggcaaactgggactgcagtcggccgacggacagaccctgctccgcacgatggactatatcgactactcgcacaagtgcaacctgctgctgcagacctcgataaccgatgctcccggcatttcgttcggtccttacaatgcctacaccggtttctcccacggtaactggctggatcagaccgaaaccttccgcgctccgacggctccgtggggcagcagctacacgctctactctgcgccgtattcgatgaataccggtaaagccgacaagtgtttcgcatggcgtgcgccctacctcttcgagatcaaggacccggtaatgcagacgggactcgcgcatacggttttccccgcatttacggccgaagagacgctgctctgccgcgccgaggcttacatcatgaagaaggaatacggaccggctctgaacgacatgaacctctggatcagcaaatatgtgaagtccggcgcccagacgctcaccgaagccaacgtcaaccagtgggcgcagaacacgagggagtataccccggccaatcccacggtgaagaaacctttcggcgagacggctttcccgctcgaagccggcacgcagaccaacatgtgctatgcgctgctgcatctgcgccgtgtggagaccgtacacctcggtttgcgctggttcgacataaaacgttacggcattacgatttatcgtcgcaagctggccagctacaacacgctcggaagcgttaccgacgaactgcacgcccgcgacccgcgctgcgcgatgcagctgccgatggatgtcgttgccgcaggcctgactcctaacccgagataatcagatgctaacgataaaacaggatatacgatgaaaaagaatattatattacttatgacggcagtgttcggagtgttcgttttggcgggctgctccgaggacgacctgaacaagacgagtgctgtcctcgactcgcctaccgtcgaaaacgatttcgacagatggcttgccaagaactatatggaaccctacaacatcgatttcaaatatcgtttcaaagatgttctgggcgacatggactacaacctgactcccgcggattacggacaggcgatcaaactggccaagctgacgctgcacctgacgctgcaggtttacgacgaagtgacgggcagcaggcagttcatcagcgagaacttcccgaagatcgtccatgttatcggttcgccggcctataacgaaaacaacaacatcgtactcggtgtggccgaaggcggtaagatgatgaccctttatcaggtcaacatcatcgactatctgctgaacacgaaggatatcgaccagctcaacgagctattcttcaagaccatgcaccatgagttcggtcacatcctccaccagacgcggccctactcgaccgacttcaacgccgtaacgccttcgagctacgtcggcgacgcatgcttcgacacctaccggacggatgcagcggctcgtcaggccgggtttatcacgcgttattcgtcgaaggctcccgatgaggatttcgtggaacagctctcgctctacgtaacctcgacggcagccgaatgggaagccattctcgcacaaggcggcagcgccggacgtccgcttctcgaacagaaaaacgatatcatgcgtgcatacatgctcagcacatgggatatcaatatcgatgaactgcgaaaagtggtattacgtcggcagaatgagatttggtcgctcgattataacatttaattcgtaaaagagatgaaaaaacttatcatattattagcggttttgccgcttgtcctctcttcgtgccttaaagatgacaaggacgctttcggcaaaacggccagtgagcgaatccgcgaggtgcaggagggcaccgaaaaggcgctgaccggagctgccaacggctggctgatggagtactatcccagtgcgacgcaggagtacggaggcattgcgatctacatgaaattccagaacggaacggttaccgtaacttccgaagcgggaggcgccggcaagaccgccgagagtctctactcgtacgatcaggattacggtcccacgatcaatttcgacacttacaatccctacttccatatctattcggagccgaactccggtgtcggcccgaccaatacgggtatgggaggcgacagcgagttcatcatcatgagctatgcggccgacaaggtcgttctgcgcggcaagaaaacccagaacaccatcgtgctgactcccctgccggaaaccgcatggaacacgatgttcggcaaatattccgcggatgtgaacaagatggacaatttccgttcctacgaactcgttctcaacggcaagacctacgacatttcgcgcgaggtagcggccggttataactcccgttatttttcggttgtaactgaaaacggaacgattcccgcaagcttcatctacacgcaggataccggcctcaagttctatgagccgctggttgtcgacggagtttcgatcgaggagatgacttggagcggcggcatgttcaccgacgaggtaagcggcgcccggattcaggagacggtatccaacaataagttcaccttcgccgtatcggacatcaaggctacttcggtcaacgtagaagcgacgccgactgttgcaaacgagtactactattttgacgtcgtaccttcgagtgcattcgcaaacgcatcggacgaggatattctgtacgaactgatggacggaatcacgtcgatgaaccagttgtcccgcggcaaaatgaagaaaacgctgacggtagattccgatacggaatacattccctgcgcattcggtcttaaaatcgtaaacggctgggtttatccgatcacggaactggcaaagggcaccgctttcatgagcggtcagggcgatccgatgtcgccggaataccaagcatggctcggtacatggaccgtcaccagtacgtcgtccgaaaagagcaaacagccgattacattcgacatcacgcttgccaagaaggtcgccaatacctcctattcgctgaccggctgggatatttcggtccgccgactgacttgggcgggaactgccgacttcaacacaaccgacaattcgttcgtaatcatgaacgagcaagagctcccgtattcggatcccaacggtacgccgtatcttatcgcccgcggaatcgcagcatcaggcacctatatcgtctctggcagctacccggcactgaccggcgttatgaattccgacggaacagcctccgtttcctgctataagggcaagttctcggacggcgaggagtttaccgtaggtacggtaggatatttcatagataccggaggcagctacggatcttataatcccgcagcaggatttacatcgggagatcatccggtcggaccgttcaagatggttaagaaatcggctgccggcgctcccgccaaagccgctgctctgacgaacgtcaatactgtaatccggtaccataaattatcggatactccgcagtcgtttcagatcgacgtcaatgtaaaagctgcaaagctcgaataaggagcgcttgcattattgatcaataggggtgggaggagtcattcgataatgactcctcccaaattttagagggattaccatcgtttcatctgcatgagttcggtattgcaccggactcatgtcgtcaatatactcttcatccgcttgctgccgaagcgcagccgattgccggagaggtctgcgatcgggatgcaagcagggcggttcgtcaccataaaataataaatagaataataatttgcataaatccgcacaaaatcgcatatttgtatcttaatcttccgttacgaaccatttatggaatcttttttgaaccatacgccggcggcatatactccctgtaaatccgctccggaagatttgcagagcctatcttttgtcatctatccaaaatcatagtttatgaacaacagaaaactactcatttttgcgtcattcctgctgttggcgggctgtacgaccgatccggatacggataataacgcgggggggggtacttccgcgcagactccgtcggccaagatcgtcaacacctccgccgatgcggcggccgaaacgcttctggtctatttcaacgaccgtgcggtcgaaaccatcgaaagcaccgctgccgcaacccgcactgcggcgacccgttcgggagtcgcctctgtagacgacgttctgagccgtctggagatcgtttcgctggaacgccttttcacttacgacgcccggagcgaagagcagacccgcgccgcagggctgcataaatggtacatactcaccttcggccaaggcgcggatctagagaaagccgcaagggagctggccggagtggccgaagtgagccgcatacaattcgacacgaaactgcaaaaggcatcggtcggcaatcccatgcctttcagaatcgacgagacggggacgacccgcgccgatttctccggcagcggcttcaatgatcccggacttccgagccagtggcactacagcaacaacggcgacaaaatgttcgcggctacgacggccgcaggcgccgacatcaatgttccggaggcatggaaactgaccggcggcagcccttcgatcatcgttgccatcgtcgatgaaggtgtgaaatacacccatcccgatctggccgacaacatgtgggtaaatcccgacggaagcggcgttcccggatacaacttcgccacgaattcgaccaagcttacatggagtgtatcgcattatgacaataaaggcaagtacgacggcgattcgggccacggcacccacgtcgcaggtacggtagccgccgtgaacaacaacggcaaaggcgtctgcggcgtagcgggcggcacgggcagcaacgacggcgtgaaactcatgtcgtgccagattttttcgggcggcaagggcggcaccatctcgacttcggtccgggcgatcaaatacgccgccgacaacggcgcctcgatcatccagtgttcgtggggctaccccactcagtcgccgttcacgtcggatagctattatgaaaggaattacgccgcggaaaaagaggcgatcgactacttcgtctcgaaaaagaacaacgacgtactcgacggaggtcttgcgatcttcgccgcaggcaacgacgccaccaacttcgcgagttatccgggcggctaccgcagctacgtttcggtcacctcgttcggcccggactacctgccggcctactacactaattacggtcccggctgcaacgtcgcggctccgggcggcgacgccagcatctcgcccgcaggaaccagcgccgcgctggtgctttcgacactgccttccgaactacccgcagaactcggcaccgacggagccgactacggctacatgcagggcacctcgatggcctgcccccacgtatcgggcgtcgctgcgctgggactctcctacgcgctggccaaaggcaggcattacacggtggacgagttcaaatcgatgctcctgactgccgtaaacgacatcgactcctatatcatcggcggcaccaaaaacggcatggtactccgcaactaccgcaagaatatgggcaccggatcgatcgatgcctaccagctgctgatgcagatcgaaggcacgccctgcctgccggctaaagtcggcgtacagcaggtgctctcgctcgacaagttcttcgggcaggcttcggcgaacctgacctacaagagcgccgaaatgtcgcaggccgacatggacaagctggggatcaccgccgcgcctgcgttctcgtacggaaaactgcagatcaaatgcaccaaaccgggcgtcgccaagatcaagatcaaggccatggccggaagttcctcggcaaacggagagatgagcggcatggagatcaccaaggagttcgcgatcatcgcccgctcggtacaagccggcaacggaggttggttataatataaacgtatgaaaactatgagaaagactatctatatcgtactggccgcattgggcctgtgtctgttcgccggctgcggatcgtcggacaaggagaaggtttcgcccacggcaaagctgctcgtcggcgagtggcagctcaagacatggacgggcgagactccgcaggatttcgatatttacctctcgttcgatgcggacaataccttcgagatataccaaaggctcgccgaggtaaaataccagaaattcaccggcagttatcaggtgcagaacgacgtgctcagcggaaaatacagcggcggcaagaacttcggaagcacctacgacatttcgttcaacgaatcgggcagcacgctgacgctgaccagcgccacgaacgttacggaagtgagcgtatacgagcgcagcacgattccgaattcggtcaaggagggcgccgccgtgatgaaatccacccgttcggcggtacggctgccgctgtaggccgtccgccgcaaaggtcaaaacagagaatctccggtcttatgaccggagattttttcatgccggagtcattcacaccccaccggcggccgatttccggacgcaaacgccgttcatgtccgaaaaactgttatatttgccctccggaagagaaattatatttacagaaacatcagacggacagccggatagctcccgatttccgttttggcacatttttcactatctttggacaaaatacgtcacatattatgaacatcaccgaaattctgcccggcattcattacgtcggggtcaatgatcgcacgacaacccgtttcgaaggactctggtcgcttccccacggagtttcatacaacgcatatctggtcgcagacgagaaggtcgccctgatcgacaccgtcgaagaggctttcggaagccgtttgttcgaaaatatccgcgagacgatcggcgaccgcccgatcgactacctcgtggtcaatcacatggagccggaccactcgtcgtccatccgcgccctgcgcctgctctaccccgacatccggatcgtcggcaacgccaagacgctgcaaatgatccaaggcttctacggcatcgacgccgggacgctcgaagtcaaggagggcgacacgatttcgctcggcgcgaagacgctctcgttctacatggcgccgatggtacactggcccgaaacgatggtcacgtggtgcgccgaagccgggacgctcttctctggcgacgctttcggcacgttcggggctatcgacggcggcatcaccgattcgcagctcgacccgtcgcgctactgggacgagatgcgccgctactacgcctgcatcgtgggcaaatacggcggccccgtgcagaaagcgctggcaaaggtccgcggactgaaccccacgaccatctgttcgacccacggtcccgtatggcagcggcagattccgcaggtaatggatatttacgaccgtctgagccgctacgagggagaacccggcgtagtgctcgcctacggttcgatgtacggcaacacggagcagatggccgaacgcatcgcccgcgagcttgcgagccggggcgtcggcccgatcgtcatgtacaacctttcgttcgccgacgaatcggtcgtgctgcgcgacgtgttccgctacgacacgctgatcgtcggcgcgccgacctacaacggaggcatctacccgcccgcggcgcgcctgctcgacctgatcgccgctcgctgcgttccgcagcgcaacttcgggtggttcggatcgttctgctgggccggggccgccgtgcgcggcatgggcgaattcgcgcagcgcatgaagtgggagccgatctgcgatcccgtggagatgaagcagggcttctcgtccggctgccacgacttctgcagccggttcgccgacggcgtcgccgagcgcttccgccgctgaaaaagcatacaccaaaaactcacaatatgaaaatcgcagtcgtaggaacggggtacgtcggtctggtttcgggggcatgtttcgccgaaatgggccttgacatcacgtgcgtcgatatagacaaaaagaagatcgacgggctgaacaacggcgtcatcccgatctatgaaccggggctggaagaagtcgtccggcgcaatgtcgaagagggccgtctgcacttcacgaccgaactcacggattgtctggacaacgtggaggtggtcttctcggccgtaggcacgccgcccgacgaggacgggtcggccgacctgaaatacgtgctggaagtggcccgcacgttcggccggaatatcaagaaatatacggtgctggtgaccaaaagcaccgttccggtaggtactgcgcagaaagtcaaggccgtaatccgcgaagagcttgcccggcggaagtgcaaggtgccgttcgacgtcgcttcgaaccccgaatttctgaaggagggcgcggctgtcaaggacttcatgtcgcccgaccgcgtggtcgtgggcgtcgaaagcgaacgggcgcgcaagctgatgaccaagctctaccggccgttcctgatcaacaatttccgcgtgctgttcatggacattccctcggccgaaatgaccaaatacgccgccaacgccatgctggcgacgcgaatctcgttcatgaacgagatcgccaacctgtgcgatctggtaggcgccgacgtcgagatggtccgcaaaggaatcggttccgacgcccgcatcggcagcaaattcctctatccgggctgcggttacggcggctcgtgctttccgaaggacgtgaaggcgctggcccacacggcacacgaacacggctacacgatgcaggtaatcgaagccgtggagcgggtcaacgaacgccagaaatcgatcgttttcgacaaactgcagctggcgctgggcgacctgcgcggcaagaccgtagccgtctggggactcgctttcaaacccgaaacggacgacatgcgcgaagcaccggcattggtcgtgatcgaccggctgctcgaagcgggagcgacggtccgcgcatacgatccggtcgccgccaacgaatcccgccgcaggctcggcgaagagcgcgtttatcatgccgcgtcgatgtacgaagccgccgaaggagccgacgccgtcgcgctgatcaccgagtggaagcagttccgcatgcccgactggacgctcctgcgttcggccatgcgcgacaatatcatcgtggacggccgcaatatcctcgacaaggaagaggcgctgaacgccggattccgctattacggcatcgggaaataacgggtgcagcggcatccggaatgcaatccggcaggctgcaggaagcggtaaccgtatataacacgaaggccggagtgtatgctccggccttcgtgttatcgtctcggcgatcctacatgcggaccttgacgatgatcttgcgtatgcttccctcgcccaccatcggcgcatggccgtcctcaggcatgaggatcgtaaactgaccgggacggatcgtgtagcaggtctgcggctcgtcgtcgaagagctgaatatccttctcggcatcgaacccgcccagcggtttgctcaggacggcgcgttcgctccagccgaaggtctcgcgctcgccgcggacaagcacctgaatgtcgagataggcgttgtggatttccagcttggcgtcggcgggcttcttcaattcggtatccatgacattcacatagatatccttgccgtcgagttcgtggataccgggttccatcttctcccagtcggtcgaggcgatgaaaccgaaagctttttccagacgcggattcaacgaataatagagcgcactgtttttcaaagagtcgaaaatcataattatatcggattagttgttcattgcatttttccgcagccggacgacgacgggatggtggtccgagtaatcgaccgtgggcacctcgtacgagagcgcatcgaaaccctccgagctgagcacgtagtcgatccgcagggtattgaaaaatccgcgaaacgtatgcgaatagcccgaaccgcactggctgaaagcgtcgttcaggcccttggccatggtgcggtaaacgtacgacatgggcgtatcgttgaagtcgccgcagacgatgcaccgcgaacgccacgcctccaccaccaccgcgatgctgtccacctgcgcggcacgcagcacgctgttctcgcggaaacggcccgccatgctccgcagtttgtcctcgcgcgccgtatcggagagaaatccgcggctggtgaggtagtcgttgtcggccgccttgatcgccgtcgaacgcaggtggttgttgaacacccggatcgtatcgtcgccgatcagcagatcggcccagaccgaggtgccgggggtcagcacgacgccggagcgcaggatgcggtatttgctcaggatcaccagcggcgcgccgtaaagcgaatcgggcgcctgcgtacgtccgaaaacggcgctttcgtacttctcgtccaacaatgcgaactcgtcggactgcccggccagccgcgcgttgaactcctgcaggcagatgatatcgggattatggtcgccgatcagctgcagcacgtctcccacgctgctgagtccgttctcgccgtagaatccccgcacgttataggtcatcaccttgaaggcgcggcggtcgtacctctcgtcgccgtaattacggcggaactcaggtctgtagaaaagcgacaccttgaaaagcccgacgaccaccagcgcgaccatgattccggcccgcaccagccgccagcggatgatccaatagagcgccagaacaaccgtgacgacatagaccgccggtgcggccagccccagcacggggaagaaccacacccggcccggatcgacgtaggggacgaaaaaggtgacgaccatcgtaacggccgttacggccgtcaggagcgtcatcagcagatcgagcagccgcagcaacagactgcgccgcggcttacggccgcggtcgctgtcataaccgctgtaataggtctcggacatagggtcagaaacggattatgccccgctgtttccaccattgaagcagcaggaagccccacaacatgcctcccacatgggcgaaatgcgccacattgcccacgccgcgccagcccaagaacagttcgatcacaccgtagatgacgacgaaccatttggccttcatcggaatcgggggaatcagcagcatgatgaccgcattggggtgcagaactccgaaggccagcagcagtcccatcacggcgcccgaagcgccgaccagcaccagcggaaattcgccgaaggccagcgccgtcaggtattggataagcgccgcgccgatgccgcagaccatgtaataggtcagaaagcgtttctgccccaattcatactccagcgtacgcccgaacatccaaagagcgaacatgttgaagaagatatgttcgaaattggcatgcaggaacatgtaggtgatgaactgatagacatggaaaaacggcgtgccgagcgacagggcgcagtactccatgatcgtattgcccgccttcggcagcaacgccgtggccatgaagatcaggacgttgatgattatcagattcaacaccaccgggggcgtctggaaataattcctgttcataaattatcttttttcagtttcgttgcggttttctccccgtcccgtctctcagggctgcaaacgcggcccggcctgcattcgcaagcccgatcctgcggggaacggttttcaattttccgccccggaaacaagccgcatggagccggccggatcagggcgccgaaaatttatgcaaatgtacgtttttccgccggattatcccaacttggcccggatatcttcgacggttatctcggcggttatggctttgcccgatggcgaaaagctgaaattgcccgaagcggccagccgcgcgagcagtgcggcggcttcgtcgcgcgacatgaggcgcacagtctgcttcgcggctccgcgcgccatcacggcggcgatcttctcgcgccgcacgtcggccagcgacacgggcgtcgagaaagcctgcagcagttcgtaaagcagctggtccaccgaatcggcaggcatgtcggcaggcgtgcccttcacctcgacggcgcagtcgccctgaaaatcgagatcgaagcccagcgatgcgaattcgacggcattctcttcgagcagggcgtattcgctgtccgaaagcaccagccgttcgggaaacagcagctgctgactcaccgacgaaccgctgccgagcatcttcaggtagtcttcgtaaagtacccgttcacgggcgcggcgcacgtccaccaccacgaaccgtccgcccagcagggcggcgacatagccgcctccgagcggcagcggatcggtaaattcgggccgcccgtcaacgtcgagacgctgttgctcgaccgtcgcttcggaagggatgaattccagctcgctggcatcgaaaccactctccgaagtcacttcgaagcccccgcccgacacgaaatcctcgaaggcgtcgtccgccgcagagggaatcgaaaattcgtcggcgccgctgccggccgcaggaaatcccccgcccccggcgctgcgcaggccgcccggcaaagcgacacccgaaccgcgtcctccgccacgcggagcgaagcccgcgccggcattgtcggagagagtttggccgttgtcgctgaacggcacgtcgaatccggcgaaatcgacgttcggatcgggcgccgacggatcgatgtactcttcgcggaaaggattgtattcgctgttggacatggcccgcggctcgctgtagaccgcccctttggtcagcaccggaatctcgacgatgccttcgcggtcgaaatccatcagcggcacggcgcccgtcttggcgagcgtttcgcgcacggcggcgttcacgatctgccacacggcctcctcgtcggcgaatttcacctcggttttctgcgggtggacattgacgtcgatgcgcgacgggtcgatcgtcaggtagaggaaatacgacggcgagctgctttcgggaatcagcttctcgtacgccttcatgatggcgctcgtgaggtacgaactcttgaaatagcggccgtttacgaagaggtactgttcgccgttgcgccgtttggcggcggcgggacgaccgatgtagccttcgatgcgggcgatcgaagtgtcggcctcgacctccagcagattctgcttgatatggcgtcccaccacatcgacgatacgtccggcgagcgacgccgcactcagcgtatagaccggggcgtcgttggcgtaaagttcgaaggcgatctgcggattgcacaacgccacgcgctggaattccgacttgatctgcgccgccgacgtggtgctcttgtccagaaaacggcggcgggccgggacattgtagaaaaggttgcgcacgaaaaactgcgaccctgcgggacacatcaccggggtctgtccggcgaactggccgccgttgatctcggtctgcgtaccgacttcgtcgccctcctgccgcgtccgcagttcgacctgcgccacggcggcgatcgaagccagcgcttcgccgcggaaaccgaaagtattgagtgcgtaaatatcgtccacggaggttatcttgctcgtggcgtggcggtcgaaagccatgcgcgcgtcgatgggcgacatgccgcagccgtcgtccacgatctgaatcaggtccttgccgccgtcgcggaaattgacctttacggtgcgtgcgcctgcgtcgatcgcattctccatcatctccttgaccaccgaggcgggacggttgacgacctcgcccgccgcgatctgattggctacgacctccggtaataatctgatcttatctgccatctactcctgataatcgttgggtaccaccgtgataggctgctcctgccactcgacgtcggaaatgcccgactgatcaagcccgttgcgccgcaccgtctcttcggcacccgccgcttcggtctgcgccggggccgaggtccgcgcccgcaggaaaacgtcggcgagcctcggatagaggatatagatgaacagcagcaccagaaccgcgcccacggccatcttccaaatgcggtcgcggcccgtcttctcctccttggaacggcgtgcggcacgcgcatcgcgctgggtgcggatatattgtccgggacggtattcgccgccggcgtcttcggctctttcgccccgaagctcggcacggcgctgttcgcgcgcctccttttcggggtcgtaataacgcggtatgtaattgaatttgttcgcgtgcttcttgaacggggtgaaacctaacatggcgtgtcctcctatttttttgtaaagatacgaattcttccgcaattttattgccccgaattcctttttccggcacggacgcatgcgtccgccgcgcgcgggaagcgggttgcggccggggcggctcccgatctgccaatacggcggaatgccggaacccgcaggggtattcagcactccgccgtagagacgaaaccgtatcgtttcctaacggaagaaactcttcatccgctcgaaaatattctggtttttgaccgagtcggccttctggaaaccgggctgccgggacaactcctcgaccagccgcttctcctcggcattgagtttcgacggaatggtgatgtccaccacgatcagctcgtcgccgcggccgtagccgttcacgtcgggcaaacccttgccgcccagacgcagcaccttgccggcatgcgttcccggagcgatcttgatcttggcgcggccgtctaccgtcggcacctcgaccgtaccgcccagcagggccagcgtcacggtgatattgaggttgtgaatcaggtcgttgccgtcgcgcatcagttcgggatgcggctcctcttcgatcagcacctgcaggtcgccgttgacgccgccgtggcgcgcggcgttgcccttgcccgtaacggtgagcatcatgccctcgcccacgccggccggaatcttgatctccacgacctccgaaccgcggacggtgccttcgcccttgcacttgtcgcagggcgaagtgatgaccttgcccgtaccaccgcaggtcgggcacacgctctgggtctgcatgcggccgaagaaggtgttttcgacgcgcgtcacatggcccgtgccgttgcacgtcgagcaggtcgaataggaatcggcgtccttggctcccgtaccgccgcacttgtcgcaggcgacggtcttgttgatcttgagcttcttggtgacgccgttggcgatctcggccagcgtcagcctgaccttgatgcggatatcggagccgcggttcacacgccggccgccggacgacgacgaacggaacccgcccccgccgaaatgtccgccgaaaatatcgccgaactgcgagaaaatatcctccatcgagaagcctccgccgctgaagccgccgaaaccgcctccgccgcccgccgcaccgctcatgccggcatggccgaactggtcgtaacgggcacgcttgtcggggttcgacaacacgtcgtaggcttctgctgcctccttgaacttctcctcggcctgcttgtcgcccggattcttgtccgggtgatactgaatggcagccttgcggtaggccttctttatttcgtcggcgttagcgttcttctggacgcccagcacttcgtagtaatccctcttttcagccatcttcttactctcctacaacgacttttgcaaaacgcagcaccttgtcgcccagcatgtaaccggtctggacgacgtctacgaccttgccctgcatatcctctccggcggcgaacttggccacggcctcgcataggtcggcgtcgaactcccggcccttgacgtcgatctcggtcacgcccttctgacgcagggtttcggtaaatttctgcgatatcaggttcacgccggcgcgcagcgcttcgatatcgtcgcttttctgcatggcatcgaccgcccgctgcacgtcgtcgcgcacaggaagcatcgccagcaagacgtcgcggcctccggtctgcaccagatccatcttctccttgagcgtacgcttgcggtagttgtcgaactcggcctgcagacggatgtatttatcctgccattcggcggcggccgccgcaaaatcgggtgcggcgccgctgtcggccccgtctgccattgtgtcagtctcctcctgcggctcatctgacacattggcacagggttcgccgtcgcacgagggataaccgtcgcccggctcgaacccttcgtcgccgttaatggcttcattataagctttttcctttttcatatatagttgtttttcagattttccgtcttatagtcgatcaaattgtataccaacctccggaagggcctatccgatgatgaaaatagcagggcgtttgttcatcgcgggcagttcggcggcacgccattcgcggacgcggagcgtgcggatgaattcgccgggagccgtgatgtccatggccaccgtcagccgcgtttcgggcgcaagggtctgcaacagctgctccatcagcttgacgttgcggtacggggcctcgatgaagagctgcgactggccttcggcgtgcgcgcggcgttcgaaacggcggatcgcctgcacccgttcgggcggtttgacgggcagatagccgttgaaggcaaacgactgtccgttaagccccgacgccatgaccgccatgacgatcgacgaaggtccgacgagcggcacgacacggattccgcggcggtggcaggcttcgaccaccagcgcccccggatcggcgacgcccggcacgcccgcttcggaaatcacacccgccgaacgcccctcgacgagcggtttcaccagttcttcgacctcacgcccggcgacggtatgttcgttcagttcgcggaagcagagcgtgtcgatcgggcgcgccgcgcccgctttcgacagaaaccgccgcgccgtgcgggtattctcgacgataaaatagtcgagcgaatccataacggcgcggtttgctgcgggcagcacgtcccacggcgccgtttcgtccgagatcggacacgggatcagatagagtattccgtacattttttcagttcagcgatttttcgttccaacaatccgacacggttcgtaatgcggacatactgcacggcgaaccagagactcagcgccatggccccgacgatcaccagaccgggcagcccgccgagacagagccagctgagcagaaatcccgcgatcgaaagcgccagcggagctttccggacaagaaaggccaatgccgcgtagacgcatgccagcgcagccatgaaaatcccgacggccagcatcgtcgcgtcgcccccggcatgcaccagcacgaccacgccgccgacaagcgcgaaaaacgcggcgcagagcatcgcgaccttcgcccggcccagctggtcgagggccgactccgcttcgacgcgggccgtcagcaggcgggtttcgagacacttcacggcctgcgccctctccgccggacagttgcaggcgggacatttgtccgctccgggcgcgatcaggccgccgcagtcgtagcatttcatcccgttattccttgagatagatgcgtttcacacgccccgaaaccgaggtcatgatttcatacgaaatcgtatcgagcacgcgggccatcgtttcgaggtcgttgcccggcacgggcgagaagaccgacacttcgtcgccctccttcacgccgggaatgtccgtaatgtcgatcatgcagctgtccatgcagacccggccgacgatcggcgcaggctgtccggccacgagcaccgaccagcggccgcagcccagatgccggtccagcccgtcggcatagccgatcggtatcgtggccgtagtagtcggccgcgtgagcttcccggcgcggccataccccaccgcatcgcccgcaggcaggcgtttgatttgcacgatgcgggttttgagcgtcgagacgggacgcagggcgtcgttgtgccggaacccgaagccgtaaagccccagccccagacggcacatgtcgaactgcgcttcggggaagcgctcgatggcggccgaattggccgtatggcggatgaccggataaggcagcgaggcggcgagctgcgcgctcatgcggtcgtagagggcgatctgcgcccgcgtataggcatcctcttcgggcatgtcggcgcagttgaggtgcgagaagaccgaagccgccttgacctgcggcgtcgcggcgagcgtcgcgcacaactgcgcgatctcctgctccacgaaccccagccggtgcatgcccgtatccagcttgacatgaatcggataacgggtttcgcccgcgtgcgtcacggcgtcggcgaaagcgccgagcgagtggaaactgtagatttcgggttcgagccggttggcgatcatgacgtcgaagctgtcagcatcggcgttgagcaccacgatcggcatcgaaatcccccgctcgcgcagcagtacgccctcgtcggcgaacgccacggcgagatagtccaccccctgatgctgaagcatctgcgcgacttcgaaatcgcccgcgccgtacgaaccggctttgaccatcgccacgagccgggtcccgaagctcagcttcgaccggaaatagttgagattatggatcatggcgtcgagatcgacctccagcaccgtcgtatggctcttgcgggagagcaggtgcaccagtttctcgaaacggaaatcgcgtgcgcctttcagcaggatcgcacgcccggccacggcgtcgcggttgatgcgcgcgacgcattcgtcggtagccgtaaagaactccttgtcgcaggcaaacagcgcggcatagcgtttcaggcggggaccgataccgatcaggaaatcgattccggcgcgtgcgaccatgcctgccacgcggccgtaaagctcgtcgtccgagagaccgctctgcgaaatgtccgacagcacgagcgtacggcggcggctcagcgccacgctgtgcaggtagtccaacgccagcgccagcgaattgaggtcgaggttgtaggcgtcgttgataagtatcgagtcgttgatgccctccttcacttcgagacgcatcgccaccgaaggagccgcggcgaacgaaggggcgggataatgcatcgcatcgcagaacgcctcgacgatctgggcgttgcggcgcgaagcggcgttgccgatgaccgattccggcacttcgggatacgcggcggcatcgacgggacggcggtcggcgaaatgcgccgcgaccatacggcccagcggctcgtaatagctgtggtagatgattttggaagcgctgcgggcgagaatcatcttctcgtcgcatttctgttccagattgatgaaattctcctgatgggcgtcgccgatcgaagtgaagatcaccgcgtcggggcggatgatgcgttcgagccgctccatctcgccgggtttcgagatgcccgcttcgaaaatcgccagttcctcgtcgccctccagcatcagcaccgaaagcggcacgcccagctgcgaattgtagctcttcggcgaacggtaatatttcatgccttcgggcagctcctcggcgatccactccttgatgacggtcttgccgttcgagccggtgatgccgaccaccgtaccccggaactgcgcccggtgataggccgccagccgctgaagggcttcgatggcgttgtccacctgcacgaaaccgcactccccggtgcacgaggaggcttcgacgccccgctcgacgaggaacgcacgaacgccccggctctgcatgccggcgatgaaatcatgcgaatcgtggttcgcgccgcgcatggcgacgaacatcgggcggcaccccagctcgcacgaaagcgaacggctgtcggtaacgaccgaccgcacctcggaatcgcagcccgaaaactttccgccgcaaatggcggcaatacgtgaaagtctgtaattcatcctcttatcattttccgttccgtctgccgttccgtctgccgtgcggtctactcttggcagccgacacgacacgccgcactcgaccggaacgccgcgaaaaatcgtcagtccatcttaaaagtcacgatcgtaatgcccgccccgccgcggtcggcatgctcgtccttggcgcattcgacctcagggaccgtgcgcagatagcggcggatctcctccttcaaggcccccgtacccttgccgtggagaatcgaaaccgaccccacgcccaccatcagggcgtcatcgacgaaatcctgcacggcgtccagcgcttcggcggcgcgcatgccccgcacgtcgatatggtccctgaaattgagtttgcgggccgaaatatcgaccgagaccaccgtacgggccgtctgcgggcgcgtcgcttcgcggaactcgctgttcgacaccacggtcagcagtttcttgtctaccgtagtaagtatctgcccgaaggcgacctgcgctttcttccccttgaccgactgcaccacgccgaccatatcctgcccggccatgcggaccttggaaccgggttcgacctcgcggggtttgggcggttcgggggcggcggccgccgcctgcgcttcgccgcgctgggttttgcgctcgatgcgccgctggcggcggcgttcgatacgctcgatctcacgggccacctgcgcgtccttctcggccgtatcggcctgctcgaccgcatcgcggaagtcgtccagctcacggcgcgccagccgcgtcagctctttttcggcctgcgcttcgcggatggtcctgatcgtattctcgatctgcttgttggcgtcggcgatcagccgctgggcctcctgcttggcctttttcagaatctcctgccgctcggacttgatcttcgccagctgctcggcgtaagtctgttccagctcttcgaccttgcggtccgtcaggcggatgcggtcgcgtttctgttcccagtaatgtttgtcacgggcgatttcgcgcagctgcttttcgatgttgatatggtcgctgccggccttctcgcccgcaatgcggataatctcttccggcaggccgatcttgcgggcgatctccacggcgaacgaactgccgggcttgcccgtttcgagccggaacagcggcctgatatgctgcacgtcgaacatcatggcgccgttggcgatgccttcggtgttcgacgcataatacttgatattggcgtaatgggtcgtgataacgccgtagcaccccttggccagcaggcgttcgaggatggcttcggcgatggcgccgccgatgaccggctcggtacccgacccgaattcgtcgatcagcaccagcgtcgcggaggaggccccggccagcatgttcttcatgttgagcaggtgcgacgagtaggtcgaaagatcgtcgtcgatcgactgttcgtcgccgatgtcgatgaagatcgaccggaacacgggcagctcggagacctccgacgccggcacgaggaaaccgcactggaacatatactgcacgaggcccgtggttttcaggcagaccgacttgccgcccgcgttaggccccgaaatgacgaggatatgcttgcggcggtccagctgcatgtcgagcggcacgacctcgcggccctgcgcccggagcgtctgctgcagcaagggatggcgggcgtttttcagcaccagccggtcgtcggtcgagacgatcggcttcacgcagccgttctccgaggcccagcgccctttggcgcgcaacatgtcaatctcggcgaggtaatcgcccgaatcggcgatcaattccgcatcgggacgcaccgaatcggtgaactccgagaggatgcggacgatctcgcgccgctcggcgtattccagttcacgcagttcgttgttgatctccaccacctcgaccggctcgacgtagaacgtgcgtccggtggccgactcgtcgtggatgaagccctgcagtttgcgtttgttggccgcggcgaccggaatcacggctttgccttcgcggatcgaaatctgggcgtcggcatcgacgatgccggcgcttttggcggccgacagcacggcctgcaggcgtttggcggcctgtccctcgcgttcgcggacggcgcgccggatctccagcagaccgggcgaagcgttgtccttcacgttgccgaagcgatcgacgatggcgtcgatccgctgcacgatttcgggaaaggccgcgacgccgcggctgcgggcgtgaagcgccggatattgttcttcgcggttgagaatgaacgcgacgatgccgccgacgaccgtcagcgcacgatgcagcgtcaccacttcctcgacgtcgaggaacgagccttcgacgcgcagcttggcgacaatatgatcgacgtcgggatactccccgccgggaaattcgtgttccatatcgagcagcagacgcatctcgtcggcaagcgtcagccgccgggcgatctcgcgcgccgaagtcgaaaaggtctcgccggccagccgcgcacgggcggcacgcatggtacagcgcgccgcaacctgttcacgaagccggtcgaagccgatcttctgctcgaagtttgcaggataaatcatggtgctatgtcgggtaaagggctaccgcagccgcctgagcgaatcgcgctcggctttctcggcggccttcgcggccttccggtcggcgcgctccttcatcttctcagggttgcgcccgaagagcgaaagatggacgtaacggcccggatactgtttgacgtcggccagcagtgcggagagattctcgctggcccggttgagcgaatcgtaaagttcgggatcgttcatcagcttgcccaccgtgccctcgccctgcgcgatgcgggccaccagatcgtcgagatgcccgacggtctgcgaaagcttgacggcgaactcctcttcggagaactgcgcgacgacccggtccacattgccgatgatgctgtccacgcgctgggcgttgtcgccgagcatgtcggagaacttcgaaaggttctccagcgcgcttttcaggttgtttttctcggcggaaaggatctgcgccatgtcgcccgtcacggagttgagattgccgagcgtcccggcgatattgccggcgttgtcctccatcagcctgttgaggttgtcgagcgcacgcgacagatcgccggtgagctgcgagaccttctgcttgaagaaatccagctccgaaccggccacatccatcaggtcgcggtcgcggctcgaccgcagcgtatcacctttatgcaggtaggtgtcggccgtgccgtaggtgatttcgatcgccttggcgcccatcagcccgttgctgaaaatcttggcttccgaatcggtcggaatgcggtactcgcgtttgatggtgaaccgcagcacgactttatcgctgcgggcggggtcgaacgacaggcccgtcaccgaaccgatcttgacgcccttcatcatgatcggcgaagcgttctgcacgccgttgatctggtcgtaagccgcataatattcgacattgcggctgaaaatatcgaatcctttcagaaagcggatgcccgcccatgcgacgccgatcatcgccacggcgaaaattccgatcttaacttcccttttcatatctcgtatgtttttatttcacgatccgagttccccggcagctcaccacaaaggcgtcggggaagaccttgcgcaccgccgccagttgtttctgcgccgcagcgcgggtctcgtattcgccgacgcaatacttataacggtatttgccgtcggccgtatattgctttaccttgccgcggtagctcttgaaccgctcggacgaagccggcacggtctgggggctggccagcacctgcacggtatagcgcagcggctgcgcgtcctgtttcggagccggctgcttcggggtttcggctttcggcgtctcacgcttcggggcgccggccttgggagtctccgttttcggcgtctgcgtttcggacgtctcccgctctgccggcgcagtcacggattcggatttggcggcggagtccttcgcccccgcctttccgccggccccgcgcacaggctccttgccgacgaccacttgctccggtttctgctccggcttaggcgccgcagcggcttcctcttcggcattgcgcgtttcgagcacataggccgaatagttcttcacgccctcgtaaatcgaacgggcgatctcggtctggcccttctccgacttcatgtaggcagcctcctgcgaattggagaggaatccgatctcggtcagcacgcccggcatgtcggtcgcatagagcacgcgcagcagctggggtttgatgccccgcgagtggcggcccgccttcaggtagttgttctgaatgcagcgagcgatggccatgctgtactcgccgtaggtgaactgcaggttctgtatataggcccgcacgatggccgccgtacgttcgtcggacatgtcgatcagatcctcgcggttgttctcgaacagcgcgttttcgttgtaacgctgctccttggggctttcgcccatgatcagcgtctcgacgccgcgcgcggccgtagacttggccgcattgacatggatcgaaatgaagaggtcgccgccggccttgttggcgatgtcggcacgcgcctgcaggtctttcgccttgtcgggtcccagcgccttgtccgtcttgcgcgtatagaccaccttcacgccgggcatgccctcctcgatcattttgccgagcttgagagccaccttcagcgtcaggtccttttcgctggttccgccgtagtgcgcaccgggatcgttgccgccgtgaccggggtcgatcaccacaacttcgactccgtgcgcaatattcccggccgatgccgcgttcgtaagaacggttacggccgcaaatgcgaataacaggaacagtcgtgtgcgcatatttaagagatcaagtgtaagctttctgtaattttttacctatctttgtcgcgcctgaaaaccccgcgggaggtcgccggagacctgattcaggcgtttttgccgacatgtcggcaaaggtacgaaaaattattggaattttggataaacttagggtaaaatatctgttttcggcggcgctgatcctgctcttcgcccagctggtgttcggcgcgtccgcaccccggagcatgttcgccgcagccgccccggacagcacccgcacccacgattccgttccggcatatacccttccggaagccgcggccgaagttcccgaagccgcccgcacacgcagcgaacgccgcgcgcaggcacgggccgcccgcgagaaagcccgccgccacgccgaattcgaagccatgtcgcaggaggagcgcgactcgatgttcagttcgcaggtcgattcgctcatcgcccgccgggccgactcgctggccggcaggcaggccgacaccgtggcccgcgactcggtcaagcggccgcgcaagcccggcgccttcctcgacgatccgatttcgggcaagaacaaggactcgctggtttacgacgtccgcaacaagatggtctacatctacaacgaaggcgacgtcacctatcagaacagcaacctcaaagccgactacatgcagatcgacatgaactccaagctgatccacgcatacggcaaacccgactcgctcgaaggcaaggccatcgtcaccaaacccgaattctccgacggcggcgaagccccctacaagatggacacgatcacctacaacctcgaatcgaagaaggccaagatcaagggcgtggcgacacagcagggcgacggctggctggtgggcggcagcgtcaagaagatgcccgacaacacgatcaacatcgagaacggaaaatatacgacctgcgacgaaacggatcatccgcacttctatctggcgatgaccaaggccaaggtcattccgggcaagaaggtcgtcacgggtccggcctatctggtcatggaggacgtgccgatctattttctgggcattcccgaaggcttcttcccgatcagttcgggtcccaagtcgggtctgctgatgcccacctacggcgaagagtacaccaagggattcttcctgcgcgatctgggctactacttcacgctgggcgattacgccgatctggccgtccgcggcggtatctacacgctcggttcgtgggaggcgtcggccgcatcgcgctacatcaagcgctacaagtacagcggcagtttcaacatgcagtactcgaacatcaagacgggagagaaaggcgaacccgactatatcaagcagagcaacttccgcatccagtggacccattcgcaggaccccaaggccaaccccggttcgaccttctcggcgtcggtgaacttcgccaccagcggttacagcaagtattcggcaaccaacctcaacgacattctcgccacgcagaccaactcgtcgatcgcctattcgaagaactgggcaggcacaccgttctcgctctcggcgaacatgtccatttcgcagaactcgcagaacaagaccatttcggtaacccttcccacgctggtcttcaacgtctcgcgcttctaccccttcaaacgcaaggagaaaaccggcaaggaccgctggtacgagaagatttcgatgcagtacacgggtaaaatgaccaactcggtgagcaccaccgaggacaaaatattctcgaaggagacgctcgacaacatgaagaacggcatcgaacacaacatcccggtttcggcgtcgttcaacctcttcaactacatcaacatctcgccgtcggccaactacaacgagaagtggtatttcaaaaaggtcgagctggaatggaatcccgtcaccaacagcgtcgacacgctgccggcgcagtacggcttctaccgtctatacaactacaacttcagcgtctcgacatcgacgaccgtgtacggcatgtacgacttcaccaaaaaacgccgcgaccgcaagattcaggcgatccgccatacgatcacgccgtcgatcggattctcgtacgccccggacttcggcgatcccaaatacggctatcagagcaactaccagtccgattcgaccggtacgttccgcccctattcgccctattcggtcaatgcctacggcgtccccagttcgggacgttcgatgtcgatgaacttctcgctgtcgcagaacctcgaaatgaaggtgctgagcaagcgcgacacctcaggcgtcaagaagatcaaactgatcgacgagctgcggctcagcggttcgtataactttctggccgactcgatgggactctctaccatccccatctcgttccgcaccacgctgttcggcaacttcggcatcaacctctcggcgacgctcaacctctacaagctgacccccgacggaaaactgtacgacaagctcttccttccgggacgtatcgaatcgacgggctggtcgttcggctacaccttcaaatcgcgtcaggaccgtacggaacgcgccatcaacgacatcacgagcattccgcccgaatacatgaacccgttctacgacccctacggcaacatggaccccgtactgcgaaggcagtacatggcccaaacctattacgacttctcgctgccgtggaacttcggtttcaactacacggtcaactactccatatcgcggggaaattatccgcccaaaggctataaaaagaacattacgcagacgatcggcttcaacggcagcgtcaatctgacgccgaagacgggcgtcacgttccaaggcggttacgacatcaagcaaaacaagctgacgacctcgtcggtctccatttcgcgcgacctgcactgctggcagatgtccttttcatggattccgttcggctaccaccgcagctggagtttcaacatcggcgtcaaggcggcgtcgctctccgacctcaaatacgacaagagtcagagtatgtacgacaatatgtactaaacgtacaaaagccgccgcccgtccggaaaatggaaacgccctgcctcggcagggcgtttccatatataatggggtgtccgcacaatcgggactgcccctgcggagctaaattttccggacttcaggttctttgcggtcgatgtagttcggatagcggaactgcggcatgccgagcgccatgacggcgcagatacggcggtctcgaagtcccagcatccggttcagcccgcctttcccgtcctgccgcacggcggtcagcacgaatcccatgtagacctgactcacaccgagcgattcggccgtcagcgaggcgttctgataagcgaggttcgcgtcctcggcgccgaagcggctctccttgggcgcatggatgaacagcacagccgtcgcaccccgcaaaatgcggtcgacgccctgctccgcatattcgcggcgcatccgtctgaacgccggaatgtaacggtaaacgcccggcagcagccggctcagccaaggccgcacgagcgggttagacagacgcttcacgatccggccgaagacgcccagcgtatattcgacgatttcgcgccgcatagcggggtccgtcaccagcgtataacccagctgacgggcgttggtcgccgtcggcgcgcggtcggcggcggcaacgatgcggtccagatactcctgcggcacgggacgctgggaaaaaacccggttcgaacgccgcacggcgagcagcagttcgacctgttcgggcgtcggcaaagccgcatagtcgatcggatgcaccttctccgccgggaaatcggcatgttcgaccgcccccgtgggacatgccgccgcgcaatggccgcagacgatgcagttttcgggtttatgcagcgtcaccgcagccccggccttctcctgaacgaaaatctgcgacgggcacaccttcacgcagcggccgcagcggatgcagatcgcatcatttactcgaatcgtattctccatcatatctttcaaattttttcaatatctttggcatctatccgacaaacagcatgcaccccatcgtcatcaaacatttcagcgaaatctccgccgccgagtaccaccgcatcgtgcaggcccgcgaagccgtctttttcctcgaacagcacatcaccgaacccgacgccgacgaggtcgatccgcagagcgtctttctctggacggaggaggacggccgcgtcgtcgcattcctgcggatcatccccgcagggatcgtctgcgccgaggcatccgtcggacgggtgctggtagacgccggttaccgccgccgcgggttgtgccgccgcctgatgcacgaagccctgcggcatatcgcccggacgtggggtccgcagcccgtccgcatctcggcgcaggagtacctcgtcggattttacgcatcactgggcttcgaagccgtttccgggacttacctcgaagccggcatcccgcatgtcaggatgctgagacggtaacaaaaacgattccggcggcaaaggaaatccctgccgccggaatcgtttttaggattaatgcttcaccgacgccatctccgcggggttgtgcttgtatttgaacaccaaggcgaagaccacggccaccacgagggcgtagcctgcgaagatgtaccacgaatcgggccagccccacgcatcgacgacggcgcctgcggcgtacgagccgaagaaggcgccgaagccgttggtcatgatcatgaagacgccctgcgccgaagaacggatttcgcggctggtctccttctcgacgaacagcgaacccgaaatgttgaagaaatcgaacgctacgccgtacacgaccatcgagaggatcaggaacgccgcgcccgaaccgggattgccgatgccgaagaatccgaagcggagcacccacgccagcatcgaaatcagcatcaccttcttgatgccgaaacgccggaggaagaacgggatgagcaggatgcagaacgtctcggacatctgcgagagcgacagcaggatcaccgagtgtttcacgatcgccgaatcggcatactgcggcatcgacccgaagttctgaatataggtatcgccgaaagcgttggttatctgcagagcggcgccgagcagcatcgagaagatgaagaagacggccatacgcttctccttgaaaagcgcgaatgcgcgcagccccagcgtgtcgatccacgactgcgacttgacgttgcggtccacgggacatccgggcagcgagaaggagtagacggccagcacgaacgacaagaacgccgaaacatagagctgccaagcggtgagcttgatctggatgccgccgatatgcgtcagatcgacgaaccacatcgcggcgatgaatcccacggtcccccacacgcggatcggcgggaagtgtttcacggtgtcgagtttcgccagatcgagggcgttgtaggccaccgagttggacagcgcgatcgtcggcatgtagaacatcacgctcagcagcatgcaactatacaaaggcgcataggccgtctgcgaagccgccgccacgaggaaggcgccgctgatcaggtggcagatgcccagcagcttctgcgccggaatccagcggtcggctatgattcccattacggcaggcatgaacagcgaggcaatgcccatcgtcgcgaagaaactgccgatctgcagtcccgtgaagtcgagtccgccgcccagataggcgcccagcgaaataagccacgagccccagatggcgtactggaggaagttcataacgataaggcgaaacttaattcccataattctctgattttacgttattttaatttctggttcattttagttcggaaacgattaaaacaaatgtacgaaatttttttcggaattttctttgcaattgaaaaataaagttctacttttgcatcaccaaaacgtcattgagctatggtgtaatggtaacacaacagattctggtcctgttattcttggttcgaatccaggtagctcaactgaaaagcgaggaattatcctcgcttttttcattttatccgccggattccgctgtttcgatttccgaaacaatccgcaggcccgataccgctaatcgacactgcggcaaaaaccggaccgccgattttcacaatgcgcggccgcaccccgccgctgtttcgaaataaggcgcacaaactcccttcgatttctgttttccgtcttgtttgacccgccgaaatgcagtacgtttgtattgcacaggagatatgaagaattcaagtgggattgtgcaaggggcgggttacacccgcaaaagtgacgcaagtggaaaatccgtcaggatttgaagcacaggatagacatatggagctagacgcaaggttccgtttattcctggaagacttcgggggagggttctaagccctccctttccaattctgccacgatcgcacgctgacgcttgaagaaatgaatccgctgcagctccccgctgcacgaaaccagcgtcgcaaaacggctcagcgacgtaatccaacgcctgacatgctcgaacatgcccggatcggcgcttcgcagcgaattgatcgagaacgcctcgatacagctcgcacggtagtggcgcgccgcgacatagcagtaagtcgcctcgatatccatgtccgatatgtaaatagacaccggcttcccgctgcggaactgtccggcaacggctatctcctccagctcgtcgagcagctgcagcagttcgcccttcagcatctcgacgctctggtcggttatcaggtgcatgttgcggaacgcgcagatggcattgacccagcgcttggtgcagctgccgtcgaacaccagcgtcgtcgcaggcatcagctgcgcctccttcagcaggtcgcggtaactccgcaaaagcgcatcgggaactttcatatcctcgaatttagtcgtcgaacaatcgacaagcccctgttggtaaagccacttgaagagtttgaaattggtcagtccttcgtagcgcatgtaaagcatccgcgggaacgagtttccggcgatagcctgctccgcatcggcatcggacgacacctcccggtaaaaaagcgtatcctgatcgataacgcccgtatagtcttcgagcgccgtatggtaatcgttgaagctgagacggaaaagcacgtttccgaaatcgacggcaccgacagcgcggtcgagcgaaaaattcatctgggccgaaagaacggctgcttccccgaaggtaaagggcacctcgccgcgcagacggcggtaagccgcttcgcggccgatgttgagtttatcggtcagtatggccgccggattggtatattccggggtaccgttttgaatagcggcgatcagcgccgcattcagtttgtcaagaggcatagtacaagtgttaaatctaaatcaaattctcaatcccaaccgcaaatttagtaaaatattgacaaattgatatttttcggacaaagaaataaaacaaaagggaaccttccggaaggttccctttcatttgtctcggatgcggcggtcttactttcccaaccccatcttttcgatcagcgccttggtctccggtttgtggccgcggaagcgtacgtacagctccatcggatgctccgtaccgcctttcgaaaggatgttctcacggaacgatccggatacctcgcggttgaagatgcccttctccttgaaaagcgagaaagcgtcggcttccagcacctcggcccacttgtagccgtaatagccggcagcgtaaccgcctgagaagatgtggccgaaagccggggccatcgccgtccccggcacgacgggctggacctgcgaaggggccatcgacgccacttcgaactgctcgacgtcgccctcgaagggttcggtgatcgtatgccatgccatgtcggtcaggccgaacgaaagctgacgcacgttcaggtaggcggccagatagttctgcgccgcgataatgcgttccacgatttcggcgggaatcggctcgccggtctggtagttcacggcccacaggtcgaggaattccttctcggtagcccagttctccatgatctgcgaaggaagctcgacgaagtcgcggtaaacgctcgtaccggtctgcgactcgtatttgccctcgcccagcatgccgtgcagggcgtgtccgaactcgtggaggaaagtctccagctcgtcgaacgtcagcagcgacggcgcggtctcggtgggtttggtgaagttcatcaccagcgacaccagcggacgggtctcctcgccgtcctcgatcttcgtgccgcggaattcggtcatccacgcacccgaacgcttcgactcgcgggggaagaagtcgaggtagagcacggccataaagcggccgttctcgtcagttacgtcataggccgtcacgtcgggatgatagacctcgatcttgtcgttgggcgtgaaattcaggccgtaaagcttgttggcgagcatgaacacgcccttcttgacgttttcgagcttcagatagggcttcacgacctcgtcgttgagcgcatatttctcgtccttgtatttttcgctgtaatagccccagtcccacggcatcagctggcccttgaagccgagcgaggcggcatagtcaccgatcatccggtaatccttgtcggcataggctttggtctcgccgagcagttcgtcgaggaacgccgtgacggtcggagtattctcggccatgcggcgttcgagcacgtaatccgcgtagcacttgtaacccagcaggttggcgatcttcaggcgcaggttggcgatctgcttcacgatctgcgtgttgtcgttctcgccgcccagcgcgcgcgaattgtaggcgcgccaaagcttctccttcagggcgcggttcgacgaataggtcatgaacggcacatagctcggcgcctgcagcgtcacggtccaacccttctcgccgcgcgccttggcgtcggcggccataccctcccggacgaatgcgggcagttcggcaacgaccttaggatcggtaatgttgatcgtaaaggcgttggtcgcggccagcgcgttctgaccgaactgcagggtcgcggccgacagctcggaggtatacttgcggtaaagctccttatcggcgtccgaaagggcggcgccgttgcgggcgaagctctggtaggtgtcttccagcagtttcctgtcctctttcgaaagaccgcggccgggtttctcgtaaaccgccttcacgcgggcgaaaagctccggattgagcgaaacgtcgttcgacagctcggtgagcttgggctgaacgcgcagcgcgatctcctgcatctggtccgaggtcgcggcttcgagcaggttgtagaaaacacccgaaatgcggtcgagcagcgccccctgacgctccagcgccacgatggtgttgccgaaggtcggtttcttggggttattgacgatcgcctcgatctcggcgcgcgagcaggcgatggccgcatcgaacgcaggctcgtaatccgaaagctcgatctgcgagaacggcggcgtctggtggggcgtgttccactccgccagcagggggttggtggtatccagttcgggcagctgcgctttgggaatcgaattgtcggcgcagcctgccgccatagctgaaaaggtcataatgataagtgcttttttcatgttactgcaaatattgggttatttttcacgattcgtctattgcccgtccgattccggttcgagggggatcggggtctcttcgtccggctgcggatcgggttcggcgagcaggccgcggccgcggagcatcgcccgcttgtcgggatcggccccgcggaaggcccggtagagcgtcatgccgtcctcggaaccgccgcgggcgaggatcttggtgcggaaatcggcggcgatcttcttgttgaacaggtcgccgctctcgcggaaggccgcgaacgcatccttgtcgagcacttcggcccacgtatagaagtagtagcccgccgaatagccgccgtcgaaaatatggctgaaatagggataacggtagcggggttcgatctgcggaatcaggccgcgcttctcgttgagcgcccggcgctcgaagaccatcgggtcgaacggttcgtagtcggtggtcgagtggatgtccatgtcggaaagcgacgcggcgatcagctccgtagtggcgaaaccctgattgaagagttcgctcctgcgcagtttatcgacgaggtatttgggaatcacctcgcccgtgcggtgatgcacggcgtactgtttcagcatttcgggttcgaaagcccagttttccatgatctgcgacggaagctccacgaagtcgccctcgacctccgtgagtccgcggtatttcacgtcgtggaacaggaaatggagcgcatggccgaattcgtggaagagcgtttcggtctcgtcgagcgtcagcagcgcaggggtgttgcgcaccggacgggtgaagttgcagacgatgctcaccacgggagcgacgcgctcgccgtcccggtaggtctgttcgacatagttgccgcaccacgccccctgactcttgccgtcacgcggaaagaagtcgaaatagagcacgcccagatgcgactggtcggcgtcgagcacttcgtaggcgatcgcctcaggatgatagagcggcgccacgatgggctggaaggtgatgccgtaaagccggttggcgaggtagaaaatgccgccctgcacgttttcgagcgagaaatagggccgcagcatctcctcgtcgagtgcatagttctgcttgcgcagtttttcggcgtaataccaccagtcccacgactcgaacgtcgcgcccggaacgtccttctgcaggagtttgtccatctcggccagctcctccccggcgcggtcgagcgccggcgtccatatctggtccagcagcgcgtagaccgcatcggtcgtgccggccatctcgtcggccacgacataggcggcgtacgacggatagcccagcatcttggccttctccgtacgcagacggatgaagtcgttgatgagctgcttgttatcgtactgatcgccgttgttgcagcggttcaggtaggccttatagatcttttcgcgcaggtcccgcttggccgaataggtcaggaacggaatcagactgggcttgtggagcgtgaagacccacttgtcgcccttgcccatcgcctgcgccttctcgcgcgcggcgtcgcggacgcccgaaggcagtccctccagatcgtccgccgtcagttcgagcgcgaagttgttgttctcggccagaatgttgttgccgaacttcacggccgtaagcgacagctcgccgttgatctccttcagccgggctttctgtccggcgtcgagcagggcgccggagcgcacgaaagcgtcgtaggtcttcctgagcagtcggctctgctcggcgtcgagtcccagcgacgcgcgccggtcatagacatccttcacgcgggcgaaaagtttctcgtcgagccggatcttatcgcggtgcgccgagagcaggggcatcacctgctcctgcagggcctgcatccgttcgttggtctcggcggcgcagagcatgccgaaaatcagctcggtctgcgcaagcatctgtccggcgttgtcgtaagccagaatcgtattctcgaacgtcggctcgtcgttgttcgaggtgatggcgtcgatctcggcgtcgtgcagcgacatgccgcgctcgaaggcgggcatgaagtgttcggcgcggatcttatcgaagggcggcacgccgaaaggcgtgtcccactgggtgaagaagggattctccccggcgcttttcggggagttgcatgacgcaagtgccataagcagtaagagtgttgtgaataaacctgcaatacgtttcatctattcatgttattttatgtaactttgcgagctgaaaatacggacgcgcgcaaggcatccgtacaatgttgcaaagttagtaaattataagaggtatgcaacttttttacgcccccgacatcacgccgcccctccatacgctgagcgaagaggagtcgaaacactgcgtgcgggtgctgcgtctgggacgcggagatacccttcatataactgacgggaggggcaatttattttgctgcgagattacggacgacaatccgaaacgctgcacggtgcgcgtcacggagacccgcgccgggtgggaggcgctcccctattcgctgacgatggccgttgcgccgaccaagaacgccgaccgcttcgaatggttcctcgaaaaggcgaccgaagtgggcgtcggcacgatcatcccgctcgaaaccgagcactgcgaacgccgggtcttcaagcccgaacgcggcgaacgggtcatcacggcggccatgaagcagtcgctcaaagcctaccgtcccacgctgcgtccgctcacgcctttcggcgaagcggcggccatgcccttcgaagggcgcaaattcatcgcccactgcgccccggcgcagtcgcccgaaggcaaagcctacctcccggcgacgctccgcaggggcgaggcggcgctgatcctgatcggtcccgaaggcgatttttcgcccgaagagatcaccttcgcacgcgcgaacggattcgaggagataaccctcggcgcgcagcggctgcgcaccgaaacggccgcagtggccgcagtggtgatggtctccgtggcaaacggttagcgatacggacaaaacggtccgcatcgccggttccgccgcacggcggcacggtataaacagtataattacacacaaatagctcatgtttctctattcacttctcgcactggaggtagtgacggcgctgatattcgccgcccctctcaaggccaaggtgtgggcgacgctggcagtcgtcgcggcgggagcgctctgggcgtcggcaacggccgtcggagtgcttgccggcggacacaccgtacggttgtgggcgaccgacgtcttcctcttcggaagcgacgcaggctcgatggaccctctttcggcgctgttcgcgctgatcgtctcggtcggggccgtcgccgcggtgctctactcgcggggatatctcgcgcattacctcggacgcaaatccccggcccacatctcgctgcactacaccgcgctggcgacgatgttctacgccatgctgggcgtagtgacctccgaaggcggattttcgtttctctttttctgggagctgatgaccgtcgcatcgttcttgctgatcctgttcgacgccgagcgccgcgaagtgcgccgcgccgcgctggcctacgtgatcatgatgcacgtgggattcgccctgctgctcatcggcttcgtgcggttggacagcgtctgcggatcggccgacttcgccctgttgggcgaatatttccgcacgcagcccgccctgccgctgttcgtggtcttcctcgcgggcttcggcatgaaggccggcatgttcccgatgcacgtctggctgcccgaagcgcatcccgccgccccgtcgcacgtctccgccctgatgtcgggcgtgatgatcaagacgggcgtctacggcatcctgcgcgtcacggcgcagatcgccgacctgccgacgctccgcaccgcaggcctgatcctgctcgtcgcaggcatcgtcacgggactctggggcgtgatcctcgccgcggcgcagaacgacgtgaagcggctgctggcctactcatcgatcgaaaacatcggcatcgtcctgatcggactgggcatcgcggcgctgggcaagagttcgggcaaccagctcgcggcgatctgcggactttcgggcgcactgctccacacgctcaaccactcgctgttcaaatcgctgctcttcttcggagccggcaacatactttcccaaacgcacaccacctcgctcgacgcgctgggagggctgggcaggcacatgcccgtcacgggcctgctgtttctggccggcacgacggccatctgcgccctgccgccgctcaacgggttcgtctcggaactgctgatctacctcggcatgctcgacggcatcgcttcgggcagcgacgtgctcgcttcggcggccggactggccgcactggcgctgatcggcggagttgtgattctggccttcaccaagctctacggcacggtgttcctcggcgcgccccgcacgcacgaagtggccgaagcctccgaggtcgataatttccgcatcgccgccatggcgctgccgctggccggaatcctcttcatcggactctttccgcagaccgccgtgagcgcggtaacccgcgccgcgggatttttcatccaccaccccgccgatgcggcggactacctgctgtcgcccacgctggcggccgtcagccgcacggcatggctgctgattctggtcgtcggactcttagcatggcttcgcagccgcgccctgcgcacgcgcaaggtgaccgacggcgcgacgtggggctgcggcttcacctcgcccaacgtgcggatgcagtacagcggcgaatcctactccgaaggactgcagtcgatcgccacgtcgctcacgcagaacagcggcgaaggcggcgccgtcggcaaaggcgagattttccctgccgcgcacaacttcgacatacgccacaaggaccgcttcgacaaactcttcgcggcatggtgggtcgaactgctgcgcgtgataaacaagcgcgccatgcgcctgcgtacgggcaagatcaaccactacgtgctcttcgcactggcgtttctggtcctgatattcctgttgtccatctttaacctgatctgacgatgacggcactcaatacactcctgatcctgctgacggccgtctgcattccgggcctgataaaccgcacgcgggccgtgctggcgggccgccggggcatccgcttcgcccagcacctctacgacgtgcgcctgctgctgcgcaaaggcgcggtctattcgacgaccgcttcggcgctgttccgcgccgtgccgtcggtctacctcggctcggcgatcgtcgccgcgctcttcatccccgtcggggaactgaaacccctgctgtcgttcgacggcgacatcgtctgcttcgcctacctgatggctctcggccgcttcgcgctgatcctcggcgccatggacaccggaagttcgttcgaaggcatgggcgcgagccgcgaagccctctacggcgcgctggtcgaaccggcgctcatgctcacggccggcacgctggccctgctggcgggacacacgtcgttcgcccggatcttcgccgaagcggcgacgggcgacctgcagctgaccgtcctgctggtgctcacggcctacgtgctggtgaagatcgtcttcaccgaaagcggccgcgtaccggtggacgatccccgcacccacctcgaactgacgatgatccacgaagtgatgtgcctcgactactgcggcacggacctcggcatgatcaaaatcgccgggtggctcaaaaccgcggcgctctcgatgctggcggccgacgccgtgacggcggcgctctgcccccactggtgggccgcggcgccgctggcggtactcctcaccggactctcggtcggcgtggtcgaatcgacgcaggcccgcaacaaactctcgcgcaacaccacattcattctcaccatcgcggctctggcggctctggttttcttcacgggctacctgctgcaactaaacatcagcatccaatgatactcccgctggtcatactctacgtcatcacgctcgtctatctggcgatcaccgaacgtttccgcaacttcgcgtcgatcatcggactgcagggatggattctcttcgccgtcgccctgctgcgcctgcacgccatcaatccgctggaactgatcttcatcgccatcgagacgctggcgttcaaggccctgctggtcccggccatcctcttcgccatgatccgcaaaaccaagatcaaccgcgtacgccgctccggatcgtcgcagtcgggttcgctcctgctgtcgctcatggcgctggcggtcagcgcctcgatcacctactacatcgccgactcggccatcgacctcgtcttcttcggcgtggcgttatacgccctgctgagcggcctgatcctgatcgtcctgcgctcgcgcatcttctcgcacatggtcggctttctggtgatcgagaacggcgttttcctcttttcgatggccataggcgtcgaaatgccgctgctcatcaacatcgccatcctgctcgacatcctgatctcggtgctgatgctgggtatcttcttcaccaagatcgacggcaagatacacgccgacgacgccgattcactcaccaacgtaaaggactgacgccatgatatattacctgatcgccagcatcctgatcgccgtcacggcgctcttcgcccggaccaaacgtgcggttctcgccgccggcatactcttctacgccgttcagatcgccgccgcgggcctgctgctctggggcgggctttacgacacgacctcggccgcattcttcaccttcgacgcgctcggcacgctcttctacctgctgctcgtcgtcgtctcgatgtacgtcttcggccactcggaagcctacctgcaaggggaggacctccgctcctaccgtctctatttcgccctgctgatgctgctcaccacggccatcgccggagcctatttcgccaacaacctcgccgtgacgtggattttcctcgaagcgacgacgctctgctcggcgggcatcatctaccaccgccgcacggcgcaggcgctcgaagcggcgtggaaatacgtcttcgtctgctcgacgggcatcgccatggcctatctgggcatcctgctgctggccgccgcgaccaagtgcgaaacgctttcgtacgaagccgtcgccgaagcggcctcatcgggcaacccgctctacctgaagacagccttcctgctgattctcagcggatacagctgcaaactggagctgttcccgctctacacggtcggcatagacgccaatttcgcggcccccgcgcctgcttctgcgctgatctccacgggactggtcaacgccggattcctcgcgctgctgcgcgtctacaaactgctcgccggaacggaggttttcccgtgggtgcgctcggtactgctcatcgtgggcattctctcgctgggcgtgggcgcgcttttcctgcgccgcaccaacaactacaagcgcttcctctcctactccaccgtcgagaacatgggcatcgccgccatcgggctgggcatcggcggcatcggcgtatgggcggcgctgttccacgtattctgccatacgctcatcaagagcagtctcttcctgcagatggccgtcgtacggcaggtgtatgacagctaccgcatcaaccgcatcggcgactacatccgcatcaaccgcgtcggggccgtcggcctgctgacgggcatggtcgtactgctggccttcccgccctcgccgctgttcgtctccgagctgatgatcctcaagcaggtcatcaccgaccggaactggtggctcgtggcgggactgctgctgctcatgtgcatcgtcatctactcgttcggatcgcgtctgatccggctctgctatcagcccaatcaggaccgtctgcacccctcgaaagcccacaaggcgctctcgtggtcggccctgtcgctgctcgcggccgccgtcgtgctgggcatgtggcagccggaacttctgcaacggatcatcaccgaaatcgccgcgttatgaaatattatataaccgataatacagctcccgccgtaccgctgtcggaaattcccgaagcgtcgtacgccgaattctacgccgatctggccgccaagctggccgacgcgcgttaccatatagcccactatttcgccctgccgctcggcgaccggctccggttcttctgcctgctgctcgacgacacggaggccaaggtgctgatcgcgtcgcacgccatggagtactacgacgagcaggaactcccttcgctcacagccctgcacccgcaggtgcacccgttcgagcgcgacatcgccgaacgttacggcgtgcgtttcgacggcatgccgtggcccaagccgctgcgttttccgttcgaccggttcgaccgcggcagtacgatggacaactaccctttctacacgatggagggccgttcgctgcacgaagtgaacgtcggcccgattcatgcgggaatcatcgaaccgggcgcgttccgcttcatctgcaacggcgagcaggtgctccacctcgaaatcgcgctgggataccagcaccgcggcgtcgagcatgaattcgagactacggccaaccgcctgcggcagatgtgtctcgcggaagccgtcgcaggtgacagcgccgtgacccacgccgccacgttcgcgtcggcggtcgagaaactcacgggcggcgtcccctccgcacggctcggcgtcgaacgcgccgtggcgctcgaactggaacggatggcgatgcagatcgccgacacgggcgcgctctgcatggacgtcggctaccagctgggacaggtggcctgcgaagcgctccggacgatgacgatcaacaccacgcaggcgtggtgcggcaaccgcttcggcaaggggctgatccgccccggcggcacgaaccatccgctgacggccgaaaaggcggagacgatccgccgcaacgtcgcgcagatcgcccgccgttacgacgaagtgcgccgcgacatcaagtcgtcgccgacgctgctggcccgcttcgagcagtgcggcatcgtgccgcgcgaggagatgctccgcatcggcggcgtgggtcaggcggcccgcgcgagcggcgcggcccgcgacatccgcgccacgcacccgtggggcgttttcgcaggaacgatccggcacgaaagcatcgtcaaacgccacggcgacgtgatggcgcgtctgatggtgcgctgccgcgaggtgctgcaatcggccgggtatatcgaccgcctgctggcggactatgtccccggaagcctgcctgcacccgattatgccgctccgcccgcacccgattcgctcgcgttcgggctggtcgaggggtggcgcggcgaaacgtgccacgtcctgctgaccgacacccaaggccggatcgccgcctgccgcatcaaggaccccagcctgcacaactggctggcgctggcgctggccgtgcgcggcgaaggcatttcggacttcccgatctgcaacaagagtttcaacctctcctactgcggccacgatttgtaaagacgaaaaacatgatactaccgaaaataaaagtactgcgcagccacgggaaacaatacattcccgatctcgacgccgtcgaactgaccgaagagttccgcggacggcccgaactgaccgaaaccccggacaccgcggacctcgaacgggcagcggcaatctgccccaccggggcgctgaccaccgcgccgctctcgctcgacctcggccgctgtctcttctgcggcgaatgcgcccgcacggcgccgcgcaatatccgcttcacgaacgactaccgcatcggctcgccgacgcgcgaaggactcgtcgtgcggcccggcgacaaatgcgtgcggttcgaccccgcggccgtacgccccgaaatcggccgctacttcggccgctcgctccaactgcgcgaggtctgcgccgggggcgacgcatcggtcgaaatggaactcaacgccacgggcaacgtcaatttcgacttgggacgttacggcatcggcttcaccgcctcgccccgccatgctgacggcgtggtggtgtccggcccgatcacggtcaatatggctgaagcgctccggatctgctgcgatgccgttgccgatcccaaaatcctcgtcgtctgcggctcggaagcctgttcgggcgggctgttcgccggcagccgcgccgtggaccgcaccttcttcgatacgcacgccgccgatctctggctgccgggcgccccgacgcatccgatgaccttcatcgacggcatcctcaacctgttaggcaagaaaaaacgcgaatgaccatgcaacgactccgaacgattttcgcctcgttcttcaagatcgggcttttcaccttcggcggcggatacgccatgctgccgctcatcgagcaggagctgatcgccaagcgcggatggatcgagcacaaggaattcttggacctgctgaccctcgcgcagtcggttcccggaccgatcgccatcaatacctcggtattcgtcggctacaagatgcggggtctcaaaggtgccgtcgcggcactgctgggcagcgtcctgccgtcgttcgtcatcattctcgcaatcgccctgctgttcgccgacatccgccacaatccggtcgtggacgcggccttcaagggcatgcgcccggctgtcgttgcgctgatcgtggtgccggttttttcgctcgcacgcggcatgcactggtcgatgttcttcgtcatcgcggcggcggccttcgccgtatggtatctgggctggtcgccgatctacatcctgatcgccgcggccgcgatcggcatttcatggacgctgttcatcaccaaaaaggcaaaaaaatgatcttctggcaactcttcgcaagctacctcaaaatagggttcttcggcttcggcggcggatacgccatgctctccctgatccagaacgaagtggtcgtccagcacgcatggatgaccaacgccgaattcgccgacatcgtggccgtctcgcagatcacgcccggtcccatcgccatcaactccgcgacctacgtcggctataccgtcggcgcgcaggccggaaacgagtggtgcggcattctgggggcggcgctggcgacattcgcggtctgccttccctcgctgacgctgatgctgctcatcacgcgcttcttcctgcggctcaagcaaaatccgctcgtcgaaggagccatgaaaggcatgcggcccgtggtgatcggcatgatcgcgtcggcggcgctgctgctgatgttcccccatagcaaagcccccgacgagcagaatttcatcgacggctggagctgggcgctgttcggcggcgtcttcatcgcttcggtcaaaaaagtgaatcccattctgttgatcgccctctcggccgcagcgggaatcctgatctattacgtattctgaccccgtccctctcctataaaaacggccggagcgcatacgccccggccgctgttttcccaacagtcgccgatcacaccacggcgacgaccgccgcacccgccagcagcaggaacaggaagactccgagacacaacagccccagaacggctatgaacgtgccgatacagccccagcgctgatcgccgtccggcagcggatcggtcagcagggtgatgatcaggccgacgagcggcgtgaagatcaggctcagcaggaaagccagcccgaaaccgatgcgccggcggctgccgatgatacccaccagaacagccagcaggcagccgctcaacaaaccgaacaacagagtcagaatagccataatcgaaatcttttagcggatgaaacggtaataggtccccaacggcagctgcttgcccgctcggtcggtgaaacagagttcgccgtactgctcttcgagcagcgcgccgaaagcctgccgcacggcggtacgggccagcgtggacgaaaggcccatcgagtagaggttcaacacgagaaacgccccctgcggctccagcagctgcgcgcagcaggcgagcatctcgcagatattctcctccagaatccacttttcgccgttggcgccgcggccataggccgggggatcgaggatgatgccgttgtagcgactgccgcgccgcacttcgcgccggacgaatttgagcgcgtcttcgacgatccaccggatgccgtccagcccgctcagttccatattctcgcgcgaccacgtcaccacctgcttcaccgaatcgacatgggtcgtctccgccccggcggcacgcgccgcaaggctcgcgccgcccgtataggcgaaaaggttcagcacgcggggcgtaaccggttttcgcggcgcagtccggcccttcggcgcagctccggacaggacgccctcggatgcggttgtggccggagtgcctgcaggagcggttgtgtccggcatcgcatccggcgcctttccgcccgcaatccccatcgcagcggccccgcccgaagccagcgcccggcagttgtcgtagatgaaattccagttggcggcctgctccgggaagatgccgacgtgcttgaacgaggtgagtcccagccgcatgcgcagccgcatccccttatagacgtaatccaccgtccagcgcgagggcatttcgggaccgagacgccactcgccgcgctcctcgctgcgcgtatcgcgcagaaaggaggcatcggccgcgcgacgccactcctcctcggagagcgtccgccgccagatggcctgcggttcgggacgccgcgtaacgtaacgcccgaagcgttcgagtttctcgaaatcgcccgtatcgatcaattcgtaatccccgaaagcgggtgtcagctgttcttgcataaaaaatcttctttattttaccgtcggccgaagcaggaagcggaacgtatagtcgccgtaaggcacccggaaccgctcctccggcagctgtccccagctgtcgatacagcccagtccggactgccgcagatcgaagttcacgaacgtcgcgtcgcgcgccgtgagcgttcccgaatgctgctggggcgggaagttcgacacatcgagatcggccgtcgcatagggcagcgccgatgccgagaagggagcgtcggagaggatcgtcagccccgtgcccgaactgtcggccacggtccaccagcgcacgtcgctcttggtgcccgactcctgcggacgcacatattcgtcgtgatactggtcggcgacacgctgttcgtaaagccccagatcggccgacgagagccggtcggcatagttttcatgttcgccgcggccgtagtagatcacgcggtcgtaacgcgccggcatcgtgagcgtcatgccgtagcgcagcaggttgggaacttcggccgacttgtcggcggtcatacgttccgtcacctccatttcccccgcgccgttgatccggtaggtcagcgccagcgtcgctttcacggcgggaagctcgtaaagcgcttcgacgaccgccacgccgtccttcacgccggcatcgaatttcgtgagtttcagttcgggattcttccagaccgcgagtttgcggtcgagctttgcgccgaggtcgttctcggtcggagcgcgccagaactgcggacgcagctcggcgccttcggccatcagtgcgcggccatcgacgtcgtaggcgctgaggaagccgtcgcgcgagaagaacatctcccacgtctggcctgcaacccgcgtgccgcgctcccatacagtcacctcgacgggacgttccgacgcagcaaggccgaacccggctttgcagtcgtactcacgcacgacgaactgctgctgcgccgccgtatggccgatatccaacagcggccgtttgtttttcagtttgtaggccacgttcaccagcagctccttggcctgcgggcaaaaatcggcggaagtaaagcccagcgtataggtgcggcgctgccggggcgcgacatcgagttcgccgatacggccggccttcacgacccggccgtcggcgaccagttcccacgtcagttcgtaatcgtccagccccacgaagaagttctcgttgtacacctccacgcggccctgcgccggatcgagaagctcggtccagatattctggtactgccgcttcacctcataggcgtgcggatgccacgtgcggtcgggcgcgatgatgccgttgcagttgaacgaattgtcggtcgcgtcgtagttgttgaaatcgccgccgtagaggaacgacacgcggccgttcttttcgtagcgggcaagtccctgatcgacgaagtcccagatgaatccgccctgatacgacggatattggcgcaccagcttccaatagtggtccagaccgcccatcgagttgcccatggcatgcgcgtattcgcactggatcagcggtttggaggggttgttcttcaggtatttctcgcactgcgcatagtcccagtacatcgggcagatgatgtcggtaaacgcaccgtcccgatcgtacacggcgcgttcgtaatgcaccggacgcgacgcgtcgtaatccttgatccagcggtagcaggcctcgaagtttggccccatgcccgcctcgttgcccatcgaccagatgatgaccgaggggtggttcttgtcgcgcagcaccatgcgctggttgcgctccatatgcgcctgcgcgaaggcgggcaccttggccagcgtctcttcgccgtaacccatgccgtgcgattcgacgttcgcctcgtccacgacatagataccgtactcgtcgcagagttcgtaccactgcgggtcgttgggatagtggctcgtacgcacggcgttgatgttcatctccttcatgatgcggatatcctcgaccatccgctcgcggctcaccacatagcccccgacggggtccatctcgtggcggtcggcgcccttgatcagcacgggctgtccgttgacgagcagctgcgcattccggatctcgaccgaacggaagcccacgggctgcgtcacggtttcggtcacgttccgcccgtcagacacgtcgatccggagcgtatagagtttgggcgcctcggccgaccacttcgcgggatcggcgacacggaagagacaccccgctttgccgcccgccggcctgatctgctgttcggccaccgcctcgcccgccgcatccagcagcgtcaggccgaccgatttcacacgcggagtcgtctccacttcgacgcgcagctgggcgtccctataatcggcgtcgagcgtcggggtgatgcgcacgtctttcaggtgcgccttgtcgcgggccgtcagcgtcacgccgcgggcgatgcccgaaaagcgccagaagtcctgatcttcgaggtaggtgccgtccgaccagcggaacatctgcagggcgatcaagttttcgcccggcttcacgaatttcgtgacgtcgaattccgccgcaagcttgctgtcctcgctgtagccgacgaaacggccgttgatccagacatagacgttcgacgtcgccgaaccgatcgagagaaaaatatccttgccgctccacgatgccggcacctcgaacgtatgccggtaggaaccgacatggttttcggcgtcgggcacgtgcggcggatcgttctcgaaattgccgcgccacgcatagccgatattcacgtagagcgggtcgccgtaaccgttcagctcccacatccccggcacgggcatcgcgccccacgacgcatcgtcgtaatccacctgccagataccggagggacgctccgaagcgttgcgcacccagtggaatttccacacgccgtcgagcggcatgctctcgcccgccgcaaaggtcgagtgcatcggcaggcggttgatttcattgacggcagggtcctgccattcgcggccggtctgggccgaagcggccaacgcgcccgaaagcgccgccgcaaggatcaagaaagtctttttcatcggttatggttatggttttggtttcgcagtctctttccgggtgcagtccaccaagctcatttcgcagcggacgcagtcgaattccagccggtagcggttcgcgccgcgctccagccacaaatcgcctttcagccgcggccgctccttgaggcattcgccgatttcgcggcggatgcagtaggccgagcgcatcacccgatgcccggcggtcgtagccgcgaggtcgagtccccgctcgatttgccggacgccgtggtcgcggtaaaacgcttcggcaagacggttggtgacattctcttcggccgaaagcgtctccgacggatactccgccgcgccctcaggcagaatccggtgctcgacgccccgcgccagccgggcctgcagcaaagccgcaagcccttcgcgccgcagctgcgacgccagcgacgccggaacgaaccattcggctccctgcacctcggccgagcgcaccgcaaaaatcgtatcgccgctcttcatggcctgcgtccgcacagcggcggcgttcgcttcggcattattcgccggctccaacgcaacgcggcgttcggcgacagccgccaccccttcgcagtcggtatagcggaacgtcaccccctccgccgacaccgtcaccacggccgcggccggaatcacgcgccgcgtacggctccgttcgagcagctggttgaagcggtggtcgtaattgcggtagacctcgcatcccggagcgatcccttccatgcggttgggcgtcacgcagtcgccgtcggcggcattgacgttggttccgaccagtccgcgcggcgtcaggaagcagatgccgtcgccggcggccagcgtatgcgcccggtcgagccggaaacgggtcctttcgacgcgcgtcacgcggcccgcatattcgccgaccgccttcggcgtgtcgaacgacgccacgccagcacgtttgcccgcaaagaagtattcagactccccgcgggtgaaactcttggccgtatcgggcgtgaagtccgcgacgctttcaccggccgaagcacgccgcaggtgcggccgcgcggccaatgcatcgtccaccgcgcggcggtaataggccaccgtattgcggatataattgatgtctttgagacgcccctctattttcagcgacctgacgccggcatccagcagctcgccgacgtgtgccgaaagattcaggtcgcggaccgagagcaggtgttttccggccagataggtgcgcccgctgccgtcggtcaggtcataggtcaggcggcacggctggctgcatgcgccgcggttgccgctccgctcggacatcgaccgcgacagaaaacagcggccgctgtaacccacgcagatggccccgtggacgaaacactccacttcggcgttcgtcgcggcgcatatcgcccggatctcgtcgagcgacagcgcccgttcgagaatcacacgggcgaaaccgcattcgcctaagaaacgcgcctgttcgggcgtcatgttgcacacctgcgtcgaggcgtgcagctcgaccggaagatccatccgccgcagagccatgtcctgcacgatgagcgcatcgaccccggccgcgatcagctcgcgggcctgccgctcggcggtctccagttcgtcgtcgtaaatcagggtattgagcgtggcatgcacccgcacgccgtaacggtgggcatactccgcgacgcgggcgatctgctccgcactgttgcccgccgcatggcgcgctccgaacttcgcaccgccgatatagacggcgtcggcgccgtaatccacggcggccacggccgactgcaaatctctggcgggagcgagtagttcgacgaagttcatgctttattttttgcaaaaataacaaattccccgacaaaaaccggagccgaagccgaaaaaacatatccctgcgggagtttgccccgcattccccgccgcccggaatagcgccccgccttcatccgggtttcaccacgcccccgtctgtcccctctccgcccgtacccctgcgtcccgccgcccgaagcgctgaaacacgaagcgccggaagccggcccggcccaaattcaccccggaagcacctcggaagcccgtaccgcacgcgcggcgcagagacatcggtaacagaccgccgggtgcggagtgtctggaaagacgccatgccggattcgtcgccacccacccggccataacgcgtttttcgcacagagattgaaaatttaacgcccgccgggagcgatattgccgctatttttataaatttgcggtttgtaatacgaatactcaaaaatcaacagatagtatgcttacgctaaagcaaatccgcgatgacaaagaggccgcgatccgcaaactggccaaaaagggcgtggacgccgcacccgtcatcgaaaagatcgaaacgctggacgaccgccgcaaggccattcaggtagaattggacaatacgctggccgcgcagaacaaagccgccaaggagatcggcgcgctgatggggcagggccgccgcgaagaggccgaggagcgcaaacgcttcgtcgccgacctcaaggagaaatcgaaccgcctgcaggccgaatcgcgcgaagtgcaggaggagctgcaggccgcgatcgtcacgctgcccaacttccccgccgagatcgtcccggagggcaaaaccgcagaggacaacctcgtcgtaaaactcgtcgaaagctacaccgaactgcccgaaaacccgctgccccactgggagctggcccgcaaatacgacatcatcgacttcgatctgggcgtaaaactcacgggtgccggattccccgtctacaagggcaagggcgcacgcctgcagcgggcgctgatcaactacttcctcgactgcaacaccaaagccggctatctcgaagtcgagccgccgatcatggtcaacgaggcttcgggcttcggtacgggacagcttcccgacaaagaggggcagatgtaccacgccacggtcgataacttctacctgatccccacggccgaagttcccgtcacgaacatctaccgcgacgtgatcctcgacgaaaaggatttccccgtaaaaatgaccgcctacaccccctgcttccgccgcgaagccggctcctacggcaaggacgtgcgcggcctgaaccgcctgcaccagttcgacaaggtcgagatcgtgcagctgagcctgccccagaactcgtacgaagcgctggacggcatggtggcgcatgtcgagtcgatcgtcaagtcgctcggcctgccctaccgcatcctgcgtctgtgcggcggcgacatgtcgttcacctcggcgctcacctacgacttcgaggtttactccgaagcgcagaaacgctggctggaggtttcctccgtctcgaacttcgaatcgttccaagccaaccgtctcaagctccgctataaggacgccgacaagaaaacccagctggcgcacacgctcaacggctcgtcgctggccctgccgcgcatcgtcgccgccctgctcgaaaacttccagacccccgaaggcatccgcattcccgaagcgctgattccctatacgggttttgatattatcaaataagtttctatatttgtcattacatacacacattaacaaataaatttttcaaaaatggcttacaaaatcaccgactcctgcgttgcctgcggtacctgcatcggcgaatgtccggtagaggctatctcggctggcgatatctatgtaatcgaccccaacacctgcatcgactgcggcacctgcgcaggcgtttgccccagcgaggcgatcattccggaataacgcacggttataacatggaaaaacatgcccgaagcataatgcttcgggcatgttttttaggcgttagcgtgagacggttattcaatcatttttatcggcccttcggagcgacaattatcggttaatctgggtctttaacaattagttcggctgcatgtttataacaagtctttaaatagcaagtgtcgcccggaatggttatttcccaataacttccgggatcctgaggaggatttccagtataaaaaatatcattgacaggataagatgtaacagcaaagccaaccattccccaagtaccagcgtccctacgcacctctccctcttcaccaacaacggtatctatttcaagattttgcaacaaatctgctattgaaaccattttatacttaaaataagtcctaaaaggcaaagaggtatattctgcatgttgagaatcacataaataaatataacttctgaattgcaaacttcccgatgtaacgcgcaatccaaacttcatctctggcctgaaaaatacctttacatgataagacggactgaacttaatgataggtgattccgcaggattatcccaccctactcccggcgcgatccgataatctcccggctggtcgaagcgaatccgataattcccggctccgtcgttactcagaatcgtatatttcgggtcgttgaatacagattccgttattttcagaattggatcgggataattgggatttgtgaaactcaatttaaaactatattctcccccaagcgccacggtactcggaccgacaattttttccgtaaatgatacaacccggcaaatcagttctgcttcacgaatcagcacgggatgcagtcccggccccgtaaaacgttcagccaattgcaattccgctctgacaacgtaaactcccggagctttgaaacggatcgttgcccgatcgtctgaccgagaaactattttaaccgcatcgtcatttccctctatcgcgcggactgttatctcaccctgcatcagatccaaatactgttcgtcatatacagcctgaaagttgtaatctctgttctgcgcataatattcattgccgggaccggccccggcaggatcgacaatcagactaatctcaaacgtacttgcacgcgtctggccatcaggtatcacctcctctgattcgaggatttcctgcgagcaggaacccgcacacattaccgccaatgcaccgaatagcggcagtacgaaattggggaacaagtaggattttttcatagcttaaattatttaagtgggtgaataataaaaagccgcaggaaaaacatctgaattattcaaatatacaataaattaggcacattatttcatttttttagtttttttttcacaaaccgaccttcatatttccgaaatacgtatatattgaaataaaaaactgcggtccaatttggaccgcagttcggttatcggaatctctgaacctcgaaatggcgtcagaattcttctctttgagaaagagctatttcttgataaaatgctttttcagtcccaaaggcttatcaccaatagaagcttcgtataccgccgcaggacgatcgaatacaagcgaactcggcattgctacttggctttcgaataccatgccattctgcttaactgaagttgacagagctataccttcagaaagtacacttgacagtttacttgcatgcaggattgtagcggcagacttcgaagcagatacagaagcacctgaactcttccttgtcattgtataaggacctatcggataatccctatcggtatatccttcagctgccttttgccaataaatatcttgtccaagaacccagaagaagtccatcgaactggtagtaaaattacccattccgtcgacacttccttgatacagagtaatcgttgccgagtttttatctgcattaagctttccggtaaatccgggataaccaccgttaataatataatattttccctgcaaaagtgcccgtcctgtaagagtcagtacacttccatcctccggatcggtatataaactctgaccttccaatatctcaaaatttccggtagcactatcgaacttagccgacggaagaatctgcgactggtcacgaatcgtagtaatgccccatccttgtaatttataggatgaattagcaaccccctgaatgaacgtaacatcgaaggaaagcggcgcagcattcacctcagacgaagtgctggttaaagtccacgtaccgagccatgccttgtaagcatccgaagcctccccaccaccttcagtagtggctgcgacatgctttgtagtcgatttaccagccgaatccgtaacttttaaaatacaagtataggaagtagcgggatctaatccactaaaggttactccaattccgggattcttaacaagcccgtccaaccatccgtctttagtagacatatctgttccgttctgagtaactatagcatcataagaagctccctgagcaagtactttttcaacatccgaagttaaaaatactccataatacgcacctgttgcagtcggagcataggctcccatataaaccttagtgtccgtatttgcaccattagcatctccagcacgaagtgtcaaagtcagttccggtccatcaccttcaccgcctgcttgagtagtaaactcttttacaacggcagtggtagtcgtagctccagttgtcgcatcaacaccgatagcgaaagtataatacttcgttccgggagtaagtccgtcgaaatcataactgtcatttccaaccgaaacaatctgagataaaatctgcggaagagtcattgacggatattgcgcctgataataagctaacaaatccgatatgaactccgcaatcccttcgggagttccaccatacccctgataatcctcttcatcaaacagatcgaaataataggacgaagtctcatcgctcgaagtaacgtttaccgtagcggttgtagcagtaatattggtaacgtcaatggataattcgaaatcgccgccaccgcctgttgtatcataaatagagacaccaccttcgtacttaaattcatattcttttccgccagaagttacttttgccgttatgacatacgaagaaccagcaccttcaacaataagtgcaccgccatcaatatagagataatttttcgttccgtctgaattaatcttcacgatagccgatccggtcatcatgcctccgccataatcggcccccggagcaatcgtattctcctcggcatcagcaccgcttgccaccgggaatgttccagccggaagcgttgcctttcccgtaacggcaacattcaagtcgaaaagcaaataagtaccttcgcccgtgaaatccatcatatcctccgtcacagtatcttcagacatccagaacgtaaaattatcaaaagccccgaacgaagtgccaaagaaatagccgccggccttagaaattacaagttcaggctccggagcatcgtccgtcttgaacgcctctttcaccagatcggaggtgaagcggccgtccgtcagcatgccgagcgcaacggcgtagtagtcggtgccggccgtcagatcggtgattttctgcggtgcgcttcccttgacgagggccgttgcgagatactcgctgagcggcaacaccttcttatccgcaatagctttcagattgtcgagaatatgctgggcataggccgcgtcggactcgaacgtgtcgaactcggccttctttacagccgcataatagtaggtagcttggtcgttgctgggagttacagttacggtagcttcggtctgggctacatccgaaacagcgacactaaacgaataagagggggggggtccgactttgtcgtcgtcgtcattacagcctgaagtgacaaacagaagagtcacggctgccaataacatgcgcaagtaagatttgagcgtcataggcttaaaattaaattaataaaattgacaagatataacaattcgtccggcaaggaacgctaaaaattatattacgttagcaaatataagtatttatatttgtaattgtatcattcagatacaagaaaaacggaacgccggatcgggtttctcaggccgtttgattacaatattgagaaattccgggacatttgattacaaaatccaatcatcgacggcaatattcagtaatatttccgaaggaaaaaatatttttcagattttttcaaaaaatttattttcgacgcatgccgcttcactccgcatagagcagatacggctgccgctggcggcggaaacggcgcaggtcctcctgccagcacgcgcggatttccgcttccgaagccccggagagaatcatctcgcggacatagcccacgccgatgagtttttcgaacatcggagtgaagaaccgctcgcccaagcccagattgcgataagcctcgatcacgtagcgcagcgtcagtcccacctgccgcgcctcgtcgagcggcattcggctcagatcggcgccgtggcagagccgtccctccagcggcggatgcttggcccctgccgtaggccgtggcgtaaacgagaatccataccccttcatatcgggatggccgtagatttcgaacggcttgtcggttccgcgcccaagactgacgaccgtcccttcgaaaagacagagcgacggatagaggtagacggcacgctgcgtcggcagattgggcgacggcgcgaccggaagcctgtaaggtgtcgcatgggtgtaattgcggcagcagaccacatccagcctgcatttccggctccacccctcgccgacggccatccgggcgatctcgcccatcgtaagcccgtgcagcacgggaatcggcaaggctccgacgcccgacttgtacttcatgtcgagcaccggcccgtcgatcagatgcccgttgggattgggccggtcgagcacgacgaccgtacggccgaattcggcgcaggcatccatcatgcggagcatcgttatataataggtgtagaaccgcagtccgacgtcctgcatatcgaccaccagcacgtcgaacgactgcatcgcctcgtccgaggggcgtttggtattgccatcgtagagcgaccgaatcgggattcccgtccgcccgtccaccgagtttccgacatgctcgcccgcatcggccgttccccggaatccgtgttcgggcgaaaagatccccgtcacattgaatccgcggccgtgcagcagatcgaccagatggatcgtcccgtcggcggaagcccccggcaaacgagccggccgacacccggccctgtccggcaaagccgccgcttcgcctgcggatactcccgacagtcgttccgcctctgccgcgtatttcccctgcgccggttcgcagaaacgcgcgacggcggtatggttcgccagcacggccacgcgcaggcccttcagtttcgggaagtaggccgcagtatcggtcatgccgaccagcaccggagcatgcggaagcggtgcgccgcaggccgatacgggctgcgccccctgagccgcagcgcgcggcgcgacggcaaaagccgcaagcgtcaggaaaacaagtagtctcttcatcttacaaagatagcgatcttatcgtacggcgaaaccccggatcaggcttcggcgccgtactccatcaggtaagccttgatgaattcgtccagccccccgtccatgacggcttcgacagccgaggtctgcacccccgtccggtggtccttgacgcggcggtcgtcgaagacgtaggaacgaatctgcgaaccccactcgatcttctttttcgacgcctccaaagcctgctgcgtggccatgcgtttgtccagctcgcgctggtagagcttcgatttgaggatgcgcatggcgttctcgcggttcatcagctgcgagcgggtctccatgttctcgatcaggaactccaccgcttcgcccgtatcggcgtccttgccgtgataacgcaggcgcacggcggtttcgaccttattgacgttctgaccgcccgcaccgctggctcggaacgtatcccactctatgtccgagggattcaccgtcacctcgatcgtatcgtccacggcgggcgacacgaaaaccgacgcgaaagtcgtctgccgcttgttgttggcgttgaagggcgaaaggcgcaccatgcggtgcacgccgttctcgctcttgaggtagccgtacgcatactcgccttcgaactccagcgtgcaggacttcacccccacctcatcgccggcctgatagtcgagcaccttgaccttgtagccgtgcgcctcgccccagcgggtatacatgcgcagcagcatcgacgcccagtcgagcgcttcggtgccgccggccccggcgttgatgtcgagaatcgcccccagcttgtcctcgtcgcggcgcagcatgttgcgcatttcgagtttctcgatgcgctccagcgtctgcgcataatgggcgtccatctcctgctcgctcaccacgccctccttcacgaattcgggcatcagcgcaagatcctcgacgtccttcgcaacggcgtcgtaatcgtccacccacgccttgatggccgccacgcggcgcagctgttcgcgcgcctgatccgggttgtcccagaaatccggcacttgggtcttctcctcttcgttgagcaggtcgatgcgcttctgttcgatgttcagacagcgctccagcgctccgctgcgctgttccaaatcctttatctgatctgcaagtatcataggcaatcaattagcaaaaaaatgcggccgctcagggcttcacgcccagtttgcgttccacgaattccagcacgaaaccggtcgtgccgtcgattcccagcaccgacgaatcgatgcagagatcataggtctcagccattccccacgtgccgctgctgtaataattgtagtaggcggcgcgccgggcgtcggtgcggtccatcaggctctccgcctctccgggcgcgatgccgtgcaggcggcagagccgctcgatacgttcggcacggccggccgcgatgaaaatattcacggtgcgcggatgatcgcgcaggatatagtcggcgcagcggcccacgaaaacgcacgattcgcgcgaagcgaggtcgcggatcacgtcgctttggattttgaacagcgcatcgctgctcagcacgttgctccccgaatattcgcttccgacgaacggcgaacgcagatagccgatgaaggtcgcgaacaggttgcgcgactccttttcgtcggctttctcgaaaatttcggggcagatgccgctctgctcggcggccagattgatcagctgcttgtcgtaaacgccgattccgagtctcgccgccacggcctcgccgacggccttgccgccgcttccgagctgccgcccgatattgatgacgaatttatctttcatagtcgcggattattcgggattgttcgttgccggggccgcatccatcttggcccggaatttacgcagctggtaggccagcatgcagaaggccacgaccgacgccagcaggtccgaaagcggcatcgagcaccacacgccccagctgccgtcccaacgggtatagacgtcgaagatgtgcggcaggaagatcagccccggcatcaggaaaagcagctggcgcgaaagcgacaggaaaatcgccttgccggccatgccgatgctcatgaagaagttggtggccaccatctggaacccgatgatcgggaagcagatgaagacgatgcgcatgccctcgacggacagccggatcagttcgggatcgttcgtgaaggccgacaccgccagccgcgggaccagctcgcccatcaggaatccggccatcgtgacgcacgtggcgccgatgatcgtcagcttcagcacgcgcagcacgcgctcgtactgccgggcgccgaaattataccccgcgatgggctgcatgccctgattgatgcccatgacgatcatcacgaagaagaacgccagccggttcacgatgccgtaggcgccgatcatcaggtcgccgccgtattgtttcagccccttgttgatcaggatcacgatgaaacaggccgcgaggttcatcaggaagggcgacatgccgatggccagtatgtcgcgcacgatcttgcggcgcaggcggtagatgccgggcctgaaatggagcagttcgctcttatccgaaaggatatggaactgccagacgagcgcgatgacctgcgccagtatcgtggcgacggccgcgccgcggatgccccacccgaaaccgtaaatgaacagcgggtcgagcgcggcgttgatcaccaccgtatagatcgtggcgtacatcgacttgcgcgggtggcccgaagccctcagcacggagttcagtcccagatacatatgcgtaatgacgttacccaagaggataatcgtcatgtagtcgcgcgcatagcctatcgtcgcgtcgctggctccgaagaaatagaggatcgggtcgagaaacaacagcgtcaccagtccgaacgaaagaccgattatcagattcagcaccaccacgttgcccagaatgttctgggccgtttcatagtcgcgctggcccagacgcatcgacaccagcgtcgcggcgcccacgcccaccagcgaaccgaacgccgcggcgaggttcatcagcgggaaggtcagcgccagccccgaaatggccagcggccccacgccgtggccgatgaagatgctgtcgaccatgttgtagagcgaagcggccgtcatggcgatgaccgccggcacggcatattgtacgagcagtttgcggatacgctccgttccgagttccgcagccgctccctttattgttgcagacataatttcctgttcatatttctgtagggtgccgatttcccgggatcgtcccggacatgcggcccggcaccggccggcacggcggacatcctgcataccgcccggacacaaccgaacaactccccggacactgccggggcggcaaaaaccgtgcaccgcactccggcgtccgttccggcgggcggcgcccgaaaatcgggagacagctattccagctcccagtcgctgccgtccttgcggtccttgacgcggattccggcggcggccagcccgtcgcggatacggtcggaagcggcccaatccttcgcggcgcgggccttcagacgttcatcgagcagcatctcgaccagcggcgtcacgtagtcgcggcccgaagccgagccggcggccttctcgtcgcgcaggccgaggatgtcgaacgcatagcggcgaacggtcgtcttcagcgtttcgaggtcggcggccgtgatggtctgccggccctccgcaagctggttgatgacgcgcacccagtcgaacagcgccgaaatgaccatcggcgaattcaggtcgtcgtccatcgccgcgcggcagcgtccctccagttcggccggatcgaccgtcgagacgtcggcgggcttgatcctgccgagcgcctcgacgcccttcatcaggcggtcgagtcccttctcggcggcctgcagcgcctcgttcgagaagtcgagcgtcgagcggtactgcgcctgcaacacgaagaaacggatcgtcatcggcgaataggcctgcgccagcagtttgtggctgccggtgaaaagctcttcgagggtgatgaagttgcccagcgacttgcccatcttctggccgttgatcgtaatcatgttgttgtgcacccagtagcgggccgaatcgtggcccagcgccgccgtggactgcgcgatctcgcattcgtggtgcgggaacatcaggtccatgccgccgccgtggatgtcgaaacgctcgcccagatagcgggtgctcatggccgagcactccatatgccagccggggaatccctcgctccacggcgaaggccagcgcatgatatgttcgggcgacgccttcttccacaacgcgaagtcgtacgaatggcgcttgtcgctctgaccgtccagctcgcgggtgttggcgacgatatcgtcgagattgcggcccgaaagccgaccgtaattgtatttccggttgtacttctccacgtcgaagtagaccgagccgttcgactcgtaggcgaacccgtcggccagaatcttcttcacgaactcgatctgctcgatgatatgtcccgacgcatagggttcgatcgagggcgtctcgacgttcagggcctccatcgcacggtggtaacgctccgtgtagtagtgggccacctccatcggctccagctgttcgagccgggccttcttggcgatcttgtcctctccctcgtcggcgtcgtgctccagatgtcccacgtccgtgatgttgcgcacgtaacgcaccttgtagccgcaggccttgaggtagcggaacagcaggtcgaacgtcacggccggacgggcgtggcccagatgcgggtcgccgtagaccgtggggccgcagacatacatgcccacgcggccgggagtcaaaggctcgaactcctccttgcggcgggtgagcgtattgtaaagtacgagtttcgattccataattatccgaaaaatttaccgcaaaaataagaaatttaatcgacatgcgccagaatcgcggaattaatcgtacctttgcggcgacaataatagcacgcgccggtctgacgccacccgtttttccctaccgtatattatgcgacaatacgaattatccggctcccagaaccggaataaaaccgatatgcaatgacattcaaggaactgaacctcatagaacccatcatgcacgccgtagccgagaagggctacgtcacccccacgcccattcaggagcaggccattccgcccgcactcgaaggacgcgacctgatgggctgcgcccagacaggaacgggcaagacggcggccttcacgctgccgatcctgcagctgctctcggcccggccccgcaccaaaggacgccgctccatcaaggcgctggtgctcacgcccacgcgcgaactggcgatccagatcgacgagtgctgccgcgactacacccgctacaccgacctgcgccactgcgtgatcttcggcggcgtcaaccagcgtccgcaggtggacgccctgcagcgcggcatcgacctgctggtcgccacgccgggccgcctgctcgacctgatcggacagggatacgtctcgctctccgacatccgcttcttcgtgctcgacgaagcagaccggatgctcgacatgggtttcatccacgacatcaaacggatacttccgctgctgcccaaagagcggcagacgctcttcttttcggcgacgatgccctcggacatcgtcacgctggccaattcgatgctccacgacccggtgcacgtcaccgtcacgcctccggcgtcggtcgtcgagacgatcagccagagcgtcctgttcgctgaaaaggccgagaaaaaagacctgctcatcagcctgctgcgcgaacgctccgaaggctcggtgctggttttctcgcgcaccaagcacggcgcggaccgcatcgcccgcatcctcaccaaagcgggcatcgaggggcgcgccatccacggcgacaagtcgcagggggcccgcgaacgggccatgaacgatttccgggcgggccgctgccgcgtactgatcgccaccgacatcgccgcgcgcggcatcgacatcagcgaactgccgctggtcatcaattacgacctgccggaagtggccgaaacctacgtccaccgcatcggccgcacgggacgcgccggacacgacggcacggcgatcgcattctgctcggaagacgaacgcccgctgctgaaagacatccagaaactgaccggacttgtcctcgatcccgattccggacgcctcacgccgggcatgcagaccgacacgaaatccccgcggaaacaggaatcctccaagccggccgcaccgaagcaggccgcgcagggcgccgccggccggacgccggccggacaaagcggaaatgcaaaagggccgcgccgacgcaggcgaaacgccccgaaacgggaaggacaggcccagagcgcacacgctccgcaaccacaaaacggcggaggacaagcgtccgaaaaccgcgaaccgggccgccgtaggccgcaccgccgcagacgcagcgaccggaaatccgaagggcagcgctcctgaaaagcaaagtgtcccagcaaaaggaaagcgtccctgaaaaggagaagcatcccggagcggggaagcgtccctgaaaaggaaacgccgaaaacagaaaccgggccggacaaccggccctttatgtcatccggaggagtgcgccgaaagcagccctccgcggatcagaaatccaataacttataccgggtccggacttcggacatcgccatcggctcctcgtaatgccaccactcgcggcggtaaggcaccagccccgcttcgcgcatcacgcttccgagcagctgacggttgcggcaggcttcggccgaaatgcgtccctcggccgccagcgcgggttcgttgcccgtgtgggcctcgtcgccgaagaaatcgaccggagttcccatatcgaccggagcgccggtctcgtcgagcagcgtcacatcgaccgcaacgccgtagttatggcgtccgccgcgcgttccatcggcgacgtacacctgattcggcgtacctttgaccaactcgtacatctgccgctgcacgctgaccggacgcgcggcgtcgcacaccaagagccgccatccgggacggcgctcccgcagcagccgctgcgccgcagccaccttgcgcgcgaaatgcggaagcaggtaggcggtttccagatcgccgtagacgtcgcggcgcatgaaattatccggggccgagtacatcagcttcacccgcagcgtcgaatccacggccagcacatccaccagccccgcccggcgcatcttggcgtcgaagccctcttgggcctgcacgccccagcaaatcataaccgctgcaaacaccatccaaactcttctcataacaacatctccattttccagctcaaagataatcaaatatctgcaaatcaatagacaccgtcgggcgtaccggcgcggcaggccggcccgtccggataaagccccgctccgggaaccgccgcaaacgccgtgcgtacgccgttcccaaacaaatgaacggcagccccgaagataccgccgtccatccgacacacgcatatcgactattccgtcagaaccgaaaattccgcgatgccgggacggtcgcccgcagcgagcgacaacgcctcgaaccggacggtacgcccgcgcagcggctcgaattccacgacctgctccaccggattgttgacgatattcgagaattcgccctccgccgccgtacggccgtcgaccgacacgcggtagcgggtcaccacgccgctcgcccagcgactttggtcgggcgtataggcaaatcccctgaaagtccgctcctcccccgtatcggcggagaatcccgcaacgcccgcgggcagatagacgacagtcgagacatcgccgtcgaaaagcccgacggcctcttcgtccggaagctccttcacgcgaaacgccccgcagggaatatcgaacccacgcgaagccacggcgctcatacgaccgtcctccgggtcccggacaagcgccttgacaacgccccggcccgtcatcggaaaaggtttcgcgtacagcaccgaagaaggccccggctccgtcccgtccagcgtatagcggatctccgcctgcgtatcgcccgcagcgagcgtcacctcgcccgcaccgttgcgcacaatgcgcggctcttcgagcagcacgggcgcatcgtaggcttccacattggagatgcagagcggaccgcgggcctgcccgaaacggacgcggagcgccggagtcgtgacccctgcgaaacgaatgatccgcttgtatccgatcgtcgtcatttcctccgcggtttcgacgggccgccacgtatcgccgtcgagccattcgacggcaaagcgtccgacgcgctgtccgagcggaatatattcctgaagcaaaatgcggttcacacggcgcggctgctcaaaccgcagcgagagcgtcgccgccgtcacgccgtcgtcggtagcccaataagtatcggccctgccgtcgacggctttcgccgcggagaaccggcgcgccccgccccgcacgttgtcggccgtcgcttgggcttcggcgagaaggtcgtgcgcgaactccgcatcgagcgcacggcgccactccatgatacgcgcggaatccgcaggggcgatgcggccggagcgatcgaccggaaaattgagcagcagattggcgttgcgccccacgctttcataatagatgtcgatcagccgcgagagacttttgagctggtggtcttcccgcggatgatagaaccagcccggacgtatcgagacgtcgcactcgcccggcagccacgtatcgccgtcggactcgccgcaggtgaaatcattgagccgttcatcgccgcggccctttaccatgctccaattcgtctgtccggcccggccctcttcgttgcctatccagcggatgtcggcgcacgtgccgccgaaaatcaccgcttcgggctgcagttcgttgatcgtccggcgcgcccgttcgtagccgtaataggtcttggcgtcgatgctgcgcttctcgtccgcaccgccgtaccagccgtcgccgccgttcgcaccgtcgaaccagtattcgaaaagcggcccgtaaccggtgagcagttcgcgcatctggttgtggaaataagcgacatactcctcccgcccgtattccggatggttgcgatcccaaggcgaaagatagatgccgaacttgagtccgtgcctgcggcaggcatcggacagctcccgcaccaaatcccccttgccgccgcgccacggggagttcttcacgctgtactcggtataggccgaaggccagagacagaacccgtcgtggtgcttggccgtgagcatcacgcctttcattccggcggcccggaacgtccgcacccactggtcgcaatccagatccgcagggtcgaacgtcgaagccggtgtatcgccgtacccccattccatatcgttgaacgtattaagcccataatggacgaaggcgtaggtttccagctgctgccaagcgagctggcgggcattcggcaccggaaagagcggcgcgggagcttcgacgcggccgcatgcggccgcgaagagcagaaaaacggagagcgtttttttcatggacggacaattattcgttaaaattaaacaaaatcggaaacataacgaaaaatcaggcggcaaaaacaaccggccgcattcgccgcacggcggccctgccgcgaccggaaacgacggcgggcgtccgcccgcgcagcacctgccgcctccggcagagagcctgaaacagaagcccccgcggcccggccgccgaaaagccctaaaaataaaaactttccgcctcggcgggtaatattgattggatttcgccgttaaatgattacttttgcacgaaacaaagcgaacataccgaaaacaatatgacattcttcaaacgctggaacaacatcgtcggctgggcggtcttcgccatcgccgccgcagtctacctgatgacgatggaacccgtttcgagcctctgggactgctcggaattcattgcaacttcctacaaactcgaagtcggacaccctcccggtgcaccgctgttcatgatgctggcccggctggcgaccctgttcgccttcggcaatcccgactacgtgggagtggccgtaaacgccatgaactccatcgccagcgcgttctgcatcctgttcctgttctggaccatcacccatctggcacggcgtctggtgacccgcggcggcggtgagctgacgcaggccaacacgctggccgtcctcggcgcaggcatcgtcggagcgctggcctacaccttcaccgacacgttctggttctcggccatcgagggcgaggtatacgccctttcgtcgatgttcacggcgctcgtggtgtggctgatgctcaaatgggaagaggaggccgacgaaccgcattcgtcgcgctggatcgtgctgatcgcctatatgatgggcctttcgatcggcgtgcacatcctcaacctgctgaccattccggcgctggtattcatctactatttccgcaagacggagaaggtgaccttcaaaggcacggtttacgccacgctgatcgcgggcgccatcctgctcttcatcaacaacatcatcatcccctatacggtctacgtcggggcgctggtcgatctcttcttcgtcaacacgctcggcctgcccgtcaattcgggcatcgtgctcttcgcgctggcgctgattctgggctgcggctgggccgcatggtacacccaccgcaaaggcaaggtcgtctggaacatcatcctgctctcgacgacaatggtgctcgtcggcttctcgtcgtacgcttcggtgacgatccgcgccgcggccaatccgccgatgaacagcaacaaccccaacaacccgcacgcactgctgtcgatgctcaaccgcgaccagtacggcgaccgtccgctgctgctgggtgcctattactccgcgccgcccgaaggctacaaggaaaaatcgttctactacctcgacgaggacggcaaatacaaacccgcctcggtcatcacgggttacacccactcccccgaattcgtacacttcttcccccgcatgtgggacgcccgcaaaggcgagaaggagtacaagcagtggggcgcctaccgcacccggaccgacgtcatgcgcgacgacaagggtgaaatcctccgcgacgaacagggccgtcccgtacggggcgaggtggtcgatttcggccgcaagaaactctacaacgacggttacgaggaccgcacgatcatcgagccgacgttcgccgagaacctcaacttcttcttcaactaccagctgtcgtacatgtactggcgttacttcctctggaatttcgtgggacgccagagcgacatacagcccacacgcacgcagatcaccgacggcaactggctgtcgggcatcaaatggatcgacgagaaattcctcggcccgcaggacgacctgccccgcgaaatcgccgaaaacaagggccgcaacacctattacttcctgcccttcctgctgggactgatcggcctgctctaccagctgaaccgcgacgagcgcaacttctcgatcgtcctttggctcttcatcatgacgggcatcgcgctggtgttctatttcaacacctcgccgggcgagccgcgcgaacgcgactacgtctacgcgggatcgttctatgcgttctcgatctggatcggctttggcgtgctggcggtccgcgacctcgtcgcatggctcaccaagcgcaaaaacgtcaccgcggccatcgccgcgacggcggtctgcatggtcgtcccgacgatcctcgcggcacagaactgggacgaccacgaccgttcgcaccgctacatggcacgcgacatcggctggaactacctgatgtccacgctgcccaactcgatcatcctcaattacggcgacaacgacaccttcccgctgtggaacaatcaggaggtttacggcgtacgtcccgacgtgcgcatcatgaacacctcctatctgggcggcgaatggtacatcgacgagatgaagaccaaggccaacgacgcgccgggcgtgcccttctcgctgccgaagagcaaatacaccttcgtaaacgactgggtgccggtctacgaccgcgtcaaccgcagcgtcaatatcaaggaggtgatggacttcatccgcaccgaccatcccgactccaagatcaagatggccgacggttcgatggtggactacatcccgaccaagcgcatcgcgctgccggtgaacaaggagaacgccatcgcatcgggcatcgtcgccgaaaaggaccgcgacaagatggtggacacggtttacatcaacctgcgcaagaattcgatcgacaagaaccagctgatgatcctcgacatgctggccaacttcgactggaaacggcctatctacatgacgcaggtctacatcctgcaggatttcggactgatggattacctccagttcgacggctacgcctaccgtttcgtgccgatcctcaccccggtgcagaatccgtgggagatcgggcgcgtggacgccgattatacggcgccgctgctgcgcgacaccttcagatacggcaacctctccgatccgagggtatacgccgactacttcattcagtataacctgagcgcatcgcatgcacgcgactccttcgcacgggtcgccaaggagctgctgcggcagaaccgggcgcaggaggcggtcgagctgctcgacctcggactcgaaaggatgcctacgtggcagatccgtttcaccgacaccaatacttaccccttcctcgaagcctattacgccgcttcggcgatgggcgtcgaagaggccgccgccaagggcgacgccctgctgcgcgagtatgcccaaacgctgatcgaatacatcgagtactacctacgcttcgagggaacgcagggcgacatggtatcgccgatcctcgacgagaaactcgaccagttgggcgacatctactatctggcgacctacgccggacgcaaggaagtcgtcgcggagctgaacacctactaccgttcgctcggagtctcggaagataacctcgtggacgtcggcgacaagccccgtcaggccgacacgacgctgattcccaaaggtatgaacgaataaagacccgcaatacggaaacgcacacgcccggcaactgcattgccgggcgtgtctgttttctccgcaagccgtccggaagcggacagacagcggtcgcagaccggtgccggaaccacggcgcacctgcattcagtccgcatatgccctaccagacccggattcgctgccgtccttccctgatctcgctgaaaggacccggcgcgggattatccgtacgtttattgccgaaatagtcgctgtcgaaaacaatgggcgttccgtcgggctgctcgtaagcctgcttcgacagtttggcctttccgagcagctccgtggttatcagctgaatctgaaaatcgtccagcccttccaccgagaacgaaagatagacatgctcaccctcgtcttcgataacggcgtcgggatcgaaatccggcaaaacgcggttgttttcctctttgtcataaggtttattgtacttgtaatagacattgccgctgacgaacatcggatacgcggcggcattatattccgaaaggccgtaccggtaattctcctccgttttcttgtgctttccgtgcagaaagaggttgttgtaataccggtcgtcgccgcccggtacgatcgacaatcccgccacctcggtcgaatgaggcagatggtaaggcgtatagcgcccacggtcgttggccacgagcagccgtccgatcagcaggttgtggacataagccccgccctgcgaaatatcgagcaccccgacatacgagccgaatatattgttgtcgatcagataagggccgtgattcacctccataaaaatatcctcgccgacattgtcgtagaacaggttcttcgaaacccgcgtcccctgcgtcatccagtcgagccatacggacctccaagtgttgtgaatccggttgtgtctgatctgcgtgtcgatagccccgtggaatttgatgccgccgatttcggcgccgtcatactgacccttgacatagatgttgtagatgtgattgtgttcgatgacactgaacgccgcacccatgcttccgcagatacccgcctgttcgcaattatagatcgtattgttgcggaccagatgagaaccgatattgtccctgctccacccacagcgcagcgcattgaagatcacttcgatatagtgcagcgatccgtccagcgacaaatcggacagccacgtgttgtgtcccgaagagcgctccttgcccagcgtgattccagcgcatttcgaatcgtgaataatgttgttttcaataatccaccccttgttccagtgcgtcgcaaccataccgatctgctcggcggtcggagcgccccactgcgtggcagcctgactgaactcgaaaccgcagaccgtaagatagtccacaccctgtttcgaaggatagaagcaggtatgccgcgtcgttatctcaacaagttccttattgggatcgaatttatggaaattcgcccagatggtcgtattgcgctcatcgacttcgcaacgccacacataagtcgaaccttcgggatcgagaatacccttatccgcttggggatgtacgatctcttcgtgcgacagcttttcatagagggacttcccgttgagaaaaacctcgccgatgtggtgaatacgtccgtgatcgttgaaccagtcgccgcccagcagctccttgtaaggattataatcgccgaaaaacgtattcggaataacgactttccagacgccgtcttccgttttcgtccagcccgtgactatttcagagcctttgatctcgactttttctccgggcgcggcccggtaaacgatccggttagcgtcgtcagtacctccgcgaagcgggtccacccattcgcggtaggtgccggcatgcaccgtgatcacatcacccggccatgcgtaatacacggcgcggtttatcgtcctgaacggagcttccgccgtacccgtattgttgtcgtcgcccttgacggaaacatgatactccctgccctgcacgatacagcacatcgacagaaaaattaaaatcaaactcaatcgtttcattattctaatatggttttggcaagtcgccggacaaagaattctccctgtccgacgacctcctgttattgattttctttcgacaagcagataaaatgcaacctattccgcctcagaatccgagtgcgacgttcacgccctcaggcgcgttctcgaaccgcagcaggcaggtgtgcgactcctcgtcccactcgaaaccgggatcagccacgggcgttccgtcgcttcgggtcacgtccgtcgcaaccggcttccggggcagcagcacccgcatgacgttggtcgtctgcgcaggacctttgaccatgaacgagtagcggttccgccccacccgctcggtctcgacgcaggcggcgcacgccaatacctgcggccggccgggatcggcgaccttgtccagattgtaaagcagcgcctgcgtaccgggcagcaccgcacggcgcgtcagcaccggaagcgccggatcgaacaggtcgatgaatttcccttccagcacgaaaggctccgtgtccgcattttcatcgacgacggccacgatctcgtaaggtccccgttcgaggtagaaatggtttttgaattcgagcgtcccgacgtgctttcccttgccgtaaagcccgcgcacggcggcaagatactccgcatcgccgccggccgcgaggacgaaatccttcggatcgcggcggatcaccgtcacgaaaccctccccgcatgcatactcgcccgccggcgcgtcgagcggcatgccgagcagtccgaacagatgctgcgacggcgcagtgtaagcatttccgccgcggttccaccactcctgaacgcgctggtaggggtcggcgtccgtgccgcagaagagcagcttgccgcccccgcgcacccatgcggcgatatgctcatgcgccttggagtccatgggtttcatattggcgtacgacatcacgagcaccttcgcctccttccacgtctcaggataggccgcattttccaaatggatggtcttcacgggcacgccgcgcttcacgagcgggaaagtctggccgtagaagttcgaaaactgcggatcgtcgtacccctcgtgcccgacgccccgctggaacatcagcgaattgcacatcagcacgcagataccgtccgaaccggagactttgttgtccgaaaccggcatgcgccccagcgcgtcgatcatcacctgcatctgcgtcgagtagtcgcgcgatatgcgctcccgctcgccggacgcgggattcaggaaaagcccctcgtaaatgcggtcgggccacggcatcacctcgtaattggcaatgcgggggtagagcagctgcgcggtgaaggtcgcctgatagttgaccctgtaatcggcccagtcgcgcggccagtcctcgatggggtcggtcaggaagaagagtttgcggcccgtcggttcggtcatcgactccatggagccgtactccagataggcgttctcgaagacgcgctcgcggctcacgccgtcgaaaaaggtcggcgcgcgcgaggttccggtccacacctgcgcgatatagccgtcgacgcacgacagcgaggcgagactcgcttcggggcttacgatctcccacgacgaataattgaccagcgaatgggtcggcacgtaacagcggacctccatccccttctgccgtccgtactccttggcgaacgtaaagaccttgtccagcgcgttgtaatagaggtggtatttcagcttgttcgaaaggtaggtgttttccgccgattcgtgctggggacgccagtcgaaaccgtaatacttcttccattcgcgcttgaacgcctcgctgtaacccgctctggcccagaattcgggttcttcgagatagatcgcatcgatcccggcgtcgatcacccgacggatatgcacctgctgcatgtaggcgataaacgactccgtcggcacgagatagggcaccatgtgcccgtgccagagcgtatcccccgcctgcacgacctgcccttcatccagatggttcaccccgtcccattcgcccgtaaaataatcttggtagcttccccatgcgatgccggtcataaaatgggtcttataccccttcgaccgccacgactccacgcgctcctcgaacgacatgccgggagcgtcgttcgtatcatagataatggccacatcggcgcgattgtcggttacatccttccatggcctgccggtctgaaacgccgttttctcgcggtcggcgtcgcgcgtgccggccggtgcggcacaccctgccagcaggcatcccgccgccagcatcgaaatcgtcaaattcaggttcatcattttctttttcggttaaaaacaagatgcccggaaaattccgggcatctcctgtctcagcgcccgcctaaagcgttcggggcatatcgggatggttcgggccgaagtgcttgagaatcaccatcggctggaaacggctgcggttttcgatcaccacgccctgcttggcggcggcttcgctgacgaagaattcgtcgttgctgggctgtccgaagcgcagcatcacggacgcctcggcatcgtaagccccgaacctgccgtgtccctgaatgatgatgcagccataggcggcgccgtcgctcaccaccaccttctgtccgggctgtacggtcagctccttggccgcgatatagtcgttggcgtaagccacccacttctcggcatagcggccgtccgaattcgggcacgccaccggcggacggaaatagtgcttgcggtaatgcggatcgacgttcttctcccagtcgagcaggctcatgacgtattcgagattgcgtttcttgtcctcagggcagttttcgaccagaaaatcgtaatcgtacacctcgcccgaagcgatattttcgtagaccgaattgacgtcgctgttccactggggttcgtaggtcaggtaggagcccggcgcgtgaatcactccgggaggggtataccatccggttccgagctggatgcggtaggcgcgcgacagctccgtgatgcggttgtcgcccttctcgtacatcatcagacgctccatcacctcctccttgctgacgtcgggatcgaatccgaaataggtcgccgggaaagttccggcataattgttcatttcgggcgggaagtaataagcctccggcttgccgagacgcctgacggccgccgccgcgtcgaatcccaagtgcaggtggtggaacagcggcacctcgtaatcaaaaaatttcgaatacatcggccagccgccgtagcgggtcatcagctcgtcgccgaccagatcgcggccgagcacgtccacggcctcgcgcagcgtgaatttaccggccgtattgccgtcgaaaggcagtacgtagctcatgccctcgtcggcgggggccagcggaccgttcatcgcggggatgaccgacgaaaaccagcgttccttgatcgagccgcgcttggttcccagcgcataataatcgtcggggtggagccgcaggcggaaacctgcgcggctgaaacgccgcggcacgaagaccggcatcaggcagaagatgcccccgccttgttcgaatgtctgtttgattttcatataaaatagctttttggtttggtattaatcgttcaatagaatctccatgtcgagctgataggagcgggtctcgcccggctcgatgtagagcatggtcccctcctgccgggcgcggtcgctgcccacgggcggatgcgttccgggttccagtcccacgacatattcgtttttgccgaaatgctgccagttggtcagccacggcagttgtcccttcttgaatttcatcttgacgccgaggccgaggttgtcgttgtaaagaccgcactcgccggttccgcggcggtcggcgtccacgtcgatgaaagccacagcttcgccgtcgccgtcatgttcgggaatcggcggcaggcaccgccggaatccctgctcgttcgcttcgttgaagataaagtcgtcgcccggcccgccgcgcgacacccagcgtcccttccagattatccgcgtgccgtcgtccacgagcggatagccgaaattgcagtggtaaagcagcatgtgaggggcgcgtctgtttccgaggttggtcacgctgtcacggaccatgatcttcgaagcgcccagcgtcgcggagatcgtgcgccggatttcgagatgatggcccaatgccgtggtctggagcgtacggccgcagatgctcattccgtattcgccccgcaggggatcgggctgcaccaccgattccagcaccgcgggaagcatgccgatacgcccgtgaagcggaaacgccccccgcggaccgtcggccgcaggtcccacatggtccagcccgcaggtcacgagcaggcctccgcccagcccgtaaagccagctgttgccgctccgtgcatagatatcgggagccgcaacgccgagacggcttatccacgccagcccgaactggttcatgaaagcgtcggcaatgtccattccgcggtcgatgacgaccttgaaacgcagtccgctgcccgtattgaaccatgcgatccgcactccgtcgccgggaccgccgcacaattcggacaactcgatcccgccgacttggcaggggttggatatcttatcctcgtaggaatccagcagataataacttttagccatataagccgttaccgttttttattcgttatccttccatgcggccatccgctcccagacgggtccgagcgactcgacggcgcagcggtacagcgcatatttccgttcataggccgcggcatgctccgccacgggctccacgcggcgcctgaccttcaccatcgaagccgccgccgaagcgaaatcggggtaatcgcccgcaccgacggccgcggccatggcgcagcccatcgtcccggtctcaccgacatcgacggtctcgaccggacactgcatcacgtcggcgaatatctgcgtccaaacctccgaattggccacaccgccggccagccggatcacccggacgggcgtgcggcgcgaagccgtcaggcggtcgaaatgacgccggtggctgaaagccaccccttcgtaaagcccccgcaccagatgcgcgcgcccgtgatgcccctcgacgccgacaaaagccgcatgcgcgccgggctgctcgttgctccccatcagaaagggcaggaacagcggacaccgttcgccggcgggcagcgaagcggccatcgcattgagccggtcgtacaccgagccgtcctcccccgccagcgcttccttcagttcgggcagcagcgtattgacgaaccactcgttgttgcccgcagaggtcggactgcactcctcgatcaggtagtagccgggaatgcagaacagcgaattcatcatcaccgtgccgtcgagcaccgggaccgggctgatatattcgttgatgctccacgtcccggcgatcatgcagacgcgctcctcgtcggcggcatccaccgccacggcgcaggcgtcgatgtcgaacatgccgccgaccacgggagttccggccttcaggcccgtgagcgcggctgcctcttcggtaatccggccgcagacatccgtcgaaagccgcaggggcggcagtgcgccggcaaccgcctccagcccgaaaagtccgagcagccgcggatcgtaatcccgcgtatgcaggttcatcaggttcgtgcccgaataatccgtcacctcggcgaaagcttcgcccgtcaggcggaaccggacgtaatccttgcactcgaacacccagcggatattgcggtagttctccggctcgttgtcccgcagccacgccaacagggccacgggctgacaggccagcacccgctggcaactgaagacgaacgccttcgccgccgtgccgtcctcctcccagcgccgggcgtattccgcggcgcggttgtccatcgagacgatccccgcacgcacgggtttcccgtcacgcccccagaggtacagccccttgccgtgcccgcagcaggcgacggcacggacgtccgcgggatcgacgcccgcccggacgagcagcccgcgcaggacgtcgcagttcgtccgccacatccgctccatgtcgcgctcggcatagccggggtgcggcacggcgatctccgtggccgcggagcatacggccacctcctcgcctgaggaggtgtagagtgcggctttggtgagcgtgccgccgttgtccagaccgatataatagttcataaaccgatttttacgagataaacaattcaaggccgcagcgaacgttcgtaggcttcttcgagcagcgcccgcgaacgcgcgatctccgcacggtcgtcgggtgcggtccccgaccacatttcgagcaggaaaggtcccgaataccccagcgaccgcaaaatgcggaacgccccggcgaaatccaccgtccccgcccccagcggcacgccgcggaactcgccggacgattccgccgtcaccgggcgggtctccttgaggtggatggcgacgatgctggcgatccccttcttcagttcggcggcgatatcgttgccccaagccgtaaggttgcccaagtcgggataaacccggtaatagggcgaacggatacgctcttcgtaccagagatgcttggtgatggagttcatgaacggcgtgtccatgatctccatggcgtgcatgacctgatagcgttcgcccagccgggccacatactccatgccttcgagaaaggccgcggcgctgcggttggtcggaggttcgtaatagacgtcgtacccggccagctggatgacacggatgcccagatcgtcggcgaactgcacggccttttcggccagttcgcgggccttgccgcgcaccgaagcgtcggcgctgccgaacgggaagcgtcggtgcgcgctcaggcacatcgaccggatcggcatgtccagccggtcggtcagctcccgcagcgccttgcgctccgcccggctccaccacaggcgcgccatgcgcccgtcggtctcgtcgatcgaaatctccatgtagtcgaatcccagctcgcgggccgccgagagccggcgttcccacgaccattcggccggaagcgccttttcgtataatcccaacagatgaccgtgaaacatagccgacgctttttatccgagaaactccttttcgatctgttcgagcgtcttgcccttggtctcgacgatgcagcggcatacgaagaccacgcaggccacgcacatcacgccgtagatcaggaaggtaaacccgctgcccagactctccttgaggatcgggaaggtaaacgacaccagaaagttcgcggcccacatcgccagaatcgaaaccgacacggcgcggctgcggatccggttggggaatatctcgcccagcagcacccagacgatcggtccgagcgacagcgcgaagaaggccagataccccatcatcagcagcagcggaagcatcccggtaaagttgccggtgaagtaagcaatcgaaatgcagaacatgaaaaagcccatgcccgcagggccgaagatcatcagcttgcggcggccgaccttatcgacaaacaggatcgaaaccgtcacgaagatcagattgaccatccccattatcatcgtatagtagatcgccgaatcattgcccatgcccgtcgatttgaatacgtcgggggcgtaatacatcatcacgttgatgcccgtcacctgctggaataccgagagcatgatgccgatcagcagcagtttgaacatcttccccctgaaaagctcgcggaacgtcccttcgacgccgtgtcccaccgaatagcggatttcgtccagctcggcgcgggccgtctccgggccgctgatgcggctcagcaccctgaacgccttgtcgtcgcagcggttcgtgaccagccagcggggactttcgggcacgaacagcaggcagacgaggaacagcacgcagggcacgaccatcacgcccagcatccaccgccagttgtccacgccgccgacatcgaccagcagatggttcgaaacgaaggccagcgcctgccccgaaaagatggcgaactggttgagcgacaccatgcgtccgcgcaggtgcgccggggcgatctccgagatgtagagcggcgaaagcatcgaagccgcgccgaccgaaacgccggcgatcatgcggaagacgacgaacgtcgtgtaattgacggcgaacgcgcagccgagcgtcgaaagcaggaagatcacggaggtcacgagcagcatcttcttgcggccgtatacctgactgggcttgccggcgcatcccgcgccgaacatgcagccgatcagaatacaccccacggcccagcccttttcgagcggcgtcaggtggaagacttcgggcgactgcatgaattcgatggcccccgaaatgacggaggtgtcgaatccgaagagcagtccgcccatcgccgcgacgagacagacaaaaaacagatacattttcataatcggtagttttaggttggcagattgatcggaaggctccccgtcagaggattcccttcttgaggattatattggcgtaacggcccgactcgccggtcgcaacgacggcataggcctgagccgtgcggcggtagaattcgaaacgttcgagcatctcgaatccggcgaatccgggttccgcggcacggattatcgcctcgtagcggggccacagttcgggcgtgtagtcgtctcccggaacgacggacatcagggccgcaggccgggggacgaaggtgtccagcggaaaaagccgcatgacggcttcgagtatttcgggaccgccgtgtccgtcggcacgcaccagacgccgggcggtggacgccgcgggaaaattggcgtcgcccaaaacgatttcgtcgccgtgccccatctccatgaggatcttcagcaattcgggcgacaatatagatggtatgtttttcaacatggcaaacagtaaaatcaattaatatcggtctatccggatgacggacgtattacaaaattacagaccctccaccggccttacagctataaatttaaccagaagtaatactattttaatataaaatactatatttgcaattaataaccaaccatccgctccatgaaaccgaaatacgaacaggtcccgctgataaaatcgctctacaacatcaagaaagagtttttttacaacgtccatgtcccgtggcatatccacctcgaatacgagctggtgttcatccgcatggacaacggcatcaagcacgtcggaagccatttcggcggcatcggcggcatggaaatcctgctgctggggccgaacctgccccacaactggctggtaaacaaacggagcgcgcccgtcgggaccgacaccgactatcaggtggtgatccacttcccgaaaagcgttttcggcgcggggtttttcgaactggcgcccttcgccgagatcaacgagctgctgaaaaaatcggagctgggactctgcttcaaggacggcgaaacggcgcgcatcggcaaggagatggaagccatgctccacatgaaggagttcgaccggagcatggcgctgctcgaactgctgcagcggctctcggccaaggagcacaccgtcctctcctcctacggattcaacaacgtcctcaacgaagagaaggtcaagcggatgaacaaggttttcaaatacatcaccatcaactacaaggagaacatctcgctggaggacatcgccggaatcgccaacatgacgccgcaggctttctgcaaatatttcaaggagcgcacgcacaagacgttcatcgaattcgtcaacgaagtgcgtatcgggcacgcctgcaaactgcttttcgaagacaattacaacattctccagatctgctacgaatcggggttcaacaacctttcgaatttcaacagacagttcaagaaggtcatcaacatgtccccggtcgagtaccggaaaaaggtgttgtcggactcccagaagaaccagtagcgccggagccggaacccggccccggcgaccggtcagaattccgaagagaacgaatagggcgcatccgacggagcggtaccacgcgagagatcgggacggtccgacatgccgaattcgagtttcccgcctgcggtcagcgttccgtgcgtcaggtagttcttcgaggagtcgcgtccgttgatcttcaacgacttcacatagcagcggcccggtccgttgccggaggccgcaatgaccgtccgccgcccgtcctcatagtggacgaccgccttttcgaacagcggcgatccgagcacgtactgatccgaaccgggacatacgggatagaatcccaacgccgaaaagacataccacgccgaagtctggccgttgtcctcgtcgccgcagtaaccgtcgggcgtggccgagtagaaccgctccatcacctgccgcagacgatactgcgctttccacggctgccccgcatagttgtagaggtaaatcatgtgctgaatcggctggttgccgtgggcgtaattgcccatgttcatcacctgcatctcccggatttcgtggatgacgctgccgtaatagctctcgtcgaagaccggcggcacgacgaataccgaatcgagcatcccggcgaaccgttcccggccgcccatcaggtcgataagtccctgcgggtcgtgaaacaccgaccatgtgtagtgccacgagttgccctcggtgaaggcgtcgccccacttgaacggcgagaaaggttcggcgaaactgccgtcggcgttgcggccccgcatcagcccggtctgagaatcgaacagattgcggtagttccgggcgcgccgggcgtaaagctccacctcctcctgcgggcggccgagggccttggccatgcggtagatgcaccagtcgtcataggcgtattcgagcgtacgggcggcgttttcacgaatcccgacgtcatagggcacataccccagccggttgtagtaatcgtatccccagcggcccgtcgagcgcaccgacggatgcaccttattggctccgtccacgagtccccgatagagcgtcgccgtatcttcgacgcgaacgcccttcagataggcgtccgccacgaccgaagccgagttgttgcccaccatacagtcgcggtgccccggcgaggcccattcgggatagaacccgctttcgcggtaggcgttgaccaacccctcctgaatttcgcggttcaccgagggataaaccagattgagcagcggaaacaggcagcggaacgtgtcccagaatccggtatcggtatacatgtagccgggcagcacttcgccgttgtaggggctgtagtgacagggccgtccctgcgcgtcgaattcatagaacttgcgcggaaacagcgtcgaacggtagagacacgtatagaaagtccgccgatggtccaagtcgccttcccggatctcgatgcggcccagcacatcgttccagcgttgtttcgccgcggcgcaaacctcgtcgaagccgcgctccccgacctcctgcagattgcgcagcgcctgttccggcgagatgaacgacgacgcgacgcgcgccgtcacctgctcgccgcggcgggtcctgaagccgacgatgccgccggcatgcccggcctgctgttcgagggcttcggaacgctctccgtcggcaaaggtcgcggtgtattcgaagtcgcggtcgaattcgacgacgaaccagttgcggaagttgtccggcacaccgccgctgttgcgggtcgtgtagccggtcacccggcgtttttcgggttcgatcttcacacaggagcctttgtcgaaggcatcgaccaccacataggagtcgtcgccttcggggaaggtgaagcggaagaccgcggcacggtccgtcggcgtgatttcggcaaccacgtcgtattcggccagataaacgctgtaataatagggtttggaggtctcggccttatgaccgaaccagctcgcgcggcgttcctcgtcgaattcgggcgtgccggtgacgggcatcagcgagaactggccgtaatcgttgatccacggcgagggctggtgcgtctgcttgaagccccggatacgggtgtcggtataggtataggcccagccgtcgcccatcttgccggtctggggcgtccagaaattcatgccccacggcgtggccaccgccggataggtatttccggcggagaactgatgcacggactggctgcccatgagcggattgaccagctcgacgggatcgaaatctccggaagaggccgccgccgggagcgcccccagacagcagagcaggagaagcatcggaagatgtttcataagactattttttccagttcgaaatcaggtatgcggtacgcgtcaggtaatagtcgggcgccagcggcgaataatcgaggtaggtgaaggcgtcgcagctgaaaggtacggccgactcgatctgcgttccctcgtgccactcgttgaacgaggtgatgccgatgtagggcgcaccgctggcgacggccgcgccgaacatgtcgtcgtaatactttccgttcccgcggtcgcgggtcgtcgaaccgttccacggacgtacgcgggtgtcgatataacccggtccgacgcaggggatgaacaccttgccgttgcgctcggcccacgcctgcatcttcttccagttggcgggcgtcgaaccgtaggtgaagcccgtcgcggcgaaataggtgtagaacccgtccatgcccgactcggtgaagtaatcctcctcatgctccttgacccagagtccgatcatcaccgcatcgagttccgtgccgcggatcgtcaggtcgccgtcgggctgcagcagacgcgcccactccgaagccggcgtgatgtaggagtcgtagataaagaagcaggggcgtccgtccatgcggtaaaacgccggatgcgaaccgtagcgtccgagcagtttggcgatattggcgcgcaggttttcgggattgcggtcatggtaaggctcgatatggaagcagaccttcatgccgtgcttcgccgcttggtcgaaaagcacgggcagggccggcgatccgaaatcgttgtcgccccaccacgtcacgaccgcgacgccgatccgcgccttggccatcatctccacatggcgcgcgacgatcgcgggatcggtactgctgtagtttttcagttcggggtagaaattggccgcgatgttatccacgccgggaatgtaatcggcaggaccgtcgtagctgttgttcccgatcacgccgtggccccagtggacctccttgccgttgacctcggtatttccgtaccagttgtaatagaatccgaaaacccgctgatcgggttctccggcggagccgctttccgcggagccgcatcccgcacaccccagcagcgccgcagcggcaaacagcaccgccgacaatttgtttttcataagtatgtcttgttttccgttgatagtgtcgggaccggaaccgtgccgcatgcggttatccgcacacggcactattccccttttccggtccggaacaatttatttttccataatcacgaccgccgactgcggacctaacgtcaccgaacccgtaaacttcgcgggcgcgggcttttcgggcgaagccatgaccagcggcgcggacgaaccgtcgatgcttatgctcgccgtattcgcttttttggtatcgacgttgtagacgacgacggccttcttaccgtttttcaggttcctgaacaccgtatagcggatattgtcgcccttgaccgtcgcacccagcacgtcgaggaactcgccgttccacaggaagtcggcgtaacgcctgcgcaggttgtccaccttgcggccgtaagccatcacgcgcgggaattcgcccagatgccccttgaagttgcgcacctcgtagctcatggcgtagcggtcggccagacacatattgacgtggttcaggtcgttgtgatcgatcacggcgcaggcgatcgggacagtcgggtcgatgtagcgcagcaccggctcatgccagtagtcggcgcgcgtgtaggtgccgtaatactgcgactgcaggtcgtagcacccctcgccgaccatcaggaagtcggggttcgacttctggcacatctcgtagaattcgcggcccagcttgtcggctccctgatagttgaatccgggcacccggtgtccgtggtcgggatcgaagcagagcatggcgcccgcatggtgctggttttcgtcgtacaccatgcccgccgctccgaggtcgagacacttctggaactcggtatggagcatactgcgcagctcatcgtccatcatgcagtggatgctgaagcggcgcgtattgacgccgatcaactgcgtataggtgttgtagttgtaccccggatgcacatagggatcgagcgacgcattgatcgcacggtgcggcaggtacttctcgtggtattcggtcgtcaggtcggcccacgtgaatttggtgaagagcaggatattcacccccttcttctgggcgtccgcgatcacctttcggaactcttcggccgtacccagacgcgggtcgaccgagaagttgggcagaccgcggtcctgaccgccgtaggaccagccggtgagctggatggcattgacgccgtagcgtttggcctcgtccacgtatttgggcaggtccttgatcttgaagttaatgcggctttccgacgagttgatctgcagctgctgccacgtattgacctcgtcgagccatgcggcgcggtgcggttccacgaaccacgtcttccgccatgccttgtagatatccgcgcccttgtgccaagtacccgcatagggggtcataatgaccggaacaaggttgcggctctctcccggctggagataaagcatgcgcgcggccttgatctgcgtacgcatcagcttgcgttcgccgtttccgcgtttcgaggttgcggccccggcctgcgcggcataatccccgtcgggcagggtttcgtaaatgcagcggatatattcgtcgagcttgtggtccatgcttgacagataaagcccctgcttggtgttgtgaaccagcgtaaacgcatgttcgggcaggttgctccagcccgtgccggcctcgcgcggatagagttcttcggtgttgaacttggtgtaggtgaaatactggaaaagcatccgctgcgtatcttcgggcacggtcacttcgcccatgaagggccatgtgagctgctcgaccacagcatcggaagcgttgtccagcgtgccgctgtaaaccagaccgtcgtcggtcaggctgatacggccctgaaagccgatgtccagtttctcggaacccgccttcaggccgttccacacaaaagtcagttcgttgcccgaaatcttcacttcgggacgctcctgcgaagattcgttgatgacgtaaaaacgtccgtcggcaagtttgacattggcctcgaacgcccggcctaccgcagcgttctccagcattttccagcccgtcagcttgctctgcatgccgaccagcgcgccgctggcaaggtcgatttcggcccgcatcctgtcgttttccagcgtatatgtctgccgggcggcagcaaccgtcgcagcggcaaggccgagcagtatcaaaaataatctcttcatggtatatcggggtttacttttcaaaaatcacgactgccgactgcggagcgatctcgacactgccgccgaaggttttctgcgccgggtcttcgggcgaagcgtaggccatggcggaagcgcccggaagcgtcacctcggccttcgacgcccgttcggtgcccatattgaccacaacgacggcgcgcttgccgttccggccggcaaataccgaataactcaggtcgggaccattcacctgcgcaccctgccgctcgacgaacgccgcattccagagttccgccgcataacgttcgcgcagcgccttgatccggcgaccgtattcggcgatatggggatagtctttcaactggctgccgtggaaattgaggtcgaaggcgatgttgaagcggttcagcaacgcctgattcatatcgcggcgggcgcggcgcacctcggctccggcgattaccggcgtgaacggatcaaggtaacggcgtttggcccactcgccttcggaggcgttgagcgagtacccgtcatagaaggcctgctggctgtcgaggaatccgaagcccagcgcggccttcgcaccgtcggccttaacggcttcggctatttcgcggtctaatttcagcacgccgttggccgtggcttcgcccgcgcggtggccgtgcttctcgtcgaagcagaaaaacgtcttgtcacgatggttcggatcgttgttgaggtagccgtcggccgcacgcagcgccggcagcgagagccactcgcgctttacgatttgctggaattcgggtgcgagcggacagagcagcgaacggttgtaagcccagccgaaggggtccttcatcacgaaaggctcgtacttcccggcataagccttcatatgcgtattgacctcgtaccagttggtctccagcacaacgcgcacgccgagttcccggcaggccgcaatcgcttcgtccagaccggcgacctgctcgatccggccggcatcggtgccgcggtaccagccgcggacctgcagcacgcctacgccctgcccggcggcctgacgcgcataacgcagcaggtcgtcgccgctgccgataccgattttccaccacgtaagcggttcgcgcagccatgcgggcgccgtcgaaggatcgtcggtcgcgcggtccttcctgtaaatatccacacccgccgtccacggaccggcataggggaccagacgcaccggatcgagcgtcgtccgctcgccgggcttgttgtagacgacctgattggacttgaactgaatgcggaccaattcgccgtcgatctcgtcctcgtagggattgacgctgcgaatctcgaaaccgggaatcagctcgaacgaggtgatgaccatgtagcgcggcgcggcatcgcgggtgtagaacatgaatccctgatcgcggttgctgacctgcaggtacgagcgttcgggcagttcgtaggtcgaagtcggataatccacgccccaataaccgtgctggttgaagtgatgcggaaacaactcgcgctggtcgctgcgcgtactgtggtgcagcggctggcttttgtcgggcaccgacacttcgccgatgcagggccacgagacgtactcgaccggatacgggctgtcattgatcagctctccgccgtattcgagtcccgtgtcggtcagccggacctccccgcggaaagtgacatcgacaggctccgccagacggggcgatttcaggttgctccacgtgaagacgatacggtcgcccgaacgctcgacgacgggcgcctgctgttcgatacccttcacgacgttgaaccgatagtcctgctcggtcatttccttgccttcgagcggcagcagcagctcgaaggactgccccagcacggcccggtccatgattttccagcccgaagccttattgacgagtccgaccagcgcgccgctcttcgcatcgaacgtcgctgcgatccggtcgttctccaacgagattgttcccgccgccgcgaaaagcggcgtgcacgaaagaatcgtccagatataaagtagttttttcataggaaatatttattaaaaaacggggaggagcggcctcaaaagcggctcctccccgcaaacatcagatagtcagacgtaccgaaggcgcataattatacttggcattggccacgtcaaccacggcgccgacacggaagtagtaagcctgtccggccttgaacggcgaagcgtccatccgcagcgtaaagacacgccccgtatccttgaacgattcgttcacattctgcgtagcgcgggcatgcgcatagttgtccccgacgatgtagtcgatatggccgaaaagcccgacggcgcgcacgttgctgtccacggtgggcgtcacggtaaaagtcgccacgatctcggaaccctccttgcggatcgaagcgttcgaaatgcggatgtagggctgcacctcgaaatcgagccggttttcgccgcgcttgatctcgtagccctccagccggtcgggaatcacgaagttgctctcttcgaaatagatgtcgtatttggccgcgaacatcaggttgttgcggtattcgccgctgaccttgaagatcatctgctggcggtcgggattctcaaatcccagttcctcgtacatgatcttggtgccgttgatgtcctgctggatcaacgctccggtcttgctgtcacgcacttcgccgtaaatctgggcgttcggcccgtcgtagttgtccagttcgcacgacacgagcgaagcggacaggatcaccgctgctgcggcgtatttaaacatgtttttcataatcgaatcgaccgttaatagttagggttattaatcaacgagttgccgccgattcccggaataggacggtaataggccttcggctcgaacttgtgctgggcgtttccgggttccacttccgccctcacgaagatgtacttcttctcaccgccggagaaatcgagcatgggcacgagtcccctgcggcggaacgtaccgtcgaaaatggtgtggaactcacgcagacggaaataatcccagatcgtgttgtattccagcgcgaattcagctttgcgctcacggcgtacgttttcggaggtcaaagccagattgtcgaggaagccggcccggtggtgcaccttgttgagcgcctcctgcgcggttatcacgccctcggcattgggcaggttgctctcggccacggcttcggcatagttgagcagcacctcggcatagcgcagatcgacgaagggagtgaccacctgatcccagacctgatcgcccgaacccttgagatacttcttcagcaggaagcccgaacgggtgccgttggcacggttgtccacccatcccgaatagcgtccttcgtcggaatcccccttgccgtaataggtgacgccgtcgaaaacataactgtcattggcctgccatacgaccgacttgtcctgtttgcgcagaccgccctgaataaggatcgtctgaccgccccactgcgtattgggaaggatcaccgacgcatagagacgcggatcgcggttggcgaagatcgttgcgaaatcatcgtactgtttgtagtcgacgttcgggttgaagccgttcgtagcataattctcgtttccgtcgttggtcgtgaccagcttgacgtcgtaagttcccatgcgggtctgcggatcgataacggcatacgactcgaccagatcgagcgtcgggcagcagcggccgccgtattctaccgccagctggttcggctcgtgccacttacccatattgtgggcgatacccggatagacgtaatcgcgcaggaaaatcacctccgaaatacctttgccctccacgaaaatcttgtggtagttctgcgcagcctcgtccagcgacgccggattttcgccgtacagcgagaatttgccgctgcgaatcacctcggccgaagccttgatacactcctcgtagaaaaacttcacgtcggcatcggtgaagccgcccacgagtttctcggtcacggcctcacccgtcagcatcgcaccgtcgcggtcccagaatttgccgaccgaagcggcgtacagcgccgcacgcgacttgagcgcataagccgtccatttgttggcccgctcctgcgtggttgcgtccggcaggctcgcggccgccttgtcgcacatttcgaggatgaatttccacgtagcgacctccgtgctgcgcggcaccttgacggcgtcgtaatcgccgttgaactcctgcacctcggttatcagcggcacaccgccgtaacggcgggccagcgcgaaataggtataggccatcataaagtaatactcgcccgtcacctgatcgatagtcgccggattcgaaggcttcatcagcggaatattggccttgagttcgttgaatccgcggatgtatttgtaaagcgcctcccagtttccgaaacggtcggtctggctggcgacgtcgccccattcgctgtgcaccgcttcggggccggacatcatgttggtcttgccgccgtcgcagcgaccgacgttataacctccgccggtaaaatcgtagcggaaatcttcgataggcaggttgtaataatgtccggccatataggcattgatacctccgtcgctcgacagcagggcattgcccgttacgcggtctttgggttccacctcaaggaaatcggcgcaggacgctgccccgaaaaccgttacgagacccataatcaaatatttaatctttttcatgtccgatcagttaaaaagtgatgtttacacccagattgtaagacttctgcaacggatactggaatccgttgccatcggagatttcggggtcgaactccttgagatatttgttgcagattacgagcgggttggtcaggttgatgtagcagcgcagcttggagatgcccgaaccgcggagcagtttggccggaagcgtataacccagctcaaggttcttcagacgggcgtgggccgcattgatacgctgcatgttgctctccagacggttggcgccgttgtcggcgtccgtacggcgggtagccggatatttgccgggaatccacgcgctgttcggatcgtagacgtcggccagatgccagcggtcgtaatagaatgccggggagttcgacgaatcgagcgccagcacattgcccagcacctcgttgtacttggccgtatatttggccgcgcccgaccagagcatgttgaaatcgaggcccttccagcttgcgtagagcgtgatgccgaacgtcatcttgggctggccgttccagaacatcggcttcatgtcgttgccgttgatcacgccgtcgccgttgaggtcgaggtgcatgtagtcgcccggcagggtcttcgagttgccgtagccgccggtttcgatcacgccgttgcggatctgatcgtagttatgataacggccgatcacctcgtatccccatccgatatcgtggtagcggtcgatgttgccgttcttccagcggtcccagctgctgcgatagggcgaacgctcctgaaaagtcgtcttcgagcggctgaagttcatgttggccgtaactccgtagtggaattcgccgaccgaattccggtggccgatcatcagctcgaaaccttcggtgcggtccgcattgaggttctcctgcggcatggtggcgccgaatgtattgggcagcgcccccagccggtttccgagcagtccgtcgcggtcgcggcggtagatgtcgaacgaaaagtcgagcaggccgtcccacatcgtcaggtccataccgaagtcggtggtttccgtggaaacccacgtcaggttggcgttcatcaggcccgaactggcatagccgttggtatatttgccgcctcccagcacataacctccgctgcccacataaccgggaatatactggaacggattaccggcgtcctcgcccgaacggccccacgacgcacggaatttcaggttggtcaggaacggcacgttgtccttgatgaacgactcttccgacagacgccatgccgccgacaccacggggaagaagccccagcgctggtcgggcgcataccggtaggagccgtcttcgcggaatgcgaattcgaccatatacttgctcttgtagtcgtaattgaaacggcccacgaccgaaacgaacgtatattcgttggtattgccgccggcctgctgcccgttcacgggagcgcggtcgatgttgtcggtcgtgaaaagatcgctgtcatagaaacgcttggcgcttacgtagcggccggtctcgcggcgggtctcgaatacggccacggcgctcacgttatgcgcatcggcaaacgtattcctgtaattgatcgacccttggaaattgagacgcgacgaatcccagtcctgctcctgaatgctgggatcgtagtttgccgaaggagcgtaggagtcgtccagcgccgaataggtgtaggtcatgatacgcttctgcacgcgggtgcggatcgtagtcttcgaatcataggccgcctgcgccttcagcgaaagtcccttcacgccgggaatatcgaacgtcacgcccagagacgactggaagaacttgtcacgccattcgccgtaaccgaacaggtcgcggtcggagaaggccaccgggttgtcgttgagcggccgggggcggttgtaatagagcggattgttgttggcgaatacggtttccgaaggaatgataccgtgcacggccttgttcaggtagaagaaggcgtcgtcccacgttccgggctgcttgcgcaggtcggtatatcccgaaagattcaggtccacacgcaggtatttgttgaccttcagtttattgccgctgcggaaagaatacttgtcgtagccgatgtcgcccgtacgcagcagaccgttgtcggtcatgtatccgacgctcgtataggtcgacacgcgatcgttgccgccctctacgacgatgttgtactgatgctggaacgcagctttcttgaagacctcgttgtaccagtccacgttcgggagggcctgagcggcctgcagctcctcgcgcgtagcgaaatagggcgaaccgcccgaattgacgccgtcttcgttgcggatctcccaatactgatgcgcattcatcatcttggtatgctgcgtaggctgcgaaaatccccagttggcgttgagcgacacgcgcagcggaccttgggaaccggctttcgtggtcaccagaatggcgccgttgctcgaattgataccgtagatggcggccgatgcgtctttcagcaccgtgatgctctcgatgtcttcgggattgagtttctggaattcggtcgtctcgttgcggaccacgccgtcgataacgatcatcggggtgcccatgccgcggacgttgatgttggtggagaaactgcccggcataccgctggtctgacggattcgcagacccggaaccttaccggccagcgcgacggccagcgacgggcctttggtcgtaaggatctccttgtttgaaatgctggaaacagcgcccgaaagggttacctttttctgggtgccgtaacctaccaccacgacttcgtcaagcgccgacgccgacgaaaccatagccacatgcatgttgagtcccacgggctgttccaccggctccattcccagataggagaatacgagcgtttgggcggaagccggcacgtcgaacgagaagcggccctcggaatcggtcgtggtaccgaccgtggtgccttttacaatgatattacatccgacgatcggcccgccgttctcatccaaaacgacaccagccgcctttttttgcgagggggggggaaatgagccgttctgcgccgccgcacccagcggcagcagcagagacactgcgagaatcaacagcaaactccacggattgacccggcggagcaatacagcgttagaattgttcttcataaggttaataaatttgttttaggttttgataggagttacttttcgcagggactaccccctgcagccggaacattcggttccgacgataggcacgacgtttttctcattcattcaggtttagtgatacgattaatatgaactgttgtctcgattccattaattcaatacgcttccgcaggggccgatgcagtattccggacagacctatattatataatgccgccgatcacgttccgtccgggtctcaaaatcggtctttcggcttgcctttacaaaattaggaagagcagccgacccccaatatgcattaattaatcaattatgatactattttaacataagacttattttattatcttaaaataatggtcaatattgagaaatatctacttttgtataccattcgaagagctgcgaaagcatcgtaaactaaccataaaaaccagaattatgaaacagacccggcatttacttatcgccctcgctttgggtacaatgctaacttcctgcggcgcatccgtttccaccgccacggtcaccggaccggccgcatatgtcgatccctatatcggttcgggcggccacggccacgtcttcgtgggcgcctccgttccgttcggcgccattcaggccggcccgcagaacatccacaagggctgggactggtgttcgggatatcaccactcggacagcatcgtcatcggcttcgcccacacccacctgagcggcacgggctgcaccgacatgggcgacgtgcagatcatgccctacacgggcgagctgcgctccaaacgcggccggcaggaggacatcggcggaagctgttcatcctattacagccacgacaacgaatccgtatcgccgggctactattcgctcaaaatggacaacggcgtgcggatcgagatgaccgcttcgacccgcacggcgctgcaccgcatcacctaccccgaagcggaaggccgccgcctgctcatcaacctcgaagagggcaacggcgacggagcgtacgacacctatctcaggcagacggatgcgcacaccgtcgaaggctaccgcttctccaaaggctggggtccccacaaggtcttcttcgcgctgactaccgacaagccgatccgctcgctggcgcttttcgacgccgacaccccgtccgagggaagcgagatccgctgcaagggcgccaagggcgtcctgaccttcgacgacgagaagcaggtcatggtcaaggtggccatttcatcggtaagcagcgccaatgcgctcgaaaacctccgcaccgaaatccccggctgggacttcaaagccgtgcaggccgaagcgatccgccgctggaacgacgagctggcggccatcgacatcgaaaccgcggacgaaaccgccaaaaagatcttctacacggccatgtaccacgccttcatcgccccgacgacctactgcgacgtcaacggcgaattccgcggacacgacgacaaggtcgtcaaagacgccgcatggaccaactactcgaccttctcgctgtgggacacctaccgcgccctgcatccgctcttcacgctgatccgtcaggaccgccttccggatctcgtcaattcgatgctctcgatctacgaccagcagtcgaaactcccgatctgggcgctgccgggcgccgagacgaacaccatgccgggctacagcgccgtgccagtgatctccgacgccattctcaagggcatcggcggcttcgacaccgagcgggcctaccgtgcaatgaaagcctccacgacctatccgctgcaggacgccgtgccctatgtgctggaaaacgagttcattcccgacgacaaagcagccaacgccacctcgatcgccatggaatacgccgtaggcgactggggcgtggcgcaggtggccaaaaagctcggcaatacagccgattacgaggaatacctcaagcgcggaaaatactacacgcactatttcgacaagtcgatcaatttcatccgcccgaaactcgaaaacggcgagtggctcacgccctacgatccgttcgagtcgatccacggcgtgggacacttctgcgagggcaacggctggcagtacacgttcttcgtgccgcagcatcccgaaggactgatcgccctgatgggcggcgaccggcccttcacggccaaactcgacgaattcttcaccgccgagggcgatctgggcgaagaggcttcgatggacatttcgggtctgatcggcatgtacgcccacggcaacgagccgagccaccacatcgtctacctctacccctatgcgggccagcagtggaaaacggccgagaaagtgcgctacatccagcgggaattctacacggcccggcccgacggcatcatcggcaacgaagactgcggccaaatgtcggcatggcatatcctctcggcgctcggattctatcaggtgaacccgtcgaacggcgtcttcgtcttcggcagtccgctcttcgaccgggcaacgctccggctgcccggcggcaggatattcgaaatccgggcagaaaacgatcctgcgaagaacatctacatccagtcggtcaagctcaacggacagccctacgagaactcgtacatcacctacgacgacatcatggccggcggcacgctgactttcgtgatgggtccccggccgaacgaagcgttcggcgcgaaacccgaaaaccgtccccaaaccgccatctaacacacttcacaccatgctcgaagcactgaaacaacaggttctgcacgccaacttggaactggtccgccaccggctcgtggtcttcacatggggcaacgtgagcggcatcgaccgcgattcgggactcatcgtcatcaagccgagcggcgtggaatacgaccgcctgacggtcggcgacatggtcgtggtcgatctcgaagggcgtgtggtcgaaggcggactgaatccctcgtcggacacgccgacccatatcgaactctacaaggctttcccggcgatcggcggcatcgcccacacccactcgacctacgcgaccgcatgggcgcaggcgcggcgcgacattccggtcgccggaaccacgcatgccgactatttccacggtcccattccctgcacgcgggacatggcggccgaagagatcgaaggggaatacgaactccagaccggccgggtcatcgccgaacggttcagctcgctcgatccgctgcacacgcccggcgtgctggtcgccaaccacggccccttcacatgggggaaaacggccggcgaagcggtctacaacagcgtagtggtcgaggaggtcgcaaaaatgggattcatctgccactcgctcaatccccgaatgccgatgaacgcaggactgatcgaaaagcatttcgaacgcaaacacggcgtaaacgcctattacggccagaaaaaacgctgatccgactctcaacgcgcaaaagccgcaacccttcggggctgcggcttttcgtttaacggcatgcggacccgcggctcggaaggcaggagcgcttacgccctctcaccgcgcggtgcgcaccgattaatcaaagatgatactattttaatctaaaggtaattttaaatacttaatattttcactttcccgccaaatcggtctaaatttgtaaacatccgtacccgaaaggcatccggactgtagtccggtctccagcaggtacgcacaacccgaacttaaaccgaaccggatatgaaacgaatcatctgcaccctcatgggcttcgccgcactgacggcaggcttcgacgccgctgcggccggacgcaagacctccgtccccgaacaaaaggaacaaccgacgccccggctgcgctttacgggcgatccgttcgcccagcaggcgaccgccgtcttcgccgaaacgctgcatgacatgcgcagcaagatcgagtacggctcgaacgaacgcttccccgcaggatttttccacacctcgaccgagcccgaaggcgttccacaatactacaacgacatgtggacccgcgactgcggccgcggcgtgatcgagctttcgcgcttggggttcgccgacgacgcccgcctgatctcgcgctacttcctcgcccacatcaccgacggcgaccactggggccgcgaactgcaccactccgccccgcacgtcgaactcgacggcaacgtcctgatcctgtccggcatctgttcggcatggcgggccaacggcatggagcgcggactcggccgggagttctgcgacggcatcgcgcccgtagtcgcatggatcgattcgctgacgcgggtttcgccctacggcggactgctcccctcgacctccgaactttcgggcaaccccagcaccgactatcccgtttacagcatcttcggcaactacggcatctataccgtcatggcgcagatcgccgacatggccgcagccagcggccgcccggagctggccgcgcaggccgtacggctccgcacgacgatggagcaggccctcggacggctcgtctccgacggtcattacagctatgcgcccaaaggatgctggttcaacggcatcgacagccgcaacggccgcgcatacgacatctccgactgggacggcacttcatggcccacttggcactggacgcggcagctgccctacatactccactacgactacctttcgcccaacgccgacggcaagttcgccgaggtccatgcggcgagctaccgactgctccgccactggatggccaagggcgaatatttccgcaaatacggcttcgtaagcaacaccggatggaccggaatgggcggacggcacgacgaaacgatgtgcggctacggacagggcttcttcacgcaggccgcgctgatcgccgacgacgtgaacgtctacaccaaatgtctggaaggaatcgcccggcttggatacgacggcggggtcatcgaacagatgtcctatgaaaagaatccgttcgtcatgcacgaatgtttcaactacgacaactacgaaaagggcctcgaccacaccttcggagtccactccgagggccggcgcgagattatggaaaatcccggcgacgagggcaatctcgtgcaggaagccgagattctcaaagcattctcgatcgtcgcgggcgtccgctgcgaaggccgcaggctgacgctcatgccccgcctgccgtggttgtgggacacaatggagtgcgtggactggcccgtcaccgacgccgacgggcggacgcaccacatccgcttcaccgtccgccacgaacgctggctgcgccgatgcacggtcgagctggaaggcatcggcaggttcgaaggcacggacatccgcttcggccccttcccgcgtctgctgagcaacccgaagagttacgaaaccgaactgatcggaaacgcctcgtggatctgggtccgcggcatcaaaggcgacaaacgcacgatcaccgtcgaactctaaccgcaacaggccatgaaacaccttttcatcgcggcatgctgctgtctggcgtccgccggattcgcggccgagccgttcgaaatccgcggcgtgctgccgtggcacaacttcctctgcggcccgacggcttggaacaaagccgattacgaggcttacctcgacaactgcaaagccgaaggcatcaacttcatcggttttcacaactacacgggcggcggcgaacgctacgccacctacgtcgaaccgatggtgcgcatctcctaccggggcatcgtgccgcaggccatgctcgacaattcgctcagctgccgctggggcgcactgccgctccggctcaaggagtttgcgttcggctcgcagcgggcgctcgacgtaccgcgcggcgccgaagccttcggcagcgactgctccctgctttcgaaaacgcccgacgaacactaccgcaacacacagcggctgatgcgcgacgtactgcgcatggcccacgaccgggatatcgaaatggccatgggcttcgaattcggcgtcgtgccgcccgaatatttctcgctttacgccgcaggcagctgtttcttctggctcggcgcaggcaacatggtccccaatccgtgccatccgacctcggtcgaactgcaccgggcggcactcgacgacctgctggaaaactatcccgacatcgactacgtgtggctctggctcaacgaacattcgtttctgggcgtggtcgtcgaacaggcgctgggcgatcccgccttcgcggaggtgttccgccgggaatcgggccatttcgaagaggcgcagagcgacagcgaacgtttcgtgggcgtgtggtcgctcgaatacatccgccgcacgctcgaccatctccggcaaaaaggctcccgcgccaagctgatcatcggcggctggggcggcgggggccaactgccgggcatcctgcgcggactggaccgggcgctgcccgaagaggttgtcttcagctgtctgaaccccgatctgggacgcacccgacagcccggattcctcgccgacatcgcccgccaccgcaaagtctgggccgtgccgtggctcgaaggcgacaaccagatgtggcaccagcagccgcgcgtgggcaagatgcgagaccacgtacagctggcccgcgaacaggggcttcagggcgtggcggccattcattggcgcacggcggagacccgctataacttccgcacgttcgcccgctacgcccgcacgtcggacgacgcgaccgtcgaaacgctctacaaggagtatttcgaagaggatttcggcgcgcaggccgccgcactcgcgcccctgatggccgccgtcgatacggccaacgcatgggagggaccgcagtccccggagtacttcgccttccgtcccgactggggtgtgctcgacgaagcgaacgccgcttcgcggcaggggatcatcgacgccatcgacgccgtgcaggacaaagagcagacgccgcagcagcgccgcaacctgaaaaacttccgggccatgctctcgttcgagctgctgctggacaaggtcgtgcgggcgatggctccgggctgggagctgcgcgacaaagcccttgcggagaaccgtcccgcatcgcgcgaagcctgcgccgcggcgctccgcgagttggaatccgcccccgtcgaagagctgatccgcacctatgtttcgcgcaccgggtcacgcggcgaaatgggcatcctgacctcgatcaaccagcggctatggaacaattacctgctgctgaaaaactacctgaaggagaacacacactaaaataaccaagcgatcaaacaattatccgccatgactaaaaaactgctaccgctactgttgctgctgggcggtctgtacggcgcggaaaattccgcgcagtcgcagacccggttcgaccggccgtttgcgccccaagagggtttcgttgcgactcccgaacgtccctgccgggacgaaatctgcctgaacggccgctggaagttcatgcccgtcgagaccgaaggcatgacgcccgaacaactcaagacgcaaacctacccgacggcccccgtatgggacgccgtggagtgcaaggttccctcgccgtggaacgtcaacggcttctcccgcggcggaggcggcgacttcgtcgcctatcccagttacccggaggcttgggagcacgtgcaggccgcatggctgcaaaagaaggtgcggatacccgccggctgggaccgccgccgcataatcctgcacttcgaagcggtcgccggatatgcgcgcgtattcgccaacggcaacctcgtatgcgagaatttcgatctcttcctgcccttctccgccgacgtcacggactacgcacgtcccggacaggagatcgaagtcacggtgtgggtcgcccgcgcatcgctgttcgacgaacccggaaaatacgggaaaagaccctacatcggcggctcgttctggggcaaccacattgcgggcatctggcaggacgtcttcctgctgagctatccggaggtctacatcgccgacacctacatcgacccggacgtggccggcgacaggctctccgccgagctgacgatcctcaacacgaccggcaagccgcagcgcgtcgcgctcagcgccgacgtacgccgctggcacaacgacgccgacacttcggcgctgtcatttcccgtcccggcatggcacctcgacgacgctccggccttggattatcccgtgcagcacgtaacgctcgcaccgggcgaaaacaaggtgacgctgcaaggcgttccggacggacggctggagaaatggtcgcccgccaatcccgcgctgtacggcatgaccgtctccatgcagggcaggaagggaatcgccgacagggattacacgcgcttcggctggcggcagttccgactcaaaggcacacggttctacctcaacgacgaagtgatcgagctgaagggcgattcgtggcacttcatgggcattccgcagatgacgcggcggtacgcctactcgtggtaccgcatgctcagggacgccaatgccaacgccgtacgcctgcatgcgcaggttttcccgcgtttctatctggatatggccgacgaaatgggtatctgcgtgctggacgaaaccgccatgtggtcgagcgacggcggtcccaaggtcgatgccgaagccttctggcaggcatgccgcgaccatgtcagaggcatggtcctgcgcgaccgcaaccacccctcggtattcggctggagcatctgcaacgagatgctggccgtcaccaagcacgtagtccacgcccccgaaccgatcgtcgaacgcaacatcgccgagatcaacgaatgggtgcgcatcacccgtgaatgcgaccatacgcgcaactggatttcgggcgacggcgagacccagaccgacaccgacctgccgaccgtcatcggccactactgcaacacgccgctgatgctcgaatggaagagcaagggcaaaccgtggggcgtcggcgagatgggcatgtgctacgccggaaccccggcccacgtctcggtggtcaacggcgaccgcgccttcgaatcgcaggaaggccgcatggagggactcgcgggcgaagcgttcgaaacgatctccatgcagcgcggtctggatgcctgctacgcctcgattttcaacctcgcgtggtacggcgtacagccgctcgaaatcggactcgacgacatcacccgtcccgtagaagcggaggacggcatctggttcggcccctaccgggaaggagttccgggcgtccagcccgaacggctcggcccctacaccaccacattcaaccccggttacgatccccggcttccgctgtaccgcccgtgggcgttgttcgagggcgtgaaagccgcattcagcgacacctatgccgcccagcccaacaaatgggccgtacgcaaacacaccgagatcagcgaaccggttccggccgcccgcgacgtcgtctggatctccgccgatccggagtcgaaggccgaaaggcagttcgaagagctgtccgtggcattccggccgctcgacacacgccgcagtcagctcatcctgctcgacggcatccgcccggcggaagatccggccctcgtcgaacggctccgcgccgcactcggcgccggaagcaccctgctggtatggaacatctcgcccgcggcgcttccgctggtcgaaaagctcggcggccacgccgtgacgctcactccgcgcaatgccgccagctacatcatacgcggcaaacactcgctgctcaacggtcaggacctttcgacgctctatttcaacgaacggaccaaagagccggtttccagcttcgtgatgacctccggcgacgcctacgccaccctgctcgacccctgcaacacggattggagcaaatggaactatcaggaagagaacatcaaaaccgggcaggtgctccgcagcgagcgggagagcaagccgctcggcagcgtactgctccgcggcgaggccggccggggcgagctgctgctctcggcgatcgaccccttcgtgctgggcaacaagggcagtgcgctgatccatgaaatgctgcacaatctgggcgcacggttcaacggccgcccgcgccatatcccggcggcgctcgaccggaacggcatggtcgtacacgccctgctgagcggcacctatgccggcggaagcatggacgaggtcatggcccgcgactacctcgaaggcactccggcggccgacctgcggccgggcgcggtaacctccggaagatattggggcgccatggacagcaacgaagagggattctggaacttcgaaacgatgaacctcaagggcgagcagaaagactgcgccgtttacctgagtttctggctgttcagcccccggtcgctggtcaacctgctgctggagcccaacatgccccgtctcgatctggaattcgcggtggacgacaaactggccgtatacgtcaacggcaaccttctcgacaacgcggtcaaacggcaggacaaccccgccctgccgcagcgcatcgaaggcattccgctcgaaaagggctggaaccatgttctgctcaaggtaggccagttatggggaggctggaacggccgcttccgcttcaccgccaccgatcccgcctacatgcggcagctcgaatcggtcatcatgcagtaaaaccccggaagccatgcgaatcaaactcctgaacacagcgctctgcctgctcttcacggccgccggtctgcacgcgcaggaaaccgactacggcgccggcgcagccaacgtacgtttcatcccctcgcagggacttctgggcggacgcaccgatttcgactgtctccggctgaaaaaccaccccgccgccagcggcgtgccgctgggcggcatcggggcgggcaacgtgcaattcgcacccgacggacgcttcgtccggatcggaatgaacaacatacacctgcccatccgcaaaagcaccggatcgttcttcacgctctggcaccgcaacggcggcacggcggacgcacgcaggctcgtgcgcgacacgctggtgcaatacggcatggagggcgtttccacgacctattacaccggattgttcccccgcgccgaactcgatcccggagaggtgtttccgggcgtaaaagtccgcatccgcgcctgctccccgctcattgcgcacaacgtcaaggattcgagccttccgctggcgttcttcgacgtcgagctggaatccgccgaaggaggcgagacggccgtggccttctcgtgggaggatttcatcggacggggcatccgcgaacccgaaagcatcgaaggcatggacggccagcttttcggacagggccgcaacgagctgtgcaacggcgaagagtggcccgaacgtcctttggagcagaccttcgcccgcacatgggagtgcggcgcgatggccggagtgcggcagttcgcggcaggcccgctgcaacccaaacgggccaatttccagaattacgtcgatgaagtggccgttctggcgcagaccgactccgcgacccggctttctgcgctcacggcctacgacctcgccgcgggcgacgaggcgtgggaggcgttccgccgcaacggcgaattcgacgcaacggacgacggcgtcgcactactctcgacgccgggcgaaaagcggtgcggaagcgccgtggccctgaaaaccacactgcagccgggcgaaaagaaaacgttccgcttcatgctggcgtggtactaccccgaactcaaagtggaccgccgcagcgatccgcccgaattctactgggccggaggcagcgattacggccgctatttccacaatttcttttcgggactgtcgtctttggtgcgttacggggcctgcgaacgcgagaggctctgcgcgcaaaccgtcgaatggcagcggcccgtgttggaaagcacgctgcccgactggtataagttcaaactcatcaacagcgggtacgtcatctataccaacatgatcctcaacaagaaaggagacgtaaccgtcaacgaaggcggcatgggcggactggcaggaaccatggaccagcgcatctcgtcgcatcccttctaccagaaattcttcacccggctggaccgttcggagatgatgatattcgccgacgcccagcagacccgcggcaacatcacccacttcatcggccactattacttcggcatgggaaccgtcggcggacgcatcccgaccgaagagggctggatgatcgacaacacgggcggctggatcatccagctcgcaaaggattacgagcagacgggcgacatggagtacctgcggcgttacgccggacgggtgtacaacggcatggagttcctgcgttcgctgatgcccgaagggctggagattcccatcggcggcaccacctacgacgacttccaccatccgcccgtctacagttacggcgcgacgatctacctcgccacgctcaaggccgcccgcgtggtcgccgcggccatgggcgacgaagtacgcgtcaagacttacgaggagcagtacgcacggacgcagaaagagctgatccggatgttgtggaacggccgcttcttcgcctacggctgcgagaaggacggctccggccgccgcgacgacctgcttttcaccggacagctcggcggacagttcgtaagccgttactgcggctggggcgacgtcgtgccgatgccgatgacccgcgcatcggtcgtctcgcagttcaagatatcgctctccaagacccccgactactacgccaacaaagtatgggacatcggccggggacacggcatcgacaaccgggggtcgcagtgctggcccttctatctggagagctacacggcctatgccgccatgcaggccggatattacgacgacgcactggagatcatgcgccacatacagctcgtcaatctgcgccggggctggagctggtgccagaatttgtggaatcccgccgaactgacctacatgacggctccggtggtatggttctcgaccgacgtgctcgcaggcgcgggcctgaacgtcccggcgcaggagctccggctggcgccggtcgtaaaaggtcgcgagaaggtcgtcatgccgctctactaccccggattctgggccagactgacggtcgaccccgcccgccggaagataaaactgcagatcaccaaaaccttcggcgagcggcaaacgatcctctcgcgcatcgtatcggaacattacggagtccccgcggaagaacgcaaaatcataccgatcgccccgttcacgatccgcgaaggggccgaactggatctctcggcccactataaggagatcgtgcagaccccaaccgaacgcgccgtgcttcccgacgcggagagcgttccgttcctgaccgtcgataccgcagcagcgaccggccgatagcgaaaccgcggcaggcaggcgaggaccgcagactggaaaccgcaaagcgaagtgcgaaccgcagcccggaataagcgcaaacgccaatcgacaaaaacgcaaaccgcagcccgacaaaaagggttgcagcgagagcgaaaaaaaataccgcgccccgaaaagcgcggtattttctattctacaatatccgaaccccctatttggtttcgggccgcccggcagggcgttctgccggagttccggtctccttcttcttgctgtagaggaaacgcttgattttgtgcgtcggggttttgacgaagtcgtccttctcctcaacgacctccgagatacgcgagaaacggttgaccttggcattcacgaaatccagaatctcttttttgagctgttcggtcttggcctccaacgcctctttcttggaggtccactcctcgcgccagtcgtcgatcatgctttcgatctcgtcgcggttgaagtgcacgagggccaccagacggccctgctgttcggtgacgatcgaatcggcgatgtagacatgcgaattgaggacggtttcgatgtcctccggatagatattttcgccgcccggccccacgatcatgtttttcagacggcccttgatatagagccatccgtccttgtcgaattcgccgaggtcgcccgtccggaaccagccgtcggccgtaaatacctccttcgtggcttcgggattcttgaaatagccgagcatgacgctgggcgaatgcgccacgatttcgccctgacgggtatcgggattgatattctccagccgcagttcgacgcccggagcctgcggaccggtcgaaccgagccgcacctgcgagggcgcggcaccggccagcagcggcgcagtctcggtaagtccgtaaccgatggcgtaaggcaccttggcctccagcaggaatttctcggcgtctccgtcgagcttcgcgccgccgattccgaggaaacgcagacggccgccgaagagcttgagcagtttcttgcccgcgacgcggtgcaggtaacggcgcatgaagccgatcttatagagcgtgcgccagaatccggtggacttgaatttggcgagcacctgcaagcggtagattttttcgatgatcagcggcacgatcagcatcaccgagggacgcaccgcgcgcaacgccggcatcagggccgaggccgtgggcggacggtccaaatatacgacctgcgcgcccatcgagaagggatagatcatgccgatcgaacattcgtaggtatgggagagcggcagcaccgaaaggaatacgtcgtcgggctgcacggggaagatgctcgacgaaatgcccacctgcgcgcaaagggccgaatgggtcagcatcacgcccttgggcttggacgtggttcccgaagtatagatgatgaccgccagatcgtcgggtttgggcaccgccgtcgaaccttgggcatgaacctgctgggcgatgactccgaggttcttggtgcggaccacgacgttgagccgtccgatggtctctttcgagagtttggtgaaaagtttgtcggagacgagcagcgcacgggcctccgaatgctcgatgatcatgtccagctcttcgcccgaaaagtccggaagaatcggtacggcgatcatgccggccgaagtgactgcgaagtagcagacgccccagttgggcatgttgctgctcagcagggccaccttgtcgccggcctgcaggccggctcccgtaaggatttcctgtaccttggcaatacgacggcccacctcggcgtaagtcacgtcgtcgccttcgaacatcgaaaatgcgactttcgacgcgaacttttccacgctgttgcgagccagttcgtaaagtgtattgatggtcataatttttcgtttttaactacgtccgaataacgtgaaagtttggggcgaaattactaatttccggttaaaaaacactatttttgggacaaatttatcactatgctcgactatcagcacatcaaaaaacttgccgccgacgcaggattcgatctctgcggccttacgccctgcggccacatggctcagaacgaggcgtggctccgggcgtggctgggcaagggttatcagtcgtcgctgacctacatggaacgcaatgtcgagaaacgcgccgatccgcgcaaactcgtcgaaggggcgcgtacggcggtggtctgcgccgtaagttacaaaagccgcatcggcgaagggtatccccccggacaccgcaccaaaatcgcctcctatgcctgcacggcggactatcacacgacgataaaaggaatgctgaacggcatgctggaacatctgaaagccgccgttcccggactcggcggccgggcgttcgtcgatacggccccgctgctcgaaaaacaactcgccgtcgaggccggactgggctggataggccgccaatcgctgctcgtcacgccccgccacggcacctatgtcctgctgggcgagctgctcctgaccgacgaagccgacacctacgacgccccgttcgagggttcccgctgcggccgctgccgcaactgcatcgagagctgtcccacgggcgccatcgtcgccccgaaggtgatcgacacgggccggtgcatctcgtgccacaccatcgaacgggagccgtccggagggatcgacctcgacggctggattttcggctgcgaccgctgccagagctgctgtccccacaaccagaaggcgccgatgcacgccaatcgggcgttcgatcccgtcttcgacccgctgacgatggatgccgctgcgtggacggcgatggacgaaacggagttcgaagcccgcatgggcgcaacgcccctgacccgcagcggtctggcgcgcatccgcggcaatatcaaaaccgaataagcgctttcgccccgacgccaaaagacgtcgctcctacggtacgaaaaggcactccgacagtgcgatgattcggcccagcgatcaccccgactgcgcaagaaactcccggcggtacgaaaaatcactccgacaatgcgatgattcgccccggcagtccgccccccccactgcgcaagcccccccgcagtccgagaaatcgccccgactgcgcaagaagccccctcggcgagacgaaaaaagcggatccccgcaaagggacccgcttcgtatcgcatggctgaatttcttatttcgaaagttcagcaagggcggtcttggcattctcggcattgggaccgtcggtcacctgcttgaaagcggcgattgcctgcggcttcatctccctggcgttgtaagccgcgccgagcaggtagtacatctggctcttgtcggcagcgtcggtctgcgcgtcggcggccgcctgtcccagttcgatcaccttcgcgtaatccttcttgtcggcgtaagcctgcaggcggacattctgcgcaagcgcattttcgggattcttggccagcagttcgtcggccatcttgataataccgtccaaatcattggcggcctgcatcttggcaaccatattgttggtataaagcgccatatccgctttagccttggctgcgtcgtcggcgtatttgggatgggtcttggcggcgatggcctcgtaaacctccatacccttctcgtactgcgccatatcgccgctgctcatcgccatttcgcagtagctcatcgccagattgagcgccatgcccgtattgtcggggtcggctgcgtaacccttggcgaaaatctccgaagcggtcgcgtaatccttgttgttgaaagcgtcgccgccctgtatctggtaaatcttggcaacccagccgttcgatttggccatctggttcatatcgccgtaaagctccgacagctcggccgacttggtgaagttcttcagagcctcgtcgtaattcttggttttcagcgcattgccgcccagcatgaagtagcatttgggaagcgtggtcttggcggtggccaccagcgatgcggcggtctcgtcgtccatgcccttgtcgatcacctcttcgaattttgcggcagctcccgcgaagtccttgtttccgaaagcggcggccgcttcgttatacactgccgtaagatcctgcgccgaaagcgacaccgtcgccagcagcgcgattaccgataccaataattttttcatttcctattccgttttttaaagtttttcagttcgtgcacccgttttcggatacgttgatcgcaaaagtatattttttttcctttttttcaaaatctaattgcgcaaacctgcgaaaaaagaggtcatcaactcctcgcattcttcgccgagcacgccccgcaccaccgtcgttttaggatggaacaccgtctccgaataacgtctgtaacccttcttcgggtcgtcggcgccccacaccacgcggctcacctgcgcccagcctgcggctccggcgcacatgatgcacggttcgacggtgacgtacagcgtgcagccctgcaggtatttgccgccgagggtggatgcggcggcggtcagcgcctgcatctcggcatgggccgtaggatcggagagcgtctcgaccagattatggccgcgtcccacgaccgcgccgtcggccacgaccaccgcgccgatgggcacttcctgcaactgtaacgctttgcgcgcctcgtttagtgcgagacgcatgaatttttcatcggtttttttcaggtcttccacgagcgggattttttgcaaaagtaagcaaaaaactctttgcgactgctccgcaacgcaaataatatcttccgggattccttatttcgcatcttttgtttaactttgcgggttgcaaggacaaattgaacaaaaaaccatatttcctatgtacagaacccatacgtgcggctgtctgagagccgacgacgtaaaccgaaccgtcaccttagccgggtgggtgcagaaagtccgcaacctcggcgccatgaccttcatcgacctcagggaccgttacggaatcacgcagatcgtggtcgaggagcactcgcccgccgaagcccgcgaaacggcctgcaagctgggccgcgaatgggtcgttcaggtgaccggcaaggtcgtcgagcgttcgtcgaagaaccccaagatggccacgggcgacatcgaggtggcagccgagaaggtggtcgtgctccatgaggccgaagttcctcccttcaccatcgaggagacgtcggacggcggcgacgacctgcgcatgaaataccgctatctcgacctgcggcgtccgcccctgcagcgcaacatgatcctgcggcacaagatggcgcaggagatccgccgcttcctcgactcggagggcttcctcgaaatcgaaaccccctatctggtcaactcgacgcccgaaggcgcccgcgacttcgtggttcccagccgcatgagtcccaaccagttctatgccctgccccagtcgccgcagaccctcaagcagctgctgatggtggccggatacgacaaatatttccagatcgtgcgctgcttccgcgacgaggacctgcgcgccgaccgtcagcccgaattcacacagatcgactgcgaaatgtcgttcgtcgagcaggaggacgtgctggagatcttcgaacgctgggccaagcacatgttcaaggaggtgatggacatcgaactgaccgaaccgctgcgccgcatgccgtggatcgaggcgatggagaaatacggttcggacaaacccgacctgcgcttcggcatggagttcgccgacatcaccgatctggcgaaaggccacggtttttcggttttcgacgatgcagaatacgtcaccggattcgccgcaacgggctgcgccgtctacacgcgcaagcagatcgacgccctgacggagttcgtcaagcgccagcagatcggcgccaaggggctgatctggatccgcgtcgaggagtccggcgtgaaatcttcgatcgacaagttctacacgcccgacgaggtccgcgcgatggccgaccgctgcggcgccaaggccggagacatggtcttcatcctctgcggcaagaagttcaagacgctgacgcagctctgcgccctgcgtctggaagtggcccagcagctgggactgcgcgacccgaaaaagttcgcgccgctctggatcgtggacttcccgctcttcgagtgggacgacgagacgcagcgctattacgccatgcaccatcccttcacctcgcccaaattggaggacgtacagtatatagacagcgaccccggccgcgtacgcgccaacgcctacgacttcgtctgcaacggcaccgagatcggcggcggttcgatccgtatccacgactcgaaactgcaggccaaaatgttcgaggtgctgggcttcacggccgaagaggctcaggtgcgcttcggcttcctgatggacgccttcaagttcggcgcgccccctcacggcggtctcgccttcggcttcgaccggttgtgttcgctgttcggcggctcggattcgatccgcgactacatcgccttcccgaagaacaacgccggccgcgacgtgatgctcgacgcaccggactgcatcgaccaagcccagctggacgaattgtgcctatcgctggtaaaacccgccgagaaataaccggaatccggaaccgacgatacccacggggcgccgctcgatcgcggcgctccgtttttcgtccccgcttttcgcggcaccgcatttgcctatccggggaaaaatacctatttttgaatcgcaaaacacatttcgaaccatgtcagcacccttagccgaacgcctgcgcccgaagaccatcgacgattacatcggtcaggaacatctcgtgggcaaaaacggggtgttccgcaaattcttcgagacgggcaacgtcccctcgttcatcctgtggggacctccgggcgtgggcaagaccacgctggcgaagatcgtcgccacgcaactcgaacgccccttcttcaccctttcggccgtcacgtcaggcgtgaaggacgtgcgcgaggtgatcgagtcggccaagaaacagcgtttcttcgacgccaagccgccgttcctgttcatcgacgaaatccaccgcttcaacaaatcgcagcaggattcgctgctgggcgccgtcgagcagggcaccgtgacgctgatcggcgccacgaccgaaaacccctcgttcgaagtgatctcgccgctgctgagccgctgtcaggtctacattctccgcccgatggaggacaaggacctgcagacgctgctggaccgtgcgctcacgaccgacgcggaactcaaggcccgtgaagtcgaagtccggcagaccggcgcgctcttcaaattctcaggcggcgacgcccgcaaactgctcaacatcctcgacatcctcgccggggcgaccgacggcaagctgaccatcaccgaccaatacgtcaccgactgtctccagcagaatatcgcgctgtacgacaaaaacggcgaacagcattacgacgtcatctcggccttcatcaagtcggtgcggggcagcgaccccaacgccgcgatctactacctcgcgcgcatgctggccgggggcgaggagccgcgctttctggcccggcggctggtgatcctcgcttcggaagacatcggactggcgaaccccaacgccctgctgctggccaacgcctgcttcgacacggtgcacaagatcggcatgcccgaagcgcgcatcacgctggccgagacgacgatctacctcgccaccagccccaagagcaactcggcctacatggcgatcaacaaggccatgtcgctggtcgaacacgacaccaccaaccgccccgtgccgctgcacctgcgcaacgccccgaccaagctaatggacaaggcgggttacggcaaaggctacaaatacgcccacgatttcgcaggcaacttcgccgagcaggagtttctgcccgacacgctggcgggcaccaaattctacgaacccaacaccggcaacgcgaccgaagcgaaaatcgccgaacgcatgcgcgcactctggcgcgacaaatacaagtaaatgaaaaagatcggcatcatatccgacacgcacggcaccttcgacggcacgctgcgggaattcctcaaggacgtcgatgaaatctggcacgcgggcgacatcgggtcgctcgaactggccgacgccatcgccgcgttcaagcccctgcgggccgtatcgggcaacatcgacggcggccttacgcgccgcgtataccccgatttcctctcgttcgaatgcgaaggggtccgggtcctgatgacccacatcggcggctacccgcgccgctacgacccgcgcgccgtggcgaagatccagtccctgcgcccgaaactcttcatcgccggacactcgcacatcctcaaagtcgcctacgacccggtttacgacctgctgcacgtcaatcccggcgccgccggagagtacgggttccacaaagtccgcaccgccgtgcggctggtcatcgacggcgccgacatgcgcgacatggaggtcggcgaatggccgcggaaatagcagaaacaggaataaaatatgcggcgtgatgacgccgcatattttgttactacttgacaagtccgccgcctaacggcccaatccgaaacgcaatccgacagagaacccgccgaaaaagccctcgttagcgagcaagggttcggaatcatatccgaaattccaagaggcgaaatcaccgatataccgcgcagcaacctccagataaaggttgcgggacacccggaaatcgagtcccaaggcgagactgacgaccggagccgccaagccttcgcggctctccccggcatccgtcagaatcgaagccgtatagacattcacgcccaaacctccgcgcacgaaatagaacgatcccatacgctgaatgtaaaaacggcgctcgtaatgcggaatcaccgcgaaaatatcgactgaggtgcccggatcagctcttctttcggaagcggaagcactctccagactgcgataggccagctcggcatgaatgccgttcctgccgtcgaaaaaataggcatacgaaacagtcgccccgtgcgtatgcacatatgtattcgaaaggaaatcgtacgtcgcacccagcatgtgcggcaaggcgggcgctttcagtccgaaacgggtctcggccggtttcagtttgtcgttcggcgtacgcaccacccgctcgtcgccgatttcaagataatcgacttgggtcacgggaataaaatgcgacgtttcggggtcgtccgcaggaaaaaagaaaacgttgccggcccggttgctcgaatcggaaaccttacattcgatcacacggccgtctttggtgtgaatccggtcctgagccatacacgcacagcccgcagacaaaaacaagaacgcaaaaaagaactttatcattttcaagagggattgatgggatatacaaatatattataattatcggatactttgccgcttttaacgtccgaaaagcatattccggcaaaaatttattatatttgggccacatcctgcgcaaacaggcatggaggacggccgggttattccgtacaattcatcttgctaccgcaggggaattacagatgtcgcccggcatacccgcgtccccggaacacccgattcgatcccgaagggtaggggatcatcatttatttaaccaatatcggtatgataagaaaatcctatttcaaattcgcagctctcctgagcatgtgtatcactgccgcctgcagcgacgacgaccccggaaaaggaggggggggg

SEQ ID NO: 12045 - DNA, 26707 bp, Unknown
  gut microbiota DNA sequence
tacatcgtaaaaccgggcggcacggtcgtgttcgacgcgcagtacaaaggcaactccacgaccgaaagcatcggcaatcccgtcactgccgaactcgtctggcaagacgccaaaaatctgattcaggacatctattacgtctccaaggagaaaaaaatcgtcgccgtgaccgctccgggcacaagcggcaacgccgtcgtcgcggcctgcggcgccgacggagagatactctggagctggcacctgtggatcgccgactacgatcccgccgcatcgctctacaccaccccggccaacgcttcgggcacgacatggaccttcatggaccgcaacgtcggcgccacgaccaacgcccccgacagcttcgactgccacggcatgatctaccagtggggacgcaaagaccccttcacctcggccggaacgttcaccataatcaacgaggattacagctatcaggtggacggcgaacgccccatttacaacatcctcaacgaagaacttcccaaaatgcgcacccgcgccgaataccacggaacgatcgcaaagtcgctccgcaatccggctgtattctatgccatgacttacaatttcaccggagaaacggatgaatacggacaggaaatcgtgctgaacgattaccggaccaaagactggaccgacgtttcgaacgacgattactggggcggcgtatcgggcaagaaaaccatctacgacccctgtcccgtcggctacaaggtgccgacctgcgacaaggacggaaatacgccctatgcgtggctggtttacgccgacatgacgtgggacgacaccaaccacggcgccacgcagaacggccagtggttccccgccgccggcacgcgcgtctacgcatcgggcggactcgaccatcaggagctgaacccctacggcggcatgtggatcggcaccgcgggaaaagccagcgccaacatcgaggaataccccgaactctacggccagtacatgttcatcgtcaacggcaaacggacctttaaagtgagcaaggacgcccgttcgcaaggcatgtcgatgcgctgcgtaaaagagtaaaaaccctttctgaacacgatacggaccgtttctgcccgaaacggtccgtgttttttcaggggcaagacgttcagagacagccgaatatggaaggccgaataacttaacataatatttactacatgtacgtcgttagttagtcgaagaatcagaagttgaaattattaattttatgacgacgcaacatgcaaatcaagatctcgaagacgctcgaggctatcatagcccgggcggcatttaatacgaccaaggccggtctcgaccactcgctcaaagactttctcacgctggaactgctccgcgaggagggatcgctcgcctaccagcttttatcctcccgtctcaaggactgggagctctaccagatacgcctgcgcatcgaacgcgaaatgctcgccgggcagcagagcacgacccaatcccccgaagagttctaccgtgccttcaccgaagagctgcgggcctgttcgggcgccgcacggagcgtttcgacggcccacgcgctgcgggccatcgtcggcgaccgcacgacggcaacttcgcgcatactggaaatgtacggcgtaacgggtacggtggtggacgaagacctcaagaagttcgccgtgggcgacgacttccgcaccgaaattcaggtgcacatgctcgacttcaacgaagagaacaaacccgaagagaaaacctcgtcgcacctgctcgacaaattcggcgtgaacctcacgcgcatggcccgcgagggcaaaatcgaccccgtcgtggggcgcgagcaggagatcgagcgcgtagtccagatactctcgcgccgcaagaagaacaatccgatcctgatcggcgaagcgggcgtgggcaagagcgccatcgtcgagggactggccctgcgcatcgcaagcggcgaggtgccctacaccatcgccgacaagacgctcttctcgctcgacgtctcgtcgctggtggccggcacgaaattccgcggcgaattcgaggagcgcatgcagcagctgctcgacgaactgcgcaaggcgaaggatacgatcatcttcatcgacgagatccacaccatcgtgggcgcaggttcgacgcagggcagtctcgacacggccaacatcctcaagccggcgctggcgcgcggcgaactgcagaccatcggcgccaccacgctcgacgagtaccgcgagaacatcgagagcgattcggccctcgaacgccgcttccagaaggtcgtggtggagcctaccacgcccgaccagacgctccagatcctgcgcaacatcgcgccccactacgaacgccatcacaaggtgcgttatacggaagaggccctgcaggcgtgcgtgaccctcacgggccgctacatcaccgaccgcttcttccccgacaaggccatcgacgtcatggacgaagcaggctcgcgcatacacctgcagtcggcgcgcgaaccggccgagctgcgcgaaatggagacggcgctcaccgacgcgcagcgcgaacgccgcgaagcggtcgaggcgctggtctacgaaaaagccgcctcggcgcggatgcgcgaaatcgcgctccgctccaaactgggcgaaacccgtgccgaatggcagcggtcgctggagaccaaccccgtagaggtcactgcggaacacatccagcaggtcatcacctcgatcacgggtattcccgccgaacggatatcgggcggcgagatgacgcgcctgcagatgctctacgaccacctcgcacgccgcgtggtgggacagcaggaggccgtggagaagatcgcccgcacgatccgccgctcgcgcgccggactcaaggacgaaaaccgtccgatcggcgtcttcctcttcgtgggtcccacgggcgtgggcaagaccctgctggccaaggaggtctcgaagtggctgttcgacgagcaccgggggctgatccgcatcgacatgagcgaatacggcgagaagcacaacgtcgcacgtctgatcggctcccctccgggatacgtcggttacggcgagggcggccagctcaccgaagcggtccgccgccagccctactccgtggtgctgttcgacgagatcgagaaggcgcaccccgaagtcttcaactccatgctgcagatcttcgacgagggacacctcaccgacggttcgggccgcaaggtggacttccgcaacacgatcatcatcatgacctcgaacgtcgggtcgcgcaacgtggtccagaaatcggtgcaggtaggttacagcaccgtctcgaagagcgccacggcggtcaccgccccccagtgcgagtaccgcaaggccctcgaacagacctttgcgccggagttcctcaaccgcatcgacgacatcgtgctgttccgcacgctggagatctccgacgtggagcggatcatcgagctggagctgcagggactcttcgagcgcacgcgccggctgggctacaaggtgaagatcaccgacggagccaaacgccgtctggcagccatgggctacgaatcgcgctacggcgtacgttcgctcaagcgcacgctgatggacaacgtcgaggagccgctctccggcctgatcatcgacggcaaactccacgaaggcgacacggtcgtcgtcgaatcggacaagtcgcacggcgtccggatacgcgtggcgtgacagccggtcgattttccgtcttcccgttgcaagagaccggtttcagaccggtctcttttttcgttccgaccatttttttgcgccataattgcctgaaagattattttttaactaaatttgtcccgatttaataccgtttcataacaccgacatgcgtcagatgctcctgaaagcccttgcgtcagggcttattatgtccttgtttcccttcgccgcaatatcggcgcccgccgggccgtcgcacgccgacagcctgctcaggcttttagcgaaaacacacgatgccgtcagccgggagcggatatacgtccagctggccgacctgagcggagacagcctcaacctcgccgcaccctattgggaagcggcgctcgccgaagcgcagaaaaccggggacatctacggctgcaaggaggcgctggactttctggtccgcaaattcgcaggccgggacgcacggcgggccgagaaatacatcgcccttgcggacagcattcttccgggaccgcgccacgccctgttccgctcgtcgctctacgcctactacatctggaagctgatgaacgacaacaatgcggtcgaaacggtaaaacacgaactggacagactcaagaccaaaatccacaacgaactctcgcccgaagagcgcatcgaatgggaattcctgacgggactctccatcgacttctcggcgctggcgaccgaggcctacgacaacatcgacaaggcgatcccccatgtggagcaggcgttggaaaaactcgaaaaatatccgttggaagaacgtctccacatggaacggatctgccgcgacgaactttcagaactctacatgctcagcaaagacaaacgcgccgaaaagcagatccgacaatgtatcgacctgcaccgcgcatggctggcgatggacgaccgcttcgaacgcccccaccgcgacacgacgggttacatgatgcgcgcctactcgaagatgctctatctgcgcgagctgatctccaaagagaaggctaacgaatattacgggaaatgcatggagctggcccgcgccagaggcgatctggccgagatttacagcaccagcgcccgctattaccagtacatgggggaatacgagcgggccgtggcctacatcgactcggccgtaaccgtctacaagcgcaacggcacaaaagcggatttcgcctccatatacgcagtgcagtcgtggctctacgaaaatctgggcgactacaaaaacgccctcgaagcgctgcgcacatccaattcgatccgccacgacgaccgcgtggaagaggcgcagaacagcctcgccgagatgcagaccctgttcgaagtggggcagctggagcttgaaaaatcccggctggccaaccgcatgaaattcatcgccctgcttgccggcggggtgctggtgctgctgctcatcggctggagcgtctatcagtacgtcatggtccggcggctgacgcacatccggcggcagctcaccgacgccaacgaagagataacccgccagagccgccgcgccatggagagcgaaaagatgaaaacggccttcatcaactccatgtgccacgaaatccgcacgccgctcaacgccatcaacggattttcggacctgctgctcgaaggcaaccacgacgccgaagcccggcgcgaattccgcgagcagatatggagcaacacgaccgcactgaccaccctgctggaaaacatgctcgaactgtcgagtctggtcagctccgaagcgcccctgccgcagaccgacaccgacatcggtctgctttgcgccgaacggctggaataccagaagcggcagtcgaacaacccgcaggtggagtatatcttcaagggggggggtgaaggtccctgcatcattccgaccaacgtcttctacatgacccgcgtgatcgacaacctgctgcagaacgccgccaaattcaccgccgcaggctccgtcacgctctcctgcgagaaggatgacagcaaacgcagactacgcatccgcgtggccgacacaggcatcggcatcgaccccgacaagcgggagtgggtattcgaacgcttcgccaaagtggaccccttcaaaccgggttcgggcatcgggctttatctctgccgcctgatcgtcacgcggctcggaggcgaaatccgcgtctgccccgaataccgcgcaggctgctgcatcgatatcgtcctcccctgctgatgcttaaatccgccccttccgggcggatttttcgtatcggacggggctgcggattgcaatccggagttaattagctatctttgcatcctaaatccggaacgcaatgtacagtttctcgacttataaagatcaatacaagtccaatctgaaactggccctgcccgtcgtactgacgcagctgggccagattctcacgcaggtagccgacaacctgatggtcggccgctacggcggcgacgaccccgtgccgctggccgccgtgtcgttcggcggctcggtattcttcatcctcttcatcgccgccatcggcatcgcgctgggcatgacgcccctcgtgggcgagctttacgcgcagggcgaccgggagaagtcggcggggctgctgcagaacggcatcctgttctacacgctgctgggattcgcaatggcggtcgtccaatactccgtcatcccgctcatgtaccgcctcggccagcccgtcgacgtggtcgatgcggccatcccctactaccggatgctggttttcagcatgccgttcgtgatgcttttcttcgccttcaagcagttcctcgaaggcgtgggcaacaccaaagtcgagatggtcgtgacgatcgtcgccaatctggccaacataggcttcaactgggtcttcatctacggacgcttctcgcttcccgaaatgggcgccgagggcgcgggtctgggcacgctgctgtcacgcatcatcgccccgatcctgatggtcggctacttctacagccgcgagcgctaccgcggctacctcgacggattctcgccccgcaactactcgtgggccacggtgaaaaaactgctgcacatgggacttccgatctcgatgcagatgtttctcgaagcttcggcgttcgtcggcaccggcatcatgatgggctggttcaacaaggagaccatgagcgccaaccagatcgccgtcaccatcggcaactgcgccttcatgatcgtcatgtcgatcggcgccgccaccaccatccgcgtgtcgcactgctacggcgcccgcaacatcggcgaactgtcgctggcggccaaggcgtcgtatcatctggtgctggcgtggaacgccttcgcggcgctggtcttcatcaccatgcgcaacgtcattccgaccttcttcaccaccaacgccgaagtgatcgccatcgcctcgcagctgatggtcttcgccgcgctgtaccagctttcggacggcattcagaatgtctcggtaggcatcctgcgcggcattcaggacgtgaagatcatcatgccgatcgccttcgtctcctactggctgctcaacctgcccgtgggctacctgttcggcttcacgctcggcatgggtccgtcgggacttttcctcggtttctcgttcggtctgtcggccgccgccgtgatgatgatcctccgcatacgacgcagcatacggcacttgtacctcagcggcaattaaaaattaaaaaattcagaatttttgcgtatctttacgcaaattataccctccatggataccgaaaaacaacatacgaaagcattcaaacccgaagtaggccgcggctgctccttctgcaactgcggttcggagtgcgaagccaaactctgcgacggatgtttcaaactccacgagaccgcatggctcgaagagtaccccgaaaaccttccgaccgacatcgtcgaagtgcgtttcaagaacacccgccgcgcgttctaccagaatgtcaacaacctgccgctcaagcggggcgacatcgtggcggtcgaagcttcgcccggccacgacatcggcatcgtctcgctcacgggcgatctggtggcgcgccagatgcgccgcacgggattcaaccccttcaacggcgaattcaagaagatataccgcaaagccaagccctacgacatcgagaagtggcaggaagccatcgaactggagcacgaaacgatgatcgcgtcgcgccagatcgcggccgacatgggactcaacatgaagatcggcgacgtggagtatcagggcgacaagatcaaggccattttctactatatcgccgacgagcgcgtggacttccgcgaactgatcaaggtcttcgccgaacggttccacatacgtatcgagatgaagcagatcggcgcgcggcaggaggcgggacgcatcggcgggctgggcgcctgcggacgcgagttgtgctgcgcatcgtggatgtcgagtttttcgagcgtcacgaccggcgccgcccgcgtacaggaaatttcgctcaatccccagaagctcgccggacagtgctcgaagctcaagtgctgcatgatgtacgagtacgacacctacgtcgacgcccgcaaggagttcccgcgtctgcgtgaaccgctgcaggccatggacggcgaatactatctggtcaagaacgacattctggccggcacgatgaccttctcgtcgagcaaggatgcgatggtcaacgtcaccacgctctccatcgcgcgcgtcagggagatcgtctcgctgaaccgcgccggcaagaaggtagaccggctgcaagctgccgaggacatcgtcccggcggccgaagagccgacctaccgttcggaggaggacagcatcacccgcttcgatcaggccaagcgccgcagcaagcggagccgcggcaaaggaagccggcagaacggacaggattcacaggaagcgggacagcaggccgcaggccggcaggaacagcccgatcagcagggccggcaacaggaacgccgcccgcggcgcaacgaccgtccccgcaacggcgaaggccgcaacaacgagggccgcaacggaaatccggaccgccgcagcaacggcgaacgccgtgacggagagaaccgcgaaaaccgcaacgccaacagcggaggccgcagaggcagcgccggcagcgaaaaccggaacggcgaaaacggcgacacccgcaacggcaacaacaacgaagcccgcaacggcactacgaacaacggcaacggcgccgaacgccgcgaaggcagcagccgcggccggaacaacaaccgcaaccgccgccgtccgaacaacgaccgtccgcgcggcgaaggcggcagcaacggaaacggcaataacggcggcaacggcgcaaacgaataacggtgcaacggacggcaggtgacataacggcacgctgcggagccgtatccccatatagggcagaccaaggcggaccggatcgcacgaccgccggtccgtacgggacagggaccggcaggcaagaccgcgcgaccgccggtccctacggaacaccccccggcgcagacggccgcgcgcccctcccgatcgaggggcggaaacgctccgacgcggatattgcagccgtaaaattcgccggagcggcaatgcgcccgccgggttccgtacgcgcaaaaatactccgcacggtatccgccctgctcgatgcagaagcgatgcggccgatgcgtgcggcatgccgcacggcactcgccgccgcggcatttctcgccgcaggctgcgtgtcgccccacggagccgttgcgaccgacgtcaactcggcgtcgtggcgcgattccgcccctatcaccctcgccaacgccgacacgacgacgctccgcgacatcgccctgttcctgcgctgcaacgaccggttcgcggaggacacgctgaccgtccgcatccgggtgcgcacgccggactcgctccaacacgaagaaccgttcgtgatggtcattcccccggcacatactccggccgcgatctcgcgcgaggccgacatcccttaccgccgccgcgtgcttttcgaccggacgggcgactaccacctgacaatcaccccctgccgccccgtcgaaggcgtcgaagcggtaggcatccatatcgcaaaaagccaatagagacaatgggcaaagataaactccgcagattccgcgagaatctgactttcgactgtttcgtacaacccgaattcgacgaggtattccactgcgaccatcccctcaaggggcgctggcgcagcgactttttccgcaacgacaaccccatcgtactggagctgggctgcggcaagggcgagtacaccgtggcgctggccgaacacgacccgtcgcgcaactatatcggcatcgacatcaagggcgcccgcatgtggcgcggcgcgaagagcgtcaccgagcggaagatcgccaatgcgggcttcctgcgcacgcgcgtggagttcatcaacggcctgttcgccgaaaacgaggtggacgaaatctggatcacctttcccgatccgcagctcaaaagccgccgggccaagaagcgtctcacctcgccgctgttcctcgaatactacgcccggctgttgaaacccgcgggatggatcaatctcaagaccgactcgaaacacctgttcgcctacaccaacgaggtcgttcgccgctactcccttccctgcgaggtttcgaaccccgacatctacggttcggggtatgccgacgaggtgctttcggtcaaaacggcttacgagaaacgttttctcgaaatgggtcttccgatcacctacacccgtttttcgctggccggacggcacgaattcccgtggttcgactgggaggaggacgaaaaggaggaaaaggacaacgaacaggagcgccggatacactgacccgttttcagcctgacggcccgcctatccttcatacagccgctcttttcttaattaaatataggtaaagaactttttcgcatcaatctactaattttttagatgtaaaatttgcatatctaaaaaattagtagtaaacttgcataggaactgaaaaaagcgctttttaccatggagaaaaaatcaacggaactcacacgcggcgaagaggagatcatgcagatactctggcgtctgggggatgcggtggtcaatgagatcatcgcccagaccgaggagccgcggcccaagtacacgaccgtcgccaccttcctcaagattctggaaaacaaaggtttcgtgggacatacacccgaaggcaaaagccaccgctactacccgctcgtcggccgcgagcagtacgcgcgcggcgtcatgtcgtcggtgctgacctcctatttcgacggctcgctggcccggatggtgtcgtttttctcgcggaacgaagacatttcggtcaaggagatggacgagattctcgaaatcatgcggaacgcaaaaaaataacgcgccatgaaacggcttctgctcttcctgattctcctgctgggccacgcggcccgcagcaaagggcagacctccggtccgccgcaggacggcatgcggcacgctgccgaaacgacttccgagacgaatgagacacaccggtgcggcggcattcaggccgcgacaatacgaccgtcaaaacacaccgcagccgcaacgcagctgttgccgctgcaatacattccgtcaaaacacaccgcagccgtccctgccgcagcagccacccgataaacagcctgccgcagcgacacgtccgaaaacagcgtacgccaaccgacgataaacgcccgaaacacaagcacacgaccagtcaaatcactgacaatgaaacccgcaatcatctacatgctcgaagtgctcgtctgcagcggagtcctgctggcggcctacgccatcctgctcgaacgccgggtaaaattccgctggtgccggctctacctgctcctgacgaccttcgccgcggccctgattccgctgctgcggattcccgtatggccggggcgcatcgtcgcagccgcacccgccatctcgcccgacctccccgtctggacgggcgaagtgcttcccgacgagggcggaggtttcgccgtaacgcccgaaagtctctgtctggggctttatctgctgggagcggccctgatcgccggcgtcatggtatggcaggtcatccgcatccgccggctgcggcgcaacgccgaaatttcccggaccggcgactatacgctcgtccgcacacggcaggaaatcgcttcgttctccttcctgcgcaccatttacgtctgggacaaaacgcctgccggggagctggccgccattctggcccacgagtcgagccacatcgcccaccgccactccatcgaacgcatcctgatggagctgatgaaggcccttctatggtggaaccccttcgcatggatcgccgcacggcggctgaccgaggccgaagagttcgaggccgacaacgacgtgctgagcagcggttacgaccgcgccgaatatatgcaaaccatcttcaggcagcttttcggttatagtccggaaatagccaacgggctgcgcaactccctaactaaaaaacgctttaaaatgatgaccatgcagacaaaaagcaggcacggcctgctgcggctggcaggtacgctgcccgccgtgataggattgttgtgcgcattcggtttcaccacgcgcgcagcggtgatcgtcgccccggcggccgcaaccgcaacgaccgaagagccggccgacatacgaaccgtggccgacgcgatgcagaagcaggacaagacctgcacggcaacgctcacggtggtggatgaaaaaagcaaacgcccgatcgaaggagcgctcgtacagacaatcggcaccaaaaaaggcaccgtcaccggcaaagacggccgggccgtgataacgctccccgaaggcagtgaactcaaaatcagttatatcggctacgagtcccgaaccatcgccgtaaacgacgaaaaaccggtcgccgtatccttgatacgaaatcccgaagccggctttacccccaccgacgacctgcccgacgcgccgcaggagcaacagcaggagcaggtgaccgtcagcgtcgccacctataaggacaaagccccgctcgccggtgcgctggtcaaggtcagcggttcgcaaataggcgtggtcaccaactccgcaggcttggccgagctgcgcgttccggccaattcggctctcgaaatcagctacataggatgcaaaccgcatattgcacaggtaggcgacaaggagcgtcagatgttcatgttcgacatgcaggccgaaacggccggaacaccagagacacccggcacatccgagtcgctcgcaacagcgaccgcaacggacaaaccgctctatatcgtcaacggaatcgaaacgaaggagatcggcaaactcgatcccgaccggatcgagagcatgagtgtcctcaaggacaaggccgccaccgcactctacggcgaaaaggcccgcaacggcgtgatagtcattacgctcaaaggagcggatatgggacctgcgacgtccgaaagcaacggcaaggcggatgacgccgaacaaaccgcggcaaacgccatcgcgattaaaaacggcaaaaccgaaaaggaagaggcgttccttgtgaccgaaacgatgcccctcttcccgaccgacgatcccgccgtcccgtacggcgacctcggcaacttccgggcatgggtccagaaaaacgtgaagtacccggccgaagctttcgaaaaggggatcggaggacgtgtcgtgctgtcgttcgtcgtcgagaaagacggctcggtaagcgacatccaaaaactccaagcgcccgacgcgtcgctttgggaggaggcccgccgcgtcatcgcctcttcgcccaaatggaaacccggcgaacagcgcgggcagatcgtgcgcgtgaaatatacgcttcccgtggacttccggcttacgaaagcgtccgacacaccggccccggaatccggaaagtagtttttcaaccggctacgaccaagcagaccgcgcggcgccataacccggattccccaaaccgaccggcccggattccccgaatcaaccggctccacgaatcggccgcccggcctgctttccccaagccaagctcccgcggaccggcatccgctcctgattttcaagacccccgccggcagtcctcagagactgccccggctttcccaagccaccgaaccgaccataagcggaaacggcgtccaccctgagttcagtggacgccgtttttatcggcctgccgggccgccgaatagcgatacctgcgagaccgccccggccgctccggacttttcagccctatctccgaacggctctgcgactccgccgctccggattactccctgcaacagcgaacgttatagccgtatgccgcatcggatttcgaagaagactgcggctggagcagtttgcccgtactgagctttttcgaaatatagaaacaggagatcgtgtttcccgaacgatagttggaccagtaatgtcccgtacgggtcgtagcgagaccggcgagattgcccttgtcgcggttacgataacccgacgtcgggtaccagtccctcagatcgccgaaaatgtaggtcatgccgtacttctccccatcccattccgaggttccgtccacatagcggtcctgctcgtccgcaaaatcgtcccacgtatcgcggtccggcaccttataccccacggggcacggatcgtagcaggttttcgcggtattccacaaatcggcgcggggcttggccagccagtcgtaaactccggtcgcacccttgttcgaaaggaacgaaagcggatgcgccgcggcgtattccaacgtcgaaacggccgccccgctctcctgcttccacgcatgcgtatcggcgaaggccggattgacgaccgaattttccgccgcctgcgcaaaagcagtcgccgaggtttcggtggccgtacccccgcagaacgggtccttgcggccccactggtaatagagtccgtaagcttcggccgatccgggcgtcgtgccgacggctcccagcgaacggtccagcaatacgcggccgttggcataggtcaccatccgaggttccggcgtgaaccagagatgccagctccacacgatctcccccgcggcatccgcaagcgcgatgacggcattgcccttcgcggcgcctgccgccgtaaagaagatgcggccttttccggcatcgagcgaaacggccgaaatttcctgttccagccctttcgtcacccaaagccagtcggctttcataccgtcggcaagcgcgatcgcggcatcatctccactgccgttgccacgcaccgcagcgtcgaacatataatcgccggcctcgctgacgatataacagttggcggttccgtcccggctcaggtcgatggccgtcaccggcgcctgcacggccgtcaatgtcggcgtagtcgcactccacggcttgccgttgcggtcggtgacggtcagcgtcacggccgtttccgacggagttgcggacgccgtaacatcgagcgcgcccgcgtaggcatccccctcgcgcccggcggagacgacaaccgtccagccggagagggcctcatcaggctcggcggcgaaagtcagcccctccagatcgtcgcccgtcaccgtgaaggcgagccgcttctgctccccgaccgtaaattcgacgggattctccccggcgaacgagattttcagttcgaccggtttctgttccggttcgttgtcgttacagcccgatgcaaacagggccagcaaacatcctaagatcagttttttcatcttttatccgtttttggttgaacactgttccgttccggcggaccgcaaagatgaaaaggcacactccgacgcacacgcaacaaagcgcgcgcagtccggcatccgaggttgttttcgacacactcaatacgttcggttgaaaatgacccaagacctgctccattcaccgtagaagcgaaatccgtataatcgcgacggcaggtcttctgactcgcccttctctccggcgccttcccggtccgcggaggaccagtggccaagaatgccggaaaatactttcaatcaagaaagccgggcacacagcaacgggaattgttaccgattctcacggtattcccttttaattcccggcgaccgcaaagggaccgggaaaccgtagcgaagacaaaggtagcacaatccctcaaataaacaaaaaaaaactgcagccggaattcgggctgcggtacaaatcccctccgtaccgtcagccgccgggtccgagcggcgccatgatccgccagacctgtccggtgttgtccatcacgccgcagcggagtccggcacgcggttgtcggccggcgggtccgaatcagggccgcgtcctgcgcacggtcaaatgccttcggcacgcaaccgcccccgatcaccggcatcgagacctgcgccagccccaagccgtcgccgatcatataaatcagcgttacggcccccttcggcggtttttccgcatccgcacacgccgcagtcagcaggcaaagcgcaaaaaacaaaacccctttccttatatcggcagcgaaaacagctggaatttgccgactttttactacatttacaccactttaaccaccttgcaacatggatgtaaagatcgcccccgactggaaagagctgctcgctcccgaattcgaaaaaccctacttcgccgacctcacgcagttcgtacggcaggaatacgccacgcggcgcatctatccgcgcggcagcaacatcttccgcgccttcgacaaatgcccgttcgacaagctgaaagtggtcatcatcggtcaggacccctaccacggtcccggacaggccaacggactctgcttctcggtaggcgacggcgtgccgttcccgccctcgctgcagaatatcttcaaggaggtcgccgacgacaccggaacaccccctcccgcgacgggcaacctcgaccgctgggccgagcagggcgtactgctgctgaacgccgtgctgaccgtccgcgcacacgaagcggcgtcgcacgcgggccgcggctgggaaaccttcaccgacgccgtggtacgcacgatctccgaacgcaaacagggcatcgtctacatgctttggggcagttacgcccaaaaaaaaggcgccatcgccgatccgcagcggaacttcattctcaaggccgtacacccgtcgccgctctcggtctaccgcggattcttcggttgccgccacttctcgcgcgccaacgaatatctccgcagcatcggcaaggagccgatcgtgtggtaacaattaggagttaaaaattaagaattgatactgccgactgccggccttgcttttccggccctgttgtatcggccggaaacgtccgccaccgcaggcggcgcggggacttcggcctgcgcaaatccgggatcgcctgactacggcctgccccggaacaaggccggagtagcgcccgtacacggcccggcaatcaggcatatacgacaaccggagccgcaaaacggttatccgaccaaacaatacagaaataaaacctcacgcagcgcataagtccgcgccggaaatatgagaacacaaacagctaccaattcctttcgggcatggatgctcgcggcgcggcccaagacgctgacgggagccgccgtgccggtaatgctgggctgcgcctcggccgcttcggcaggcagtttcgacctgctgcccgcggtgttgtgcctgctgttcgccttcctgatgcagatcgacgccaacctcatcaatgacctctgggattacctcaaaggctccgacggcaaagaccggctgggacccgaacgggcctgcgcgcagggctggatcacgccccgcgccatgcgtcgcggaatcgccctgacaaccgcggccgcctgcatcacgggctgcggactgctcttttacgggggcttgtggctgatcgccgtcggcgcgttatgcgtcgcattcgcatttctctacacggccggcccctacccgctggcctaccacggctggggcgacctgctggtgctggtcttcttcggattcgtccccgtcggctgtaccagttacgttctcagcggcggctggacatggcagacgggcgtcgtttcggcagcctgcgggctggcgatcgacaccctgctgacggtcaacaactaccgcgaccgcgaacaggacgcccgcagcggcaaacgcacgctcgtcgtccagctgggcgcacgggccggcagcaggctttatctggcactgggattcgcagccgcagcgctctgcctcccgctgctctgcgacggccgcataggagcggcgctgcttcccctgctctacctcgtaccgcacacggcgacatggcggcgcatggtgcggatcggccgcggccgggagctgaacgccattctgggcgccacgtcgcgcaacatcctgctcttcggaatactgctctcgatcgggctgctgctctaaattatcaacgaaaaatttggatacttaatttttcgccttatatttgcagtgtattacaatactaatacactaaatccacctaatgaatgattaccctccaaaacgtcacattcagctacaatcgccgtaaaaagatcttttcagatctgtccctcacactcaaggcagggcatatccacggcctgttggggtgcaacggcatcggcaaaagcaccttgctgcacctgatctgcggattgctaacgcccgacgccggcgatatctcggtcgatagcttccaaccccggcaacgtcttccccggatgttttccaacttactgttcgttcccgaagaaatcagcctgcctgacatcccattccagcgcttcgcaaccctcacgggtgccttttatcccggctattcgtcctcaacattcacaagtcactgctccgcattgcaaatcgacgcatcgctcagaccccgcagaatgtcgatgggcgaacgcaaaaaagcctacatcgccttcgcattggcctgcaacgccgatatactgctgctggatgaaccgacgaacggactggatattccctcgaaaacaaccctgcgacgcctgctggccgcctatgcggacgaaaaacggacgatcctgatctcgacgcatcaggttcgggaagtcgaaaatctgatcgacaacatcataatcctcgacgagcagggtctcgcacttgcggcaacgaccgaagaactcactcgcagcctgaccttcggctccttgtccccggcagcaaaagccatttactgcgaatcttcgcttacaggcgaagagggaatcgctgtcaataccaccgacacggagagccgcctcgacctcgaactgcttttcgccgccgtcagccgcgaccgcactgcaatccccgcaatcctcaacgctaaccacaaccgccatgaataataccttctctctgcatcgcatctttttgtatgcccgcaaacattatacggaaaacggccggcattatctctacatcctgctgacatttctactcctgctgtcagtcgccgcatggtatttcgaaccatggcgtgaaaaatcgacagaattcacacttcccccgctccttctcatgctcgtcttcatttgtctcatcacccgaatcagttgtcgcagtcattatgaacgtcaggaaatgcctgtctcctatacgcagcctatcacgacagctgaaaaatatctatttatctggttcaattcaacaatcgttgcagtcgcgcttttcgccgctattctctggcccgtcctccgcatttcaaatgcaaaggaaaacatcctgatgctcatgccctatcaaacatggctgacgattttcaccatacaagccggatggctgctttcctgctgttggatcaaaggaaatccgctgaaagcctttctgccgcttaccggaacatttctcctttaccatataatccatatcaggaatttaggatcattaatcggaggttatgtcaggctccccttttccttgatgaattacgcactgcactccaatacagcagggctagatattcagctttcggaacaattatccgagtgcagcgcctataccattattttcggattctggacgcttgtggcatggctggtggcgtatttcaaattcagggaacggaccctaaaataaatcgtctcatgcaattcaacgacacccagcctatctggctccaaatttacgactacgcctgccgggcaatcctcgcaggacgatggaccgaacaggcgcgcatcccctccgtgcgagaattagccgtcaccttggaggtaaaccccaataccgtgatgcgggcctacgacaaactcgaaaccgacggagtgatcatcacgcgccgcggtatgggttttttcgtaacggagggagcgcaggcacggacgctcacagcgcaacgcaatcagttcatccgagtcgagctacacgccctcttcgtccggatggaggaactggatatagacatgagcgatttgcaacgccagcacgaaaactatttaaaccagaaaaaccatgaaaacaagcaataagattttagtaacggcattttcggtatatctgctcctcaccgctgccagtctgattggattcaaacgtaattacaacagtataaaagaagaagcgacctcgctactcaggcaattggaacaacatcgcatccatacactcgtcaacacgggcgagcgatacatatccgtcagaaaaaccaaaggtcccagacagtttatcggttggtgggagccgttcgatccgaaaagcataagtatcagcaacgacacgctctacatcgacaacagatgggtttacgtatacctgccctatctggaaacctacctaaaaaacgggcagccggttcctatagagaaggaacatgacgacaaataagaaaatcccggtcttgcaggaccgggattttacttatcagtcgtccgggcatcagcccagatacgatttcagcagtttgctgcgcgacgagtggcgcaggcggcggatcgccttctccttgatctggcgcacgcgctcgcgcgtcaggtcgaacttctcaccgatctcttcgagggtcatctccgaagtgccgatgccgaagaagtacttgatgatgtcgcgttcgcggtccgtaagggtttccaacgcgcggtccacctcggtcgagagcgactcgttgataagtccgcggtcggcgttaggcgaatcgggattgaccagcacgtccagcagcgagttgtcctcgccgtcggcgaacggggcatccaccgagacatggcggcctgccacgcgcagcgtgtcggtgaccttctccttgggaagctccagctccgtagccagctcttcgggcgacggcgtgcgctcgtgctcctgctcgaagcgtgcgaacgccttgttgatcttgttgagcgaacccacctgattgagcggcagacgcacgatgcgcgactgttcggccaatgcctgcaggatcgactgacggatccaccacacggcgtacgagatgaacttgaaaccgcgggtctcgtcgaacttctcggcggccttgatcagaccgaggttgccttcgttgatcaagtccgggaggctgagtccctgattctgatattgtttggcgacggaaactacgaaacgcagattggctttggtcagcttttcgagggcttcctgatctcctttcttaatccgttgggcgagttccacctcctcttcgaccgtgataagctcctccttgccgatttcctgcaagtatttgtccaacgaagcgctctcgcggttggtgatggattttgtaatctttaattgacgcatatatctattaaccttcctaaataaaattctacattacaacccgcccggaccgcactactccacgagcgtgtagctcgcagcgcggccgttgggataaataccgtcgatcgaacggaccttctcgtccatacgctgcatgtccgcaaccgaatagaccggacgatcgttgatatgggtaatcacaaatccctgtttgacacgggcacgggccagaattccgtcggccttgatgccgaccacctgcacgccgcccctgatatcgagctcacggcagagtttggtgcccgcatcggcgaacttaccgccgagaacctcgacgacatcgacatcctctttggtcattaattccgttttacctgctttattacgcaaagtaacctcgaattgtttcaccgcaccgtctctttttaccgacaatttaaccttatcgttgggtcggcggcgtccgatctgctcggaaagggtcgcattgtcgttgatcttcaccccgtcgatatccagaatcacgtcgcccttgcggataccggcctccgaagccgaaccgccctcgacaacgccggcgacataggcgccgcccagctcggtaatgcccagctccttgccttcacggtcgataaagtcctgatcgacaatcgcaaaacggatgccgagcagtgcgcgctgcacgatgccgaactccttgaggtccacgaccaccttgcgcacgatcgattcgggaatggcgaacgaataaccgatatagctgcccgtctgcgacttgatgagggtgttgatgcccaccagctcgccgtgcgtgttgaccagcgcgccgcccgaattgccgggattcacggccgcgtcggtctggataaaggcctcgatgcggaaatcgttgggaatgacccccagattacgcgccttggcgctcacgatacccgcggtaatggtcgattgcaggtcgaacggcgaaccgatcgccagcacccactcgcccagacgcagcgcatcggacgatccgaaagccagcgtcggcaggtccgaagcctcgatcttcaacaatgcgaggtccgtggccgagtccttgccgatcagcttggcgtcgaacgaacggccgtcgttgagtttcacgcggagtttcgaagccccgtccacgacgtggttgttggtcaccacgtaaccgtcggccgagatgatgacgcccgaacctccggcgcgctgttcgcggaactgcggtccctcgtcatacccctgcgggatgccgaagaactccagaaagggatcgtacccccggcggcgcggcatctcgacctgctgcacggcttcgatgttgaccacggccttcaccgcattctcggcggcgtatgtcaggtcggggtactgctcggcctgatacgaggtgaactgcgtccccagcgcgggcgtacgttccacctcgcgctcgatatattgtacggagccttcgcggctcccggctactgcccatgccgtaagtccgcccgcggcggccgatacggcgactgctcctaaaatcaaaaatgcctttttcataattcgataacaagtgtttaaattcaattaatcagaggcaatttataccataagcttatcaagttttattacgattcgtaggacaaacggacggaaacgtccggttagtatgcccgtaggaacaaaaatcgggacgtccgcagcggacgtcccgatttcgagcggcccggaccgttacaatccgaactctttgcgaatcagctccacggcgtcgagcttctcccagccgaagaactcgatctcacgctccgtttcgcggccgtcctcccagaccttcacccgctccgtgtaaggacggttgccgaagtgaccgtaggaagccgtggcctcgaagatcgggttcttaaggccgaaacggcggacgatggcggcgggacgcaggtcgaaaagcttgccgatgcggcgtgcgatctcgccgtcggtcatgccctccagcgcggcgggacgcggcgaacggtaggtatcgacgtaaatcgacagcggctgcgcgatgccgatggcgtacgacagctcgaccagcacttcgtcggcaacgcccgcggcgaccagattcttggcgatatgacgggcggcgtaggccgccgagcggtccaccttcgaggagtccttgcccgaaaaggcgccgccgccgtgcgcgccgcggccgccgtaggtatcgacgatgatcttgcggcccgtaagcccggtgtccccgtgagggccgccgatcacgaacttgcccgtaggattgacatgcaggatgtagtcgtcgccgatcagcccggccagcttgtcgccggcgcgctccagacgcgccttgacgcgcggaatgaggatcgtgcgcacgtcctcgcggatcgcggcctgcatccgctcctcggcctccttctccgtcagcccgtcgcccggcaggatgaattcgtcgtgctgggtcgaaaccacgatggtatgcacgcgcagcggacggttggtcttctcgtcgtactcgacggtcacctgcgacttggaatcgggacgcaggtaggtcatcacctccccttcgcggcgaatgacggccagctccttgaggatcacgtgcgagaggatcagcgtcgccggcatcatctcgcgggtctcgttgcaggcatagccgaacatgatgccctgatcgcccgcaccctgctcgtcctcctcggcgcgcacgacgccctgattgatgtccggcgactgttcgtggatggccgacaggatgccgcacgagttgcagtcgaactggtattcgctcttggtatagccgatgcggtcgatcacacgacgcgccacgccctgcacatcgacatacgcttcggagcgcacctcgcccgccacgactaccagtcccgtagtgcaaagcgtctcgcaggcgactttcgagttggcgtcacgacgcaggaattcgtcgagaatggcgtccgaaatctgatctgaaactttatcggggtgtccttcggacaccgattccgatgtaaacaaaaagcccattgttatacatttaattatgagaccgcgcctccggccggagtgccggcatgcggaaagccgctctcggttaataaaaaaataaaacgtataaaatgggaaaaattggctgttggaataaaaaataagctgttttagcgattttttattgtggttgcaatcagtcaaatctttccacatttccccgcgttacagacgggagtgcaaagatacgaaggaatttcggaatatgcaaaaaacagtttgtttttgcctccgatatgcactatctttggcccggtattgaatgggatgcgtcccggcaacccgcaaaatccgttttgcgattgcgcccgactttcgctatctttatacccgtcgaattcaacaaaccgcacatgaaacgatttttactcgccgcatgcatgcttctggccgccgtcggattttcgtcctgcgaaaacgacgacgacgatctctacgacacgctcacgggccgcgtatgggccggagacctcggattctatcaggacggctatgcgctggacagctacgtttacttcggggccgacggcttcggaagcgacgaactccgttacgccgacaacggacgcctgctcgacacgctcaacatccagtgggacgcctacgacgacacggtctacatcgactacggccgggtcgatctgccgcgcgaactgcgccgggtccacatccgccgcggcatgctgacagccgatctctacatcggaggccgctattacgaccggatcacgctctacatgcagtaatacagaggcacctattattatatagcgctccccgaatccttgcggaaatccggggagcgtttgtgtggaacggcgggtgcaattcctgctgcgggaggttccggtttactcgtccgtctcccgcaaggcggcgcgcagggcgttgatgtcgcccatcatccgcaggaagatacgcacgccgaggggcagtccgacaatcagtccggccacgaagccgtaaaacacatagggcgaagtcaggcttcccatgtaaaatcccagcaagatcagcagcggcacacccagcgcgatacccgcgcccacgccccagaggaagcaggtgcggaaccggagtacggcggcgcaggtttcgcgcacggtcctatttcccggctcgatccgcgccagcagcaccagcagcgcgatctgccgcgccagcatggcgaagataaagagcgccagcgtcgccttgacagccgttccggggtccgcttcgcccgtacgaaatagattggcgaaacaaagcggcagcgctgccagcagaaagattcccagccgtatcgtacgcgccagccgctgcttggccgaggtgatttttccggccgagacctccgccgtcagccggtctattttagtgtccgcacacgacagacgtccgtccagctcgtgccatttggttttcagttcgtcgagttccatattcgggaagtttaatgatttgcctgttcacgcagtttcagcttgatgcggtggagcttcgaagccacgttgttgcgtgtaagccccgtgatcgcggcgatctcctcgtaaggaagctcgtcgagccacagcatcacgaccgccttttcgagcgcatcgagccggtttatcagcgcatacagctcccgcagccgctcgccgcgttcggaatcttcgtcggctgcgcccagcgagtcggtcagcggcagccggcccgtatggcggcgattgcggcgatagtacgaaatgcaggtgttcagcgcgacgcggtagacccacgacgagactttggcccggccttcgaatccgtcgaacccccgccacaggttaatcagcacctcctgataaagatcgtcgaagtcgtcgctgtccatggcatagagataacagaccttgccgacgatgcggcgattctcccggacgaaggtctcgaattcatactgtttggttcgctgtagactcattgctgaaactgtttttcccattagacgccgccggagccgaaaagttgcacggagaataaaaaaataatacgacgcaactcatccgacaaaaaaatccccgaagcgacacttcggggatttcatccattatcggtgatcgttattttccgagcagcttcttgacctcttcgaccggaagaatccgttgccgaagagtccaagcgtcccgactactttccaagcagcttcttgacctcttcggctacggtcttgccgttgtaaccgaacttctcgtcgagaaccgtatagggagccgaa

SEQ ID NO: 12046 - DNA, 33793 bp, Unknown
  gut microbiota DNA sequence
cctctgagatattcgaataaactaatttcgcatgaaaaagaggctgtctaaaacttgttagacagcctcttgtgtttgtccgccgtttgcggccgttttccgcaatccgtgttatctgctgcaggaaccgtcggtgcgcagtcgcttgggcatgaagatccggtagccgatcgagacgccgagcttgttgggataccactccgacgagccgttgaacggatcggggttctccggctgcaccgggcggtggggatacatgtctaccttgccgtcgaaactgtatccgttgtagtggctgtccatccatgcccatccgaagaaggcgtcgagcagccaccgctccccgaactggtgttcgtaacccacgcacaggccgatcatcatgccgtagcctttgcagtagcggtcttcgaatttcagcttccagccttcgatatagggtttcgacatgtcgaaagccatcatgccgatattggcgcccagataccagccccggttgtgctccttgaagtagcggcggtattcgcccatgaagatggcgaaggtcatatgcttccggttgatcgacttccacggcgagaccacgatgtcggtctgcagggtcgatttgggggatatggcgaattccacagaggggtttacgacgccgaccagcgcatagagcgcgttgagtttgacgtagccctgcgatgctgcgttctgtatgccgaacagcgaaaacaatacgatcaggaccgaaatcttgcggaatggctttttcatcgggacggaatgtttaggaggggcaaatatatgaaaaaatccggccaatatacgaatcgggccggattttcatgcggatgaaaccgtttcagacggtcatgatctccttctcctttctctggagcgcttcgtcgagcagcttggagaacttctccagcagcttctgcgactgggtttcgccgtccttcgattcgtcttcgggcatgccctccttctgggccttcttgaatgcctcgacggcgtcgcggcgggcgttgcgcaggctgatgcgggctgtttcggcttcgccgcggatctgcttcaccagctccttgcggcgctcttcggtcaggggcggaatcgtcaggcgtatctgctcgccgttgttcgagggggtcaggccgatgttcgagtcgatgatggctttttccagcggccggagcatgttcttgtcccacggctggatcaggatcgtcttggcgtcgggaaccgtgacgctggccgcgcccgatacgggcacctgcgagccgaagtaatctaccatgatgccgttcagggcgttgggcgaggctttgcccgcgcgcacgttcagaagttcctcttcgaggtggtcgatagccttctgcatacggccggaggcttcgttgagaatcgttttggtatccatagttattcgagtgttttttcgatggttttgatcatttcgtcgaactcttcggggtcgtagcctaccgatgccagcacgaccttgccgttgcggtcgatgaggaaattacgcggaatgtagttcgacgcataacggtcgtagacggtctgcgaggggtctagccccatcggaaaagtgtagccggtcttttcgcggaacgccgccacggtctggtgcgtttcgccgcgcgagatgggcaggaatacgaaatcgcggcctgcgaaacggtcgatcacgtcgctctgcacgcgcgccagctcctgccggcagggcggacaccacgtggcccagaagttcagcaggacgaccttgcctctcagttcggcgaggtcggttttgccgccgccgaacatctcgaccgtgaagtcgggggctttgtcgccggccttcacgagcgtcgtcgattcgacgtcgcctgcttttttgctgctgttgccgccgcacgaaggcagcagcaggatgacggcgacgatcgcgacgatcagcgccagcatgatccataattgtctgttactcttttttgtcgccatgttttttcgttgttttggtttgtcgggcactttgtcgcacggagtccggagtgccggccggaagctcctatgaaagcccggttacgagcgttccgatctgttcgcctgcaagtactttgcccagattgcccggcgtgtccatgtcgaagacgatgatgccgagtccgttctcgcggcagagggtgaacgccgtgaggtccatgactttcagcctgcggtctagcacttcctcgaacgtgatccggtcgaacttcacggccgtcgggtccttttcggggtcggccgtgtaaacgccgtccacgcgggtgcctttgagcatcacgtcggcttcgatctcgatgccgcgcagcgccgatgccgagtcggtcgtgaagtaggggttcgacgtgccgccgccgataatcaccacatagcccgcttcgaggtactcgatggcacgggccttggagtagtattcgccgatgggttccatgcggatcgaagtcaggaccttggccttcacgccgttgtcctccagtgccgactgcagcgccagcgagttgatgatcgtggccagcatgcccatctggtcgcccttcacgcggtcgaagcccttcttggcgccggtgagtccgcggaagatgttgccgccgccgatgacgatgccgatctggacgcccgtcccggcggccgccttgatctgttcggcgtaggactggagcacttcgggcgagagtccgtatttctgcgaaccttgcagcgattcgccgctcagtttgaggagtattctcttgtatttcatgttgcaatggatttaccgtaacgcgaagatagaaattttttcgaaaaaaaacggcatcaatgactatctttacagaaaatagacgccctccggaccgtgtccgaacaaattcggcgcggtgtccggtgcgcacgcttttcgacgccgttccgaaaaggctgcgtccggtcaaaaggcggacgggcttgcttttgtgccctgcttgcattatctttgtctcgccatgacgccggaagaatacagactgcttctacatatcgattcgccggaggacctcaaaaggctctccgcggaggagttgcgcgcttactgcgacgagttgcgacgttatatcgtcgacgaatgttcggtaaatcccggacacctcgcgtcgagtctgggggccgtggagctggccgccgccctgcattatgtcttcgacacgcccgccgataagatcgtgtgggacgtggggcaccagacctatgcccacaagatcatcacgggccgccgcgaagcgttcaaaaccaagcgccggctggggggcatcagcggctttccgcgcatgtccgagagcgaatacgacgctttcggcgggggacacgcctcggtgtcgatctcggcggccttcggcatggccaaggcggccgaactgcggggcgagaagcatcgggtcgtggccgtcatcggcgacggttcgatgaccggcgggctggccttcgaagggctgaacaacgccggggccagcaagcgcaccaacctgctggtgattctgaacgacaacaacatggcgatcgatcaggccacgggcgcgctgaaaaactacctgctcaagatttcgacttcggtccactacaaccgcttcaagcaacggttgtggggcatcctttcgcatacgccgcgcctgctgcgtctctgccagaaggcgggcaacgccgtcaagcagggactgctcaacaagagcaatctgttcgaaagtctcaatttccgctatttcggacccgtggacggccacaacctcaaggagttggtgcggacgcttcgcgcgctgcgcgacatagagggacccaagctgctgcacgtcatgaccgtaaagggcaagggctacctgcccgccgaacacaaccagcccgtctggcatgcgccggggcggttcaatcccgatacgggcgagcggatttcgtcgccgggttcggcgtcgcgctatcaggacgttttcggcgagacgctcgtcgaacttgccgaacgcgacagccgcgtcgtgggcgtcacgcccgccatgccgtcgggctgctcgatgaatctgctgatgcaggccatgccgtcgcgctgtttcgacgtgggcatcgccgaggggcatgccgtgactttctcggcgggactcgccgccgcgggcatggtgcccttctgcaatatctattcgaccttcatgcagcgggcttacgacaatgtgatccacgacgttgccattcaggatcttccggtggtgatgtgtctcgaccggggcggtctggtcggcgaggacggcgtgacgcatcacggagtcttcgacatggcggccttcggctgcgtgccgacactggcgatcgctgcgccgatggacgaactggaactgcgcggcatgatgtatacgggactgcagtacggccatcccttcatgattcgctatccccgcggctgcggcgaaggccggatgtggcgcggtgcgcggttcgaaaccctgcccgtgggccggggacgcaagctccgcgacggagcggatgtggcgctggtgaccgtcggaacggtcggcaatgccgctgcacgcgccgccgtacgcgctgccgaagaaggggtgagcgcggcccattacgacctgcgcttcgccaaacctctcgacgaggaactgctcctcgaagtgggcgcgaagttccgccgcgtggtgacggtcgaggatggcgccctgcgcggaggcgtcggcgaagccgtcgcggcatttttcaatgcacgcgggctggacgtttcggtgcgttcgctgggcatcggcgacgagtgggtcgaacacggaactccggctcagctctacgccctctgcggctatgacgaggagggtattctgaaagccctgctcgaaacgaaacaggcgccggtctgcgccgaataatatccggactccttacatcgtaaacacccagtcgtcggctttgctgagcgccgcgtcctgccggaagccttcccactcgaacgctttcagctgctgcggatcgccgatgcggtttttgaggatgtgacgggtcatttcgccgcggcacattttcgtatagaccacgacggttttcagccggtcgtcttcgcggatgcggaattcgggggtgacgacccgcacttcgcggcagatgcgcttccagtcgaacagccgcttcatctcactgctggccagattgaccagtatgccgtcgtcggccttgatcttctccagaaaggcgtccgtcagtttgtcctgccaatattcgaaaaccgtctgctcgccgtggccgggcagtacggcgtcgccttcgagccgataggtgcggattgcgtccagcggacggagcagtccgtaaaggaacgaggtgatgttgaggtgcgcctgcgcatattcgaaatccccggccgtgaaatccgccggagcgatccgtttgaacacgatgcccgtgtaggccgccagcgccggcagcgccttcttcgcatcgtcgtggaaacggctgtagcggagccggttcgtcgcggcgatccgatggtttacacgcaggattttcgccagctcttcggtggagagcgtcgccagctgtccggccagctgtccggcctgcgcgccgtaaaggggcgaagtggtgcggggtatcggcagggaggtgctttcggccatcgttttggcgcaggagaggagtatttgcatgatttgtcagttgttgtcgcccgcctgctccggaaagcgggtgaacgggacgaagggcgtcaccgtaaaatcggcggtgaacaggtagtcgcggcgcggattttccatgtaaacgtttttgcagatgcggtaacgggcgtatacggacggatagatgcgcggcgcgagccgggccgtgaagccgtaggcgtactctttcgtctgccgggcgtcgccggggacgggaaattgcgggcggccgatgctgatcagcagggagttccatgcgtcggcgcccggcagtgtttcccaccggccgttttggaacctgcaaacggtgtagtccgtcccgaaatagacggtcgaatcgccgcggtagcggatcgtaagccgtacgcagtcggtctccgcagggtagaaggcgtattcggcgtccatgctcagtccgtcgggcggcggcgtgccttcgggggcgggcggatagggcgttgtgtcgggatcgaacccttcgagccggatcagggggctgtcgtgtacgtaacggcggaagcgggctttcatcgccgagtcggcccggagcagacggacgcggacgatcccctctgtttcgtcggttccggacgaccggacggcgtcggcgacgcttgcgatttccttggtcgcagatgcgcgggcggcgttcgcgcttccgtcgaatgtttcgcgctccggtgtgcaggcggcgaatccccggtcggtcgtgcgcaggatgtcgagacggcgccacacgctgtcctgcagttcgcccagttcgcccagttcgcgcgccgtgggacggcgctgggcggtcgccgtacaaccggcggcgagcagcagcgataacaggagcagtctcatcggcaggcgggttatgctaccgaacaggggataccgagcgtttcgacgcgggcggcgatggcctgcagctcctcgcgcggaaccttttcgagcgtcctgcacggggtgtcgcggtcgagcgagtagaccatgacctgccgtggccggatctcttcgatcagccgcagccatgccgagacctcctcttcggtcgtgttgtctgttttctgtccgtcgcattcgccgcgcaggaacatggtctgcacggtcaggcgtccgtcgaagcccttcatctgctccacgacgccgcggacggtgtaggcggggctttgggggttgttcatcagacgcgccgtggcgtcgaacgccgagtcgagtttgaggatgttgttgtccacccgcagcagggcgcggcgcacctcttcgcggtggagctgggtggcgttcgagagcaccgagaccttggccgacgggcacaatgcgtcgcgcagggcgatcgtatcgccgatcaccgcttcgaattcgggatgcagggtcggctcgccgttgccggcgaaggtgatgacgtcgggcggcgtgccgtccgccaccatgcggcgcagcgtcgcttcgagctgcgtgcggacatcttcgcgggcgttgaatcgccgtccgccggggtgttcggcgttccagccgcattcgcagtagatgcagtcgaacgagcagagtttcgaatcggtcggcaggaggttcacccccagcgaaaggcccagccgccgcgagtgcaccgggccgaaaatgatgtcgtgaaatagtgatgtcataatgcaaaaatacataaaatatccgactttgtaccggcgtgccgtttcaggccgccgtcgtgtcgttcttggctgttgccgagtcgctctcgtctgccgctgcgtcgtccccggccgccgccgggtggtttttacccgctgttgtgccggctccgagacctgcggcgggcggaagcgtacggattcggaatatatttcctatctttacaaaaatcattctcctatgaaattcaggttcggactgctgccgcgcgtcgtactggccatcgggctgggcgtgggatgcggctttttctttcccgaatgggcgacgcgcatcgcgctgacgttcaacgatattttcggacagttcctctcgttcgtcattccgctgctgatcctcggtctggtggcgccgggcatcgccgatctggggaagaccgccgggtggctgctggccgttacggcggcgctggcctatgccttcacgcttttttcgggcttcggaacctatttggtggggcgcgcggtctttcccgcgctgctcgaaggctcgcaggccgtgctgcccgacgatgcgggcgcggcgctcacgccctatttcacggttcagatgccgccgctgttcggcgtcatgtcggcgctggtgctggccttcgtgctcggactgggcatggcctatacccatagcgtgaagctcaagggggtgatggacgaattcaaggggattatcgaacgcgtgatcggcagcgtcatcattccgctgctgccgttctatatcttcggcattttcctctcgatgacccggtcggggcaggtcgcgggcgtgctgggcgtcttcgtgaagctgatcgcggtgatcttctgcatgaccgtcgtgctgctgctcgtgcagttctccgtcgccggactcgcggcgcgcaaaaatccgctgcggatgctccgcacgatgcttgcggcttacgtcacggctctcggaacgcagtcttcggccgccacgatccccgtgacgctggcgcagaccctgaaactaggcgtgcggcccgaaatcgcgtcgttcgtcgtgccgctctgcgcgacgatccacctctccggctcgatgatgaagatcgtcgcctgcgcgctggccgtgtcgatgatcgccggactggagctgccggccggaacgttcgtgggattcatcctgctgctggccgtgacgatgatcgcggctccgggggtgccgggcggggcgatcatggccgcgctgggactgctggagtcgatgctgggattcgacgaaacgctcgccggactgatgatcgccacctatatcgccatggacagtttcggcacggcgaccaacgtcacgggcgacggcgccgtggcggtgatcgtcgatgcgatcgaccggcggcgctgaaaaccgttccggggccgccgaaagcggccttttttctttttatacctgtgtaaataagtataaatgcgtacccgtgccgaataaaaaacggctaattttgatggctaaaaaggtttttttgtacttttgcgcgtccggaacggaaactaacattaaattatatacattatggttgatatttttgcacgccttgaaaaaaatgcaggcggacctatcggtcagtacatgtcgtacgcccacggatatttcgcgttccccaaactggagggcgagatcggtccccacatggttttccggggcaaaaagatgctcaactggagtctgaacaactacctcggtctggcaaaccatcctgaggtgcgcaaggccgacgccgaaggcgcagccaaattcggtatggcggccccgatgggcgcccgcatgatgagcggtcagaccgtttatcacgaacagctcgaacgcgagctggccgagttcgtcggcaaggaggacgctttcctgctcaacttcggttatcagggcatgatctcgattatcgactgcctgctgacgccgcgcgacgtggtcgtctacgacgccgaggcgcatgcctgcattatcgacggtctgcgtctgcacaagggcaagcgtttcgtgtacggacacaacgacatggattcgctgcgtctccagctgcagcatgccacggacctcgccgaggagcagaacggcggcgtgctcgtgattaccgaaggtgtcttcggcatgaagggcgatctgggcaaactcgacgagatcgtggcgctgaagaaggatttccagttccgtctgctggtggacgacgcccacggcttcggtacgatgggcgagggcggccgcggtacggcttcgcatttcggcgtgaccgacggcgtggacgtgctgttcaacaccttcgccaagtcaatggccggtatcggcgcattcgtctgcggtccccgctggctggtgaacctgctgcgttacaacatgcgttcgcagctctacgccaagtcgctcccgatgccgatggtcatgggcgcgctgaagcgtctggagctgatccgcaaccatcccgaatatcagcagaagctgtgggagatcgtccgcgcgctccagaacggcctgaaggaaaacggattcgagatcggcgtgaccaactcgcccgtaacccccgtctttatgaagggcggtatccccgaagcgacgaacctgatcgtcgatctgcgcgagaaccacggtattttctgctcgatcgtgatctatccggtgatcccgaagggcgagatcatcctgcgcgtgatccccaccgcagcccatacgctcgacgacgtgaactatacgatcgcggcgttcaagtcggtgcgcgacaagctcgaaggcggcatttatgcccagatgccgattccggttcgcgccgacgaaggcttcaaggtccgctaatcgggattcgctctgagggcgatccgtatatagataaggctgccatttccggcagccttatttttgttgccgttcgctgcggggcgttggcgccgggcatgcctgcgcgatcgcatctgcaccggcgtttctttttcggcgttttcgggcggcgcaagagtaattttgcgacaaaattcgccggaaaattttgcagaataaatttttcggtttatatttgcagtcccgaaacgcaggtttcgaagttcggagccgaggtgcggatgcagttgtcccgcccgtccgaaaacgataattgcggaaatagctcagttggtagagcgcaaccttgccaaggttgaggtcgcgggtccgagtcccgttttccgctctcgtaagtggttgataatcagtcggttatcaaccatttttcttttttcggaaaatgcggaagccgggcggaatgtttgccatagcaagctgaacggcggtaatagaataaaccaaaccgggcatcagagcagttaagaactccgatgcccggttatttattaaaacccaaactatttcttggatgcggtcgttttgcgaggcagtcttttaacagcctgctctaattgttcgacggctttgttgtcggcgttactccgcttgactttgaacaattcgtattcgtgttctgctttggcttttgcgatttcatgcgaaatatggccggcatgcgtcagaatttcacggtcgttcagggccagaaatccatgcagtttggcgatccagtctttcatatacatcggaatacgcttcatggcctgtccttcggcgaaaacaagatattgttctaccaaattattgagtgcaagcaactcttcttccgtcaaataattcttcgcaatcgccacatcttgtttccggactttaacgccgcgccaagaggtcagccccatattgggtttgttgctgtcgcagcgttccgaaattatctccgccgccgttttccccgttacggcccagtgcattttattctgcacggttttgaaaaactcaatactcatatccgccgcggggtcatagtccgcactcgtcgcatatatttcgataactttctgataaaaccgcttttcggaggtgcgaatatcctgaatgcggcgtaacagttcgtcgaaatagtcgaacgggaggtccggatttttcagtcgttcatcgtccaacacgaaacctttgacaatgtattcgcgaatatgctgcgttgcccattggcgaaaccgggtggcaacatgcgactgaatgcggtaacccaccgaaataatcgcgtcgaggttataataattgacttgccgctgaacggtgcgcgtgccttcccgctgaacttgtaagaaatccttacaagttcgatcttcctgtaactcaccctcttgataaatatttttcaaatgcagggtgatgttttgcggagtcgtttgaaacaattcggccagcatgcgctgcgttagccacactgtttcatcctgcaggcgcacgtcgatcttggtttgtccgtcctcggtctgataaatcagtatttgcgagttattgttgtccattattttgtcggtcggttactgcaagcgttgttatagtagtcgatctgcgccgtgcagacccgttccacgatgtcgcgcaggtgttcgactttcggcagcagcgcgtcgatgtcctctttcgttatttcaaaatcgggattatagcgggattcgacataagccctttgcaaaaggtcgaaaagccgttcttcttccggcgtgtcgcgcgggagtgctttgaatatctcggttgtgaaccgtttacagcgattcataaactcggccagcttgtgttcctttggactgtataaagtgaacaccaattcgatggttcgaaaaaagtgttctgttgcttgatgcaaataaaaagaagcctgtttgtaatcgttgcgttctgttgcatgaggaacatcaaataagaaacttaatgctcgtccgaatttatcattatagtatttctgcgctctttcagtaatctcgtcgaagttcagtttgcggcggcgctccagcttatattcgccggaatcgtacaaaataactccctcgcgctttatctccgtttcgaaatagtgggcttttgagagcgcatagttgaagtccgctattccataattgataaattggggcttcgtatggaaaggtctgttcttgtgctgaaaaaaagcgtcggcaattttgtcatacagcgaatactcaatcgccccgattggcttgcgcgtcaggatcagtatgtcgtaatcgctcataaagtaggtcggcacgccgaactctacgcgctggtcgtaatcgacataggtattccgggcgtaactgccgtaaagaataaccattccgacgttcttcacatgctcgcggacgagaccgacaagctgtttcaggtcggcttgtttcttttcgggtaagaagttgacgctctttttcataactacaaaattatgaaaaaaattggtaaactgctttgcccgaaccatgaaatgtcttatatttgttctatatttgtattcctgcaaaaagtctgcaaagtttccgacgggggtagcatgtgctacttaaaagaaaccgaacagaccatgaacaggaattatcatagctcggcatagccgacggacataactataaagggtaaacaactctttatacctaacgacaaacataggaacctctttcgggagggtttgaatcaggtataatagttgtcagtcccagttatgtcctgctcatatttgggcagggcgtggctggggcgcaggacagctttctgattcgggtttcctatgacctgtcgttaggggctgacaccgcgcccccttttttatgcccttgcgggacgcggattcacaccaacgaaaaccgaagaaaatgtcccgtcgcatccgattccggaattacccgaaggcccaaaatccccattatattttactgctccggcacaatacgggccggacgcttccgccgcaaggttctgcgcggcggagcgtccgtttttgggccggggagcgggggaacgccctcacgccgcacgatccggcgcggcgggcgtcataggctcactgagcgacacgtacaatcccgcattccggatgcagccggcaggcattgcgccggaagcggtccctgaaatctggcagccggggcggtctccgcattgaattcttcttaaagtgaagttgcgtcacttgttcggtcggagccgccccttttttcaaaccggtattccgggtctaaaacggcacacgcattgatgaacaacgcaaaaattccacgatgaaccggaacgaccccgatttcgagaaagccctgcgggccatcgaccgcttttacgcgacgcaggtcaatatctgcattgcggcgttgaatagaatgcagtcggcggagctggccgacaaaaacatcatcctccgtgcgatcatgtgcgacatgcccgactgcggcatctgcgccgatcccgcggccgaagactacggcgtcgatttttgggtcgaccgggcggagtatgtgaacgacacgtcgttcaatctctacgttacgcaggccgaggaaaaggtgctctggaacgtcggggagaaaggccggaaaccggggcgtctggcagttccgcagcagcggatcacggtgcgggccgacgggataagcaggcccccgtatattccgctgatctatctgacggtgctgagttccaaactgacggcgatggcgctggcggacgtgctgccggcagtggacctgtcgggctattgcgacgagcgggtgatggcgtccttgggggagcgcatagcaggggtattggacaggatgactgaaatgcaggacggggaggagggcggaaatccggtaagctgaaacgccgcgggccgaaaaaacggggcggacccgaaagcccgccccgccgctgaaaaagttggcgtcacccctgttctacaggttcttttttcaactcccccgttttttccggccggacggggcgtttcatccgctcaagttcgcgctccagcagtttgtccaccagcttgcgtttggcttgccgggcctcgaacggcgtgggcggaatgtccgaaacgtccatcttcagataatccagataactctgataggaaatgccgaaggtgtaacgtccgagccgttcccaaacccgtttgtggcatttcgccttgtattcgggttcataatacattttgtcaaattcctgaaccgccttgactctcaggcgcatgtagaagttgttgtaactcataaaataaaaaattttagttttttgagcgatattgctcactaaaatttacgcaattaattgcggttcaggttaaaagagaagtctctcaattcctctcgcgtggagagcctgcaaaataggtattcggcgggcaggaaggtccaataattatactttctcagatccgccgaggaggtttccagacagatgcggtcctcggcgtcccggttgccgacgattccccatagcgacgttcggctgtcgcagccgggatctgtcgcatggaacaaatagacgtcgccgatgcggaatttgcaggtttttatggtcatatcaggttcgttagggttttacggcggcaaaggtgaaaatcctgaagcgaacctccaacttgcgtggtaaccgttacgacattaatctgttcggaagggggcaaatgaaaactccggatgcgaatgcgcatccggagtttccactgtttttcggttcttcgtttccgcttcccgtcattcggctttcagctcgacgacgacgctgcgggcgcggtccgtcgagaagagtttcaaaccggccttcatcaggtaatcgccgcttacgatgcggtcgttgtgctcgatacgcggattctgccccggcatgaggtttatttcgcgaatgcggtagcgcagatcggggtccagtccggtcagccgtacggcgggcagctgctccccgtagcgcggattgaggtcgtaggcgaagactacggagccggtccggtccgccgagacggtctgcatggccgcatgctgtccttcgtagggcgaaacgagccggtagaagtctccgtcgaggatggtgtgtttcagccggttgtaattccggagcgcctgccggcagaattgcagttcgtcgtccggcagatccttgacgatgatgtcgaagcccagtttgcacatcatggccacgtccgtacggaacttgatcgaagtcgagcggttccaattcgtcacgtgtgcgcacatgcttttcagcgggaagaaatgggagtagccccactggatgaaaatgcgctccagcgggtcggtgttgtcgctgggccagaattccgtgaagtagcgcagcgccccgtagtcggtgcgtcccccgccgcctgagcagagcatcatcggcaggtcggggtatttggccccgatccgttcgagtacgctgtacaggccccgtacgtagtcgatccacaagtgcgactgtttttcggccagataggccgaatgggcgttgatgatcgggctgttgcaatcccatttgaagtaggcgatgccgggattttccgtcatcagacggtccacgacgccgaagacgaagtcctgcacttcggggttggcgaggtccagcaccagctggttccggaagtaggcttcgtcgcggttgggataacgcaatacccagtcgcggtgcttttcatacagctcgctgcggggattgaccatttcgggttcgatccagagaccgaagcggatgcccttgccctcggcagtttcgaccagtccggcgatgccgccgggcagtttgccgcgggtttcgtcccaatctccgagtccctgcgtgtcgttgtgccgcggatgcttgttgccgaaccatccgtcgtcgagcaggaacatgtccacgccgagttccgccgcgtcgtccatgagcgcagcgagtttttcttcgttgaagtcgaaataggtcgcctcccagttgttgagcagcgtcatgcggtccttgccgccgtctttgagctggtggcggcgcgcccagtcgtgcaggctgcggcttgcgcttccggctcccccggtgctgaaggtgaagatgaattccggcgtgcggaagatttcacggggacgcagggagtattccgacgcgaaggggttgatgccggagaggatgcgcaggccgttgttctggtccacttcgaaggtgaaccggaaattgcccgtccatgccagcgtgcccagaagcacctccccttcggtttcggacatcgggccgtcgagggttacggcgaacagcggagggcagaacatgttggcccgcgagccgagcgacgaatcgagtaccttcttgccgaagtcgagcctgcgctcgctcttgttgacctcgtgcgcccagtctccggtaaattcggtcaggtagtagctcccggctccgaggcgaagcatcgacgatgcgtattcgtacagggtgacgggtttgcgctcgtagtgtacgatctcggtcctgctcttgatgacgttctcgcgttcgaaggcggttaggatcagctttacttcgacggggtatgcctcgtcccggagcaggatgctggtctcggtgacgccgtctgccgcagagcgggtttcgtgcgatacgtaggcgagctgcagggagccgttgccgtcgttgtgcgtaaggcgcagggccggggtgaaatagtttttcgaaccgtacgtcgtgaacgcttcgtcgccggccggaagcaggcgcaggtcttccgggctgcggaaggccggtcccagataactctggcaaagccgtccctgatcgtcgatacggtacaggaggtcggtctgatcggtgtggatgcggatcaggggcttttcggcagcgcaaatgtcggctgcgagcagtgtcagcaagagggtcagtagctttttcatcgtatgtggtttattcggttttatcgacggcggatggcgtagaagcggacgtctttgccggggatggaaatttctgctgggcggcggagtgtcaggtgttcgccgctccatagctcctcgaaatcgtactcggccgcaggatcgagtcccaagcgtcgcgggtcgatcgtgcgccgggtctccttgtcgctgtagttgaagactgcgtagtatgtcacgccgtcgcggggacgtgatatgaactggttctccgaacggattccgtcgccctctaccgggcggaacgcttcgcccgtcgcggcggcgttgacgcgcggattggtcaggaacttttccgcacggctcttcgattcgacgggacctcccgaactgaaatcgtcgccgcagatgtagattcccgtgatgatgcccgatgtgatgcgggcgcggttctctccttcggaggcttcgcgcaggacgatgtggtcggcgtcgttgtaattgtagatccggtcctgccaccagccgtatgaggtggcgttgagcgtatattccgtatccttgatcttgttccacgcatcgcaggctatgcgtcgcgagttggcgtaatgagccgggaatacgggcgagatcgaaaggttgatgtacatgtccccgaaatatttttcgagcagggccatgccgtagttgtatccttcgatgccgctccggatctccggattgtgccatttgtcggcctccatggccccgtgggtcatgaagtccattttcacataggtgaatcccgtgcggcggaacagttccgagaaatatttcatccgctgctcgacggccgggtgggtggggtcgagcgcataggcgccgtccagcttctgcggctgtccgtgggcgtagagataggcgtcgccgaaggtgtattgctccgcgtgatccatcttctgccgcggattgcagccccagtcggtgaagggcgtccaatagatgccggcctgctgcccgttggcccggcagcgagccgtgaacgcggaaagctgctcctcgctcatggcgttccaccccgaatcgagtccgacgtagagcgtattgtcggccgtgtggaacgagttgccttgcaggcggtccctgaggtagtcggccacttgggaggcgttttcgtagttgagccggaactggagcgcaccccagctgttccagcctacgggcatggcgtgttcccagtgccgcggcggcgctatggcggcgttggcttcgccgtagcactccagcccttcccgccagtcggcgaaacaccctatcaggaagcgcggcgacgaaacgcgccgcccgtacagtgcgccgtgttccttcacgtcgcgcgtcagtgagtcggccgcgcccgcttcgcagacgatccccgtgatgcggtcgtcctccgaggtgagatgcacggcgcttttccaatggtcgtgatccaccgagccgaagacccagccccggcgcgtgtcgttgtcgtagagagctgtcgcttcatagctcgtcaggcgtccgaagccgagcggatgcgacgcgtagcggatccagcagtcgttgtcgaaagggatgaacagggcgcgtgccgtacctccgggccgcagcgactgcttttcggcggcgacgggcgtcagtccgttggtcgatacgccttttttatcggagagcgtcgactgcacggtgacgaaccggccgtggtcgtagagccggtagctgatttccatttgaggaagcgcccggtcggtatggcggatgcggatttcgagggccttgcccagcggatcttgggtgcggcgggtgcggacctgctgtttccggtacgactgcgacgaaacggtccgtccgtcgagacgtgctgtcgaagcggcgcgcgacaagagcgtatcgccgttgcaaagcagtgtgacggtgtggtcggagttggtgacgacctcccagcggccgtttctgttgtcggccgtgatgttgcagctccagagcaggagaaccgctgccgcgcaggctttcagtagatggtgcattgttttttgttttggagtttataccgcaaaattatgctcggaaccccgcctcaaatagcaaggattcggctaactatagtctttttgatgcattcccgcttttcgggcggttttcaggcgtgtttcggggcgtctccgccgtcggtctgcggttcttcgggcttgtgcatcttttcgaagtcgcgcgggcgcatgccgaactgtttgtagaacagccggctgaaatacgacggggaggtgatgcctacggcgtagcacacttcgttgatcttgtgtttcccgtcctgcagcatgcgggccgcttttttcagacgtatcaggcggatgaagtccaccaccgagaggttggtgatgttcttgaccttgcgcagcaggctcgaacggtttatgtgcagcgcttccgacagccattcgacgttcagctgttcgttggtcatgtgttcttcgatgagcgcgatgatcctgttgatgaactcctcgtcggccttcgacatgcgtatgttgtgaaccggtacgaaggggcgtttgatgaaggcttcccgctccttgcggcggttgtccatgatcgagaagatcagggcacgcagatagctgaacgaaaagggcttttcgatgaaggcttcggcgccgatgtgcagcccttcgatcttggccgtcatgtcgttcttggccgtaaggaagaccagcgggatggagtgcaggttctcctcccgtttcatcgtgcggcacagctccatgccgtccatgccgggcatcatgatgtccgagaccacgaggtctacggcctgattgtgcaggatttcgagggcttcggcgccgttggaggcggtcagcaccacgcattccctgcgcaggcggccggcgagatactgctgtatggcggcgttgtcctcgacgagcagtaccgaatagtcctgttccgacgaggcggtctcggtcggctcctgcgggtcggccagcagcatttcggtctcttcgccggggagttccgcgagcgtttccgcctgttcctgaagattgatgtattgctcttgtacgagcgggagggtcagcacgaacgaattgcccggagccgccgtgtcgaggaacagatgccccttgtgcagctgggccaaggagcgggccatcggcagtccgatgccggctccgggagcctgccccgtgcggtcgatgcggaaaaagggttcgaaaatcttttcgctcaggtgtatgggtatcttctcgccgtcgctcgtcacgcggaccgagaaggtttcgccgttgtgttcgagcgccacctcgatttcgtgttcggcgtacttcagcgcgttgttcagcaggttgctcacgatcttggtcagcgcctcgcggtcggctgcggcttggaacgagccttcgccggggcggagcgtcaggcgaagcccccgtttctcgatggtcggctcgaaacgctcgacgatgcactgcagctgcatcggaatgtcgaaacgcacgaagtcgagccgcatcttgttcgaatcgacgttgcggaagtcgagcagctggcggatcagctccagcaggcgttgtgtgtttttgtggatgacatgcaggttcttctccagcttcgggtcggcgttcatctccatgatgtcctccagcggccccttgatgagcgtcaggggcgtccggacctcgtgggcgatttcggtgaagaagtcgattttggctccgtacagctccttctccttctcggcctcgaacagccgctgctgttcgagtatctgcttgcgtttgcgtcgcaggtagtaacggaatccggcggcggcgcctccggcgacgatgagcaggtaggcgatcttggccagccccgtgccccaccacggagggcggatgacgatcttcagcgaccgttccgcgctttgccagccgccgttgcggttgacggcccggatgcggaacgtgtagttgcccggctgaagctgggcgaaggagatcggacgtgaccggtcggcggcgatccactccgtgtctaccggttcgagtgcatagtagtagtcgatcgagccggtttgcgagaaactggtgccggcaaaacggagactgatgttcgattggttgtgtgcgagggtgatgcggtcggtgaagagcggactccggtcgaggggcgatccctctcccccgacgctctgctcctcgttgttgatactcagtcccgtgatgtagagggccggttcgggcttgggcgagaaatggtgttgtgagggatcgaaaccgacgatgccgtcgaatccgccgaaccagaatttcccgtcgcggccgcgcagggcggcgtggtagttgaactggttgccaagcaggccgttgtggcgtgtgtaggtgcggattttttcggtttcgggattgaaccgcaccagcccgtagttggtgccgagccaaagcattccttcgctgtcttcgagaacccggtaggtgacgttgtcgggcattccctcgccgagcgagtagctgcggaaggcgtccgtgtcgtaatcgtaacggcacaaaccgccgcggtcggtcgaaaaccagagcgttccgtgccggtcttcgcagacgttgctcaccgcattggaactcagcgatgcgggattcccttcttcatgggcgaaaaagcggcgttcgccgctggccggttcgtaccggcacaatccgccgcccagcgaggcgaaccaaaggtttccgcgcgagtcttccgtgatgtcgaaggcccagaaggtgctcagaaagtcgatctgttcgaatcgggccttcccgaagcgccggacatagaccccctgaccggagccgatccagaggttgccctgcgagtccttgcagaacgagtagatgctcgactcgccgatgccgagagaggcggcgtcgtagtgcgtgagcttccctgtgcgcatgtcgagccgcccgatgccgtgtttgaaaaagccgatccagagctgggcgccgtcggccatcgtgccgagggtgttcagcagccgctgccgccgcgtaaacgtgtaatcgacggtgcggaactcgcccgtcgcgggatcgaagacgcagactccctcgtcctcggtcccgatccagatgcggccgtcggggccttcggtcagcgacctgatctttttgcagagcaccgcgtgttcccggtcgtaggggatgtatttgtcgaagacgaaattcaggttggcgcagtaattcacgcctccgagcagtgtgccgacccagatgcccccttcccggtcacggcagagcacgctgcagctcttgtccgaaaggctgtagggattgagcatctcctcgcggaaatgggtcgtgcggcccgtacggtcgtcgatgacgaagaccccttcgtgggtggtgacccacagttcgtcgtcgtagctctcgacgtcgcgcagcatcgtgccgtgcacttcgggagcgtcgatgacgctgagcgtcatcgttttcaggtcgagccgcttgagttgtccgtcgtgaacggcgatggccagcgatgagccgtgctcgcacaaggcgaagacgtattcgccgcggagcgtgcggccgtcgcggtcggtgtggaagccgtcgaaacgatcctccgcggcattgtagcggtagagtccgtcggcgtaggtgccgacccagacctgtccgttgcggcgtatgcagaggcattgggggccgggaaccggataggtccggagctgtccgttgcgccagcagaagagtccttggttcggaaccacagcccaaacggcgcccgaagggtcgctttcgatggcggcgacccagttcgtgatggcggtgccctcctccgtcgtgtgggtgaactcctcgaaacgttcggtcaggggcgtgtaaatgtagatgccccggtcggtgccgcaccaaagacggcgttccgtatcttcgtagagtgacgagatattcgagtcgccgtgcccggtcgccgggtcgaagcattggaaaatacggatcgaagagccgtcgtaacggttcagtccgtttttggttccgatccagatgaagccgtagctgtcctgcacgatggctttgatgtggttgtgcgaaaggccgtcgtcgagtgtcaggtgcgtgaagtagcggttgcgcgcttgggcggcaaggcaggccgtgcagagcagggcgcccagtagcagtagttttttcatggcgggtcggtgactctttgcaaagatagcgaattatgtgctctcctcttcgtcggaagaggtaaaaacgggccctgcgctccatgggaagtgcagagcccgtagcggaaacggttcggtgcctttagcgtccgtcgttgtagggtgtgacgcttacgacgggctgcgcggcgtcgccgagcagctccttgtcgaattcgacatggacggtctgcgtctcaccgggaagcagcatgaaatagttgtcgtcgtagagcgcgggaaggatgcgttcgccgctccggggatggcggagctgcacccaagttgcgaacgatacggccggggacgaggcgaggttcgtgaccttcacttcggccatgtatttgccgccttcggtgcggcccttctgctgcaccttcagactgggtgccggcagggtgttgagcgccgtgaagtcggtgcgtttcagtccgcgccagtaggtgttgcggtcgacgaccctgccttcggcgtcgcggagcgtgagccggatcaggtgcacgtcgctcagcccggcctgatgctcctcgccgccgtagactttcatctcgtagagcgagtagccgtaacccgtgccgcggcggatgccctgcaccttcacgtaacggcctttcacgtcgtcgaagaagatgtcctgcttgccggccttgcccgtgcgctcgtgcgccgcgtcggtccagtgctcggcatcgtcggaaatctgtatcttgaactccttgccgaaggcgttctcccagttgaggcccacgccgtagacgttcatacggcttcccagatctatgtaaatccattcgtggtcgctatagcggctgccccagcgggtgaactccgagccgtcgacgatctcttcggggctgccggcgtcggtcgacgacgccacgacgcgcttgccgcgggcgatattctcgacattcttgtagaaggggatcgtgaaacagcgcagtgcggtgttcggggccgaatttacggtcgccgtacctgtcagcgcgtccacgcgcctgccgtcggtgttgaacacctcggccgttgccgtgagtccctcgtaagtctgcgaggtggtgttggtgattttgacgtcgttggttaccgggttccagaggatgtgcagcggttcgcaggcgcgtttgcagccccagtaagcgcccgtcaggtcgtaatagtaatcataggtctgccataccagcgaggggtaggccgactgtcccatccatgtcatgatgccggaggcgtcctcccacatgtggtcgagccatccttcgtagagggcttggttcgactcgatgttcagcagctgggccttccgacagaagtcgtcgatgtccgcagccttgccgtaacgctcgttgagcatccgttcgtactggtcgggcagtccgttgaaggcctgctgaccgaaatagtggaggttccacatctcgttgcggggccagagtttgtcttcggggatgaacttgcggaagctctcggcgttgacgaataccgccgtgccgatctcggtgcggaaaccccagccgggcgtgccgaccttgttgtagggataggggtagtaggtgaagtaatagcgcgggtcgtaggctccccacggaccgctgcccgaaagatgtccttcgtgcgaattggactggtagtagcgttcgccgccgtcgaagacccggacattttcgcacaggtaggtgtccagcggcggttcgggccagccttcgttgttgccgcaccagacggcgatcgacgggtggttgcgcagccgcttgatcttttcgacggcgttgtagttgaaggcgtggatgtcgtcgggaagaatcgggttcgaattgagccagaaatcgtcccataccatgatgccgtacttgtcgcaggcttcgtagaactcctcgtcggtggtggtgcccagccagttgcggatcatgttgaaattcatctctttgtgcagtcttaccttggtgaagtattcctcgccgcggcagcggagcatgtactccgaaagcccccagttcgcacctttgacgaagatgcggcggtcgttgatccagaggtggaacacgccgtccttggtgtcgtagtcgtattttttcagaccgaaggttatccgctgcgtgtcggagggtttgccgtcgatctcgacggtcaggtcgcaggtgtagaggttgggttcgccgtagccgttgggccaccacaggagcggatcgtcgatcgagagcgccgggcattcgcttttgtcgaaacgcacctcggcagtgcgtccgggctcgacgttgacacgggtcgagaaccggatatcgcccggcatgatcacgccgctcacctcgcccgaagcgtatcgttccgagtcgttgcgcactcccagccggatgctgacgtcggcacgggccgtcgagggcagttcgctgcggatccatggatcggcgagcgtcaatgcgttgctcgtcgaaagatacaccttgtccgtgatgcctgagttgaggcccggcacgtagggcatccaatcccatccggcgctgcagatgtaggtcggcgaggcgttgttgcccagcgatccgcgcggaatgtcgaccagtacggccagcgtgtttttaccgctgcggcgaacgatcttcgtgacgtcgaaccggccgcggtgcatgaatccgtccagctctcccagacgggtgccgttcaggaagatcgtgcctttgcggttgatgccgcggaaattgagccaaagcagctccttgtccagctcggcgggcacttcgaattcggtgcggtaccaatattcacggtcgtatttcgaacggtctacctgatggatgttgtcgccgaaattggggtccttctccttgccggcatcgacgtaggcggcgaatacggtccccggaacggtcgcttcggtccattcgaggcgctcttcgggggccggcggtgcggtgtcgggcgatccgtaggctgcgccggccggtgcgacgtaccatttgacggccgggttgtcgctgttgagcgaccatgtctgggcgtggagcgtcatgctgccgcaaagagatgcggcgaacagaaatccacgggcaagattgttgattttcatctgttataaagtgtttacgggttttgtatgggcggaccgccgcgccggacggtccgccgcatatggcaggttactcttcttcgggaatttggctcagtttgaaataggggaactggagatactggctgtcgcggctgatcgtgaccaccagacccagcgataccgggccggcttgcgtcacggtgaagcggatgctgttctccctgccctgatccgacggcagcaggtgtttccacgcgagcgccctcgtctccatgtcggcgcggtcgggaagctcgctgcccaaggccgcggccagatggatgtactgatcgtccgccgtgttgccgcgcaggtagaagaccgtgaattcgtaggttccgggctgcagcgtcggggtctgccataccttgccgttctcgaatccggggccgccccaatcctgcgactcgaagtggatgagacccttgtactgttcgtactgctcgtccttccagccgccgacggtgttgtttacttgattgcggagattcggcgtaatgttccagtccttcggtacgccccacgggctgccgtcgggcttctcggcgccttggatgttcgggccggcgttcttcaggtagagcgaggtgatgtcgcttacgaaatagagtttcgcttcggggcggaagaggtcgatggcgttttcttcgggcagatagacgctctggactttgaactggttctcgcgcacctgcggcagacgcgtctgctcctccttggggccgacctgcacctcgacgggcttgccgtcggctccggtgtaggtcacgaccgtgtagggcgagttctccgatccgctgtaccactcgatggcgatgtcctcgccgtcgagtgcgcaggacttcaccacacggttgtagagtccttcgaggtagttcgccccgtaggagttgcccgaacgggtcatcgggatcgagtggttgccggcactgtcgtaggtgtatatctggaagttatagctcccttcgccgagcgctatctcctgctcgacgattttgtccttggcgtaatcgacctctatcgagaggctgtcctgcttggtgccgacgttccagtaaagaccgatgcggctgactttcgggtcggaggaaagctcgccgtggaagagcagccgtccgttgcccgcgaggaaaacagccgagtcgagcttgcccgtgtaggtgcttgaaacgccctcggtaaagcgcaggtagtcgtccatttcggtacacgagactaccgaggctgcggcgcccgtgagcagaagcagactgatgtattgtgtaagtttcatagcgtaggttcggttttaggttattgttgcactttgtcgtcgccccagaacgagatttcggtaaaggtcatgttcgtattgcccgaccagtttttcaggcagcggatgcggatgtagcgcacggcgggaaggtcgctcgaaaaattgccgctgtcgccgttgcgaccggcgatgcggtcgtcctcggagagtacgcctacgggatagcccgacggcttgacgttctcgacctcggccagcagcacccagtcgtcccacgaaccgtcggcaggcggcgtgccggcgcagccccatatttggtaattgcgcggcgaaacgtcgttgtaccagtgcttgtcgtcctgcagctgccagagctggaaccggctcagtttggctttgacacccatgtcgaaggtgaagtatttcggtacgcgcgaaccgtccgaaccggtgtggcagcccgtccggccgtccgagtcggctacgatccggccgtcccagatgtattccatcttgcagctccatgcgttgcaatcggcgtcgccgggcagtatcagttcgcggaagaggctcttgtcgagcagcttctcgtaaaccggcgtgtaggttccgacgaatgtttccgagtagttgtcgtacttgtcgcgtacgcggatccggaattcgcgcggaacgtcctcgtagccgcgcaccgagaacgtggcggccggaagagccgtgtagaaggtctcgacgacggtcatcacgttctcttcgttggccgtcagcacctctaagacgaggtcggctttcgtctcgttggtgaaggagacggtgatgccgccgaaatcctctgtgacgtcgagcgattcgaaagcctgcacgacggggggcgtgtcgggtgtgatgtcgatataaaccggtgccgaatggttttcgctgcggtccacggcttcgagcagtacgttgtaggtgtccgtatcgccgatgccctcgatgcggagcgtgttggtgtagatcgacgccttgaattcgcgccggattccggatttggtggtgaacgacgcccgcgcgtagagcaggtcgttgtccttgggaagttcgtaggagatctcggcgccgccgggaatcgccttccacgtaacgtcggtcagcggtccgggtgcggagccgtcgttttcgatcggttcgaccgtcgatttgatgcagccgctccacaacgtgagcagcatgccgcacaaaatcagtttatgaagtttcatatctgtatctttttttcaggtttaccagccggggttctgtacgaggttcgggttgacgatgatgtcctgctccttgatcggccagagatagtcgcgcggggcgatgaaatgctgcgtgtagagcgtctgccggttatagtagccttcggggctttcctgatcgatggcccagccgctcagcggtttgttgttaagttgtttttcggcctccttccagcggcgcaggtcccagaagcgcgatccttcgaacatcatttcgagggttctctcgcggtggatgatttcgcgcagccctgtctgggtggcgtatttcttcgtggtggcgtaggtgtcccacgactctttcacgcccttcaggccggcgcgctcgcggactttgtcgagccagtagatggcgtcctcgcccttgtcgcattcgttgagcgcttcggcgtaaagcaggtagaggtctgcaagccggagttcgggccacggatagcgttccgccgtgaagccgctgccgcccgtggtgagcttgaacttgtagttgacgagttttttgcaccagtaacccgtcaccgagtagttgtaggcgcccagacgcgactgtccgccgcctacgcgggcctttacggtccatgtgttctcgtccgaatcgctcggaccgttcttcagccaccagatcgaaccgtcgaaggcgaggtgtgcgtagaagcggggttcgcggtcgaaatgcgcggccgagatcgtataatcgctgatcaggtcgtagcgctcctccgtcgtggccgtgcgcagttcgtcgcgcgtgttgtagtgccatgtcttgtcttcgtcgatgggtatgccgttgcgggtgtagtagaggtttcctatttcgacggtcggattgcccagatcgcgtcctccccagatgttggtcggatcgttcggatcgagacgcgccatgcagtcggcctgcagcccctcgtcgttgcgggacgagagtccccagatcagctccttgttccagcggagggtcgcggcgttgttgatcgagagcttgcggcgcgttacgtccgaaatgttttcggagtcggtgaattcgtaaagctcgatgccggccttgtgacaggctaccaccgccgagtcgcaggcggcggccgccgcttcccatttctcttgggaacgttcggtgctcatcaggtgtacgccgtcgtgatcgacgaagttcgcgtagtcggggttaccgttgaaaagcgggctggcggcagttaccagcacccttgctttcagtgcgagggcggcggggcgtgtcgggcggcccagctcgtcggccgtgttgatgattttgtcgggaagccgttctgcggccatgtcgagcagttcggatacgtattccacgcattcgtcgaaaggaacgcgcttctgccgcacgatctcggtcggagcgtctacgggcaggttttcgcgcatgaggattaccggtccgtacatgcgcatcatgtagaaggtgtagtaggccttcaggaaataggcttcgccgagccagcggcggcggtcgctgggcgtcaggtcgtagatcttgctttcgtccgagacgttctcgatgaatacgttgcagtcgtggatcgcctcatggtagttgcgtccgttgttgtcgccgctccagtagctcaggatcggggagttgcggttctggtcgccggtgaccagccggatcggggtgatctggttgtcgagcgtgaggatgtgccatgaggtgatttcgtcgctgcccatgagtgcgatgttgttgttgaacttgtcgtggtggggcaggtaggagtagatcgtggcgaggtatttgcgcgcttcgagttcgttggcgaacgcattttcgatggtcgccacattgtcgggtacgacgtcgaggaagtcgcaggaagcgcttccgaaggctatgccggctatgcagagcaggttgattagctgttttttcatggttgtcggttttagaagttaagctgcacgccgatattgtaggtgcgctgaatgggataaccgagtccgttgccgcccatctcgatgtcccaaaggtcgaatccgcttatcgtaagcaggttcgtgccgctcaggtagaggcgtaaggagtcgaatccggctttctttatgccgttgcggaaggtatagcctatctcgaccgatttcagacgcaggaatgctccgttgcgcatgaaccacgagttggtcttggtgttgttctcgctcttgtcgagactcagacgcggccagagggcgtagatgttccggttgttctcgtcccagtggtcgtctgcgtaggctttcagcagcggctggtcgttgtagaaaggcgaggtgttgtcggcgtagatccagaacgacgagcgggccgatccttggaagaaggccgagaggtcgaagcccttcttgccgaacgagaaaccgaatccgtagacgatctccggcacgttggggtgtcccagcggcacttcgtcgaggtcggtgatctgtccgtcttggttcacgtccacatatttgatgtcgcccggtccgtaggtgccgaaagtctgcgtgggcgagttggctacgtcggcttcgtcgatgaacagacgttcggcgatcaggccgtaccactgtcggagcgaattgccgatgcgcgatttgtacttttcgttgtattcgggttcttcgtattcgagatattcgctggtcgcataggtgaagttcatgcgtccctgcacccaccatcctgaggcgaaggccttgttgacgtccagcgaagcgtcgacgccgtggctccgggccttgcccacattggcgcgcacggcggcgctcagacccatgctcgacgggatcgaggcgcgctccatgaggatgttcgtgcgcttctcgcggaagtagtcggcctcgatccggatgcagttccagagactcatctcgaaacccgcattcagtttgtaggcgcgttcccatgtgatgtcgttgttggcgtagcgcttgatggcgacgccgttgaacccgtatcccatctcttcgccgaaccaataggccttgtcgccgttgttcatgtcgacgttcgaaaggtagaagaagcggtcgtcgtcgctgccgatggcgtcgttgcccaccacgccgtaggtcgctttgatcttgaatgtgtcgacggtctctttcaggcgtccccagaagggttcgttggagaccatccatgccagacccatggccgggaagaagccgtagcgttccttgcggtggaagcgctccgaaccgttgtatccgaagttgaactccgcgaggtagcggccgtcgaatccgtaggtgaagcggcccgaaagtccctgattgcggtacggcagcgatttttgcaggtcgccttggttggccttgacctgattgctgttctggtagaccagcaggccgctcagggagtgtttgccgaaggtgcggttgtactccatggcggcttcgatgtaggtccggtagttgatgtctttcccgccttcgttgtagttgaggtattcggtggggttgtcgttgccgttgagcagcatgagcgtgtagtcgcccgtggttttgtcgtacgaacttacattataataataggggttgtaattgcgcgaaacctcgaagtaggagtagcgcgacgtgttgaacagcacccgtgccttgagcccctttacgaggaagtcgaagtcctgcttcagttcgagctggatgtcgagcgtcgaacggccgtaatccttgtatcccttgacgagttcggcgtaggggttggtgtaggccgccccgccgccggagccgcgcatcgcgttgccgaagaggatgtgtttggtcgtcggcatcagcgacgagggatagtaggcggggaagagtacgggattcgatttcatgatcatctcgtaggtctcctgtccgctcttgagcggtccccggtagtcgtcgaacgttcccgacatgcggacgatgccttcggtgcttttcgagaggttgatgttgatgttcgaacgcacctgatacgttttcaggttgatgttgctgttgaagttgttgcgtttgtccactttcaggttgccgttgtccatgttgagcgtaccggcgatgtagtagcgggccacgttgccgccgccgctgatgttcatgttcagccgctggttcgtggtcaccttcttcatcagcatcgagtaccagtcgttggccgggtagagatagggatcgtcgccgcgggccgtgcggtcgatcttttcctgcgagtattccagcggagccagcggattgcgcgtgcgcgccgcttcgttggccagtttcatgaaggtgacggggtccgccagctcgatgtccttgttgttcatcgagaaggagttctcgaagcggagcgagatgcgggcagctccgacctctccggtcttggtcgagacctgaattacgccgttggcgcctctggcgccgtagagggccgttgcggtggcgtccttgaggatcgaaaaggcggcgatgtcgtcgggctggagccgggagaggtccgtttttgtgctctcgatgccgtcgatcaggatcagggggtccaccttgtatccgaacgaagtgacgccgcggataaagaagtcggcgccgtcggcgcccggctctccgctgcgctgataggcgatcactcccgacatgcggccggcgagggcggtcgtgaggttgcttgacggaactttcagctccttgggattgatggtttcgatcgaggagacgatgctctcctttttctgggtgccgaaggcgacgaccacgacctcgtcgatggcgtccatctccatctttacgttgatcgtctgacgggccgcgttgccgacggtgatctcctgcggtttcattccgacgtaggaaacggaaagaatactgcctgcggggacgttgttaagaatgtagtgtccgccggcatcggtcagtgctccgatcgccgatcctttgacggcgaccgtcgcgccgacgatgggcgcgccgtcggcgtccttgatcacaccttcgataactgcggactgccgggtggattgggcggatgccgcatcggcatttcccccccccc

SEQ ID NO: 12047 - DNA, 13239 bp, Unknown
  gut microbiota DNA sequence
atgatggcataacaaacgccgtgtcatttgaagcgtagaattgttcatgctgtttgggtttaagttggcttttggttaattggggttgcgccgggttttttccggcaatacaaaattagactttccgggtgtgtcgaaatagaacatttgccgatatttatagtatttttgatgcaacggccctcgccggaatcgttccggagggcctttccggcgcgtctcggctgccgtcggattcccctgtcacggctttcggaccgccggccgtttgcgccgcggagatctgcggtccggattcggcggactgcatcatttgtgcaactattagccgcaaacgtattaaatttatacgttcgatccggctaattttgtaccatgcgaaattcggaataaccgtaaacttaaaccgtaatgaaaaaaatccttctctctctggcggctgtttgctgtctgggcggcgcggcagctgcaaaacaacctctttataaaaacagaaaggcgccgatagaacggcgtgtcgaagatctgctcgcgcggatgaccctgcatgaaaaggtgcttcagcttcagaaccgcgaagccggcaagctgggtgagcttgaagaccgtttccacggcgagagtgccggaaccgtccatgaaatggggcacgacgcagccgaatgccagcgtattatcggcgagctgcaggagtatatgtttaccaagacgcgtctcggaattcccgcgctgacctgcgtcgagggcattcagggggtgctccagaacggtgccacgctctttccgcactccattgcgcagggcagtacgttcaacccggcgctgatcgaacgcatgaccgatgcctgcggccgcgaggctgcggccatggggcttcaccagatcctctcgcccgtgctcgatatcgcccgcgaactgcgctggggccgtatcgaggagaccttcggcgaggacccctatctgatcgccgaaatgggtatcgggttcgtcaggggataccagaaacaccgcatctcctgcatgcccaaacacttcgtggcgcacggaacgcctacgggcggattgaactgcgctcaggtgagcggcggtgagcgcgaattgcgcaacctctacctctatcccttcgcccgcgtgatcgccgagaccgacccgctggcggtgatgagctgttacagcgccttcgacggcgtgcccgtatcgggttcgcgctactacatgaccgatattctgcgcggagagctgggattccgcgggttcgtctattcggactggggttcggtcgaccggctcaagactttccactacgccgtggagacgagtgccgacgcggcgcgtcagtcgctcatggcgggcatcgacctcaatgtggattcggcctaccagacgctcgaagagcaggtcgaagcgggaaaaatcgatatggaatacatcgacacggccgtgcgccgcatgctctatgtgaagttcgccctcggcattttcgacgaaccttacggcgatgccgaagaggtggagcgtgtcgtgcgctgtgcggaccatgtggctttggccaaggaggtcgccgacgagagcgccgtgttgcttgagaacaacggcattctgccgctggacctcaaaaaatacaagtcgatcgccgtggtcggcccgaacagcgaccagaccgtctacggcgactacagctgggtgcgtcccgacaccgaagagggcgtgacgctctatcagggactgaaaaacgtgctgggcgacgccgtcgcgctgcgccatgccgatgggtgcgactggtggagtcaggacggcagccgcatcgccgaagccgtcgccgctgtcgagcagagcgatctggcgatcgtggccgtcggcacgcgttcgacctacttgggccgcggtccgcgcaaatcgacggcgggcgaaggcttcgacctttcgtcgctcgaacttccgggtcgccagctcgatctgctcaaggccgtgaaggctacgggcaaaccgcttgtcgtggtcttcatcgccggcaagccgctggccatgccgtgggtcaaggagaatgccgatgccttgctcgtgcaatggtatgccggagagcagcagggcaactccgcggccgacatcctcgtaggcaatgtcaatccttcgggccgtctgaacgtctccttcccccgatcgacgggaaacagcccctgctattacaattattatcctaccgaccgggagttcggcaacgaccgcggcggctcgtacgaggagcctgctctgcactacattttcgagaaaccctatgccttgtggagtttcggctacggtttgagctacaccgagtacaaatacggcaactgccgtgtccggaccgaaggagagcggatcgtcgccgaggtcgaggtcgagaattgcggaccgcgtgacggcaaagaggtggtgcagctttatgtgcgcgacatgatcagttccgttgccacgcccgtccggcagctcaaggcctttgagaaggttccggtcagggccggcgagaaagttaccgtccggctggaggtgcccttcagcgaactcatgttcacgaacgaacgcatggagcgcgtcctcgaaccgggcgagttcgaggtgcaggtgggcagctcgtccgaccgcattcatttccgggagaaggtccgcatcggctgatgccctctttctgcgaatagacgatcgggaccggttgtattacagccagtcccgatttttgattccgccgtttagcggagcggttcgaatgcgatccggacgtttccggctcccaatgcgctttcgagtccgtcgggatcgtccacgcttccgatccgggtgtagctgtacgaagtcgggaacgacttgtagaacagtaccagcgtccttgcgccgtagagcataatatctccggcgcggatagcgccgggagcgtatgccgcggttgggagattttgcggcaggtcgcaatacttttcgttgcggttcaggtcgttcatggtcgccgtcatcgggagcagggccttgaaagcccgtgccgcggcgttgtcttcgaacttgaccgtgaatgcggccgaaccgatggaaatgcgcatccggctgccggtcgaaggatcggggtccggattcgggtctgggtccggcgccgggtcaggccggggattcggcgccggagtcgccgtgccgggattcgccgtgccgtcgtccggattgcaggccgtcaatgcggatgaagcggagagggcgaagagcgtcatgctgagaatgaatatgcgtttcatggcgttgcggcttttaattttccggttcggttccgggcgatgaccgatccgatgcctgcggcggaaaagagcagtgcgcccagcagcgagctgcgcgtgccgaacccggcgatgaacagcccgcaaagagccgtgccgacggtcgtgcccagattggccgaggtcaggaacagcccgttggcgaaatcgggcgcttcgggcgcggcgtcggagatcatgtattgtccggtgttgctggccatgcctgccagaatgccgagcgcgagaattgtcgctgccgcagcgacggcgtaggctccggcggcgaacagcaggaggtaggccgcagacagcaggaccggcaggacgatcatgcagcggcgtgcattgcgggcgagcagccgccctgcaaggaggttgccggcgatattcgcgccgccgtagaccagcagcagcgcgctggccgtatcggaggagacttccgtgactctgttcaggaaatcggacatatagctgaaaaatccgaacatcgcgccgtttatcagcgtaaaggcgatgagcgaacgccgcatcacggcttttttcagcacgcccagctgcgccccgtaagagatgcgccgggcgacgggcagccgcggtacgcagagaagcgtcgccgcgagcgtcgcggcattcaccgcggcgaagaacgtcatcgccgccgaaaaggaggcgtgcccggcgataaggctggtgacgggaactcccagcaccatgcccgccgagacgccgatgaagactttcgagacggctttcggggcctcctcgctgcgcaccgacgccgcggccgtcgaaaaggccatcgacacatacgccgggtgcaggaaggcgggcagggcgcgcgccgcgagcagcaccgcgaaactgtcggtcagcgcggagacgatgttgcccgccgtaaacaaccccagcgccagcagcatgaccgtccggcggtcggtgcccgaaaacaacagcggcatcaccggggccgagacggcgacgacgagcgcgaagacgcccaccgtccatcccgcctgcggaaccgttaccccgaaagtttcggcgatctgcgggataatcccgacgacgcccatttcggtgttgatgatgccgaagacgccgaaggtcaggattgcaaccagtcttcccggactgtatgcgagccgttttttcatggtcgttccgtcttatttcaggctgtttgcaaaaaactcctccagcttgtcgaacgggatcagccccgtgcggtcgtagagatccacgtgccccgcgcccggtacgacatacagctctttcggttcggcggcccgcctgaaggcgtcctcgctgaattcgcgcgaatgggcgttttccccgacgatgaagagcagcggacgcggcgagatggtctcgatgtcgttgaaggggtagaagttcatgaacttcacgttgcttgcgagcgtggggtgcgtggtcgtccggtgcgtcgccccttcgggcgtgaactctccgcgcggcgtgcggtagaaggcgtagaattcccgctcgaccggggtggagttttccgtcagctcgtctgccgtgccgccggtgtatgcggtttccccgcccgtaaactccgcgtagcgctgttccgccgcttcggccagtatccgcttccgctgctcaagtgtcagggcgtttttcagtccgctgcggctggctgcgcccatgtcgtacatgctcaccgtggcgacggctttcagccggggatcgatcttcgccgcgcttacggcgaaacttccgctgccgcagattccgattgcgccgatgccgctgcgctcgacgaactcccgcgttccgaggaaatccgccgccgcgctgaaatcctcggcgtatatctccggggagaccgtgttgcgcggctctccctcgctgtcgccccagaatgacaggtcgatggcgagcgtgacgaatccgcgttcggccattttgatcgcatagaggttcgcagcctgctccttgacggctcccatcgggtggccgacgatgattgcgggacgtttttcgcccggtttcatctccttgggccggaagaggttggcgccgaccttcattttgtactggttcgggaaggataccttctctgcggttaccgcatcgcttcggtagaaattgtccgcatccgtttgtgcggaggagatgttgtgcgtcataataagcgttgtcgttaaaattagaatccgtttcatatttttttatcggtgatttccacgttgcaaaattacttgccgaaacgcttcgggccggtatccggattacggatgaaattacccggattacggtttttggagctgaagcgaatctgctgtctgacagccggctaccccgattacggataaagttaccccgattactgtttcgcaccgacgcccgcaccgcgtacgggaaaaagcgctatctttgcgtatggaaaaaccgagctgtatggacgaaattctgaagatcgacacgatcgaccgctacaacaaactcttcggattcgagacccgccacccgctggtgggcgtggtccggttcgacacgaccgaaagtcagggaaactaccggatgacgatgggattctattcggttttcctcaaggagacgcggggctgccgaatcaactacgggaagacggggtatgatttcgacgaccagaccgtggtcagcatcgctccgggacagaccgtcggctataccgatatcgaaggtattcccacgaagtccgtcggactgctgtttcatcccgatttcatccgcggcacgtcgctcggacggaaaatcaggaaatacaccttcttctcttacgaagccaacgaagccctgcacctgtcggaagaggagcggacgatcgtgctcgactgcctgaaaaagatcgaaatggagctgcggcacgccatcgacaagcattcgaaggggcttatcgccaccaatatcgagctgctgctggactattgcatgcgtttttacgaacgccagttcgtgacgcgcgaagacctgaacctcgatgcgctggcccgtttcgaacgactgctggacgattacctctcggagggcgtcgccgcgagggagggactgccgtcggtgcgctatttcgccgacaagatatgcctttcgcccaactatttcggcgatctggtcaaaaaggagaccggaaaatcggcgcaggagtatatccagctgaagatgatcgacgcggcgaaagagagcctgctcgacccggacaagacgatcgggcaggtggccggcgaactgggatttcagtatccgcagcatttcgtccgcttcttcagacggcatgccggctgcacgccgaatcagtaccggacgcggggataaggggcggcatgcccggccggcggctacctgccgatccggtaggccgaaggcgtcatgcccgtatggctcttgaagtatttgccgaagaacgactggttggagaaattcaggtaataggcgatctcctgaatgctcatcgtggagtatttcagcaggttcttggcttcgagcacgacgtagtcgtcgatccattcgacggccgtccggccgctggtcttgcggatgagcgtcgtcaggtatttgggcgtcaggttcagctgcccggcgtagaagcccaccgatcgctcctgcgtgtagtgtttgcccagaatattcatgaactggctgaaatactcgtcgttgcggctgcgcgccgagacctgccgctctccgctcgtttcgatgtgacgtccgatgacgcggcacactttgtaggccagcgtccggatgatcgaacgtatgacctcggcggaatagacgtccgccggcatctccgtaccctcggcgccgagttcctcgaacgaccgggtgattcccgtccactccttttcgtcgagtttgagacagggctgcttctccacgtgcaggaacagctgcgagagcagtctgatgtctatgttgatgcgcctgatgaactcctcttcgcagatcacggcgtgcagcgcgatctcctcggtcgattcggcttggatgatcgaccccggcaggtgtacgaagatcgaattctccgtgagcgtatgccgcgtcaggttcgaggtgaaggttcccgaacctttggaacagaacaggatgacgaaggcgtcgatgcgcgtcggatagcggaacaggtcgatgtcgatttcgtcctgcacgttgacgcgcgacgcgatcagacagccgtcgtagcagatgtctccgggacggcggccgcagacgtcgatcagcgtggcgagcgaaaagctctggatatccttttcgttcattttgtcgtggatttttcgtacaaatataacaatttgccggtcgatattcgccgaaaggttcaaaatcgaacgaatcgacgagtttagccgacacggcggccttttctgccgctttgcaaaaggggaactttgcatcgaaaaactgtaaaccaatgaaacgaacgattttttgggccttgctgctcattgcggcgggctgttcttctccgaaaaacacccggacggccgatccgctgcgggtgacgacgatcgtcgccgcgccgtcggccggcttcggcgcggccgtgtacgtaggttcggtcgaggaggaggcttcggcatccctgagttttcccgtcgccgggaccgtcgcccgcacgctggccgacgaaggacagcgcgtgcggaaagggcagctgctggccgaactcgattctacttcggcccggcagaccttcgacgccgcgcgggcgtcgctggagcaggccgaagacgcctgcgggcgtctccgccagctgtacgaggcccaaagtctgcccgaaatcaaatgggtcgaagcgcagacccggctccgtcaggccgagtcgcttttcgaaatcgccaagaagaacctgagcgactgcgcgctgtacgctccgttcgacggtgtggtcggcgagcggcgggcttcggccggcgagacggtgctgccgggcgttccggtgatgaacctgctgcaaatcggaaccgtcaaggtgcgcttctccgtccccgaacaggagatcgccgcgatcggcgccgacagccgcatgcggataaccgttcctgcgctcggcgaccgcacgtttcaggccgggaagatcgaaaagggtgccgtggccaatcctgcggcgcacacctacgacgtgcgggccgcgctggccaacgccgggggcgagctgctgccgggcatggtctgccgcgtggaggtttcgcctgcgggtgccgccgagcagatcgcgcttccggtgcgcgccgtacagcaggcgggcgacggaagccgtttcgtatggaccgtgcgcggcgactcggtcgtgcgtacggccgtgacgacgggccgtctggtgaacaacgccgtcgtgctggaggacggtgtccggagcggcgaccggatcgtggtggacggcatgcagaagatcggcgaaggcagtaaagtcgtgtggtgatgggacgctctgccaatatcatatcgtggtcgatgcgcaacttccgcatcaccttcctgctcgtgggctgcctgttcgttttcggcatctacggactggttcacatccccaagcaggagtttcccgaatatacgatccgtcagggcgtcgtggtgggcgtctatccgggcgctacgagcgaagaggtcgaagaacagctggccaagccgctcgaacagttcctgatgacctacaaggaggtgaagcgttcgaagaccacctccacctcgcagaacggcatgtgttacgtgatggtcgagctgaacgacgacgtgaacgacaaggacgaagtgtggtcgaagatcaagcacggccttgcggcgttcaagatgcagcttcccgcgggcgtcgcggcgctcgtgacgaacgacgacttcggcgacacctcggccctgctgatcaccctcgaatcggacacgcggtcgtaccgcgaactgaaagggtacatggacgacctgagcgaccgtctgcgccgcatcgagtcggtctcgaacctgcggccttacggcgttcagcaggagcagatctcggtatatgccgatcacgaccggctggcggcctacggcatcggcgagaaggtgctctccgcggcgctggcttcgcaggggctgaccccggcgggcggctcggtgagcaacggcgaaaccgaaacgccgatccatatcgcgccgtcgctggccggggagcgcgaggtcgcagagcagatcgtctggagcgaccccgaaggccacgtcctgcgtgtgaaggacgttgcgcgcgtcgtgcgcgaatacgacgatccggacagctatatccgcaacaacggccaccgctgcgtgctcctctcgatggagatgcgcgggggatacaatatcgtggagtacggccgcgaagtggacgaggtgctgcatgctttcatggaggaggagcttccgtccgacgtcgcggtgcagcgcatcgccgatcaggccaaggtcgtcggcgactccgtgcactcgttcctgcgcgacctgttcgtggccatggccatcatcattctggtcatgatgctgctcttcccgctgcggtcggccgtcgtggcggccgtcacgattccgctctccaccttcatctcggtgggcgtcatgtatttgtgcggcattccgctcaatacggtgacccttgcggcactggtcgtcgtgctgggtatgatcgtcgataattcgatcgtggtgatcgacggctacctcgactacatcgggcgcggccactcgcgctggtatgcggccgtcgagagcgcaagggagtttttcccgtcgctgctgctggcgacgatctgcatctgcatgattttctacccgattctgttcaccatgacgggcatgatgcgcgacttcctgacctatttcccgtggacgatcaccatcaacctgatggtttcgctgctgctagccgtgctggtgattccgttcctcgaaatcgtgatcattccggcggttcagccccgcaaggaggggcgtaagagcgttaccgaccgtgtccacgacgtttaccggcgggtgctggcgtggaccttccgccacgggtggctgacgatttcgctgggccttgcctcggtggccgtttcgctggtgctggccacgcagctgaaactccgcatggtgcccttcgccgaccgcgaccagttcgccgtggagatctacctgcggcccgacaccccgctggaacggaccggagccgtcgccgattcggtttaccggatgctgcgggccgacgggcgggtgaagtccgtcacttcgttcgtgggctgttcgtcgccgcgtttccagatgagctacgctccgcagatcgcgggtaagaactatgcccagttcatcgtcaataccacctcgatcgacgataccgaggatatcctcgaccgatatgccgacgcatgggccgaccgtttccccgaagcctacgtcaaattcaaacagctcgactaccagaacgtgccgtcgctcgaattccgcttctacggcagcgacatcgactcgctgcgcgccgcgggcgaccggctgatggaccgcatgcggcggatgcctgaactgatgtgggtgcactccgattatgagaatccccgtgcggtcgtcgatgtgcggctcgaccccgtcactgcgccgcagctgggcgtcacccggacgctggcggccgtcaatctggccctcgccgccggagacgtgcccgtaggggccgtctgggagggcgattacaaactgcccgtcgttctcaaaaacgacgtgcgccggggcgaacgctcgctctccgacgtcggggacacctatgtctcttcgcccgtgcccggcgtcagcgtacccctgcggcagatcgccgacgtcgggccggcgtggagcgagagcaaaatcgtgcaccgcaacggcatgcgctgcctgacggtcaccgccgacctcaaacgcggcgccaacgccatgcgtgtcaattcgcgcataagcgagctgatcgacaaggagctgacgcttccggccggcattgcgaccgagctgggcggagcctacgaattcgactgggagacgattcccccgatcgcgtcgggactgaccatttcgctggtcatcatcttcttcttcattctggtcaacttccgcaagttcggcattacgctggtggtcatggcttcgatgtcgctctgtctgttcggggcggtggtggggctgcggatcgccgatttcaccatcggactgacctcggtgctgggcttcatcaccctgctgggcatgatcgtccgcaacgtgattctgatgtaccagcatgccgaagacaaacgcaaggtatgccactggtcggggcgtctggcggcctacgacgccggcaagcggcgtatggtgccgatcttcctcaccaccgccaccaccgccgtgggcgtcgtgccgatgatgctgggcggaagcaccttctgggcgcccgtgggcattacgatctttgccggaggcatcggttcgctgatcctcgtcgttacgatacttccggtgctctattccaaaatctacaagtgatgaaaaaagccgtagtatttctgttcttgtgcgttgcggcggctcctgcggcggctcagacgctttcgctcgaagagtgccgcgccgccgccgtcgaacacaaccgcacgctccgcaacagcaggctggacctcgacgccgcgtcgcagacgcaccgccaagcgttcaccaattactttccgcagatttccgcgtcgggcggcctctttcaggcgcagcacggactggtgcaggccgatttcgccgttccgcagatggggacgctgcctgtttcgatggtcaagcgcggcatcgtcggctccgtcacggccgttcagcccctgttcgccggactgaagatcgtcaccggcaacaagctcgcccggctgggcgaggaggtcggacggttgcagctgcagcagaccgaagccgaggtgcacgagcggaccgatgcctgtttctggcaggtcgtgtcgctccgcgacaacctttcgaccctcgatgccgtggagcggcagctggccgagatacgccgtcaggtcgaactctcggtgaaggccgggctggtgaccaacaacgacctgctgcgcgtggagctgcggcagcaggagatcgcgtcgaaccgcctgaaggtcgaaaacggactgaaggtgtcgaaaatgctgctggcccagcatatcggcgtcgattggcgcggattcgacgtggcgaatgccgcgttcggcgaaccggaggctcccgccgcctactatgttccggtcgaggaggcgctcgaccgcagggccgaatacctgcttgcggagaagaacgtcgaagcccggaagtatgagaaacgcatggagcgcggcaaacgcctgccgacggtaggcataggcgcggggtatctctactacaatgtgacggacaagagcgtggacgacggaatggtcttcgcgcaggtttcggtgcctgtttcggagtggtggggcggcgcccatgcgctgaaaaaggcccgcatcagggagcagcaggccgaaaacgaccgactgcaggcgcgggagatgcttgccgtggagatcgaacggacgtggagcgaagtgcaggagtcctatgcgcagatcctgctcatgcggcgttcggtggagtcctcggccgagaatctgcgtcagaaccggaacttttacaaggcgggaaccgcgccgctcaccgacctgctcgacgccgagacgctttacacgcagagccgcaacaacctcacttcggcctgcgcctcctaccgcacggcgcttgccaagtatatgcgcgtgacgggacggtaatctgcattccggcggccggtttccggcatccgtgacgcccggtgtacggggttgtgcggccttgcgccgcgcgacccttttttcatggcgtacggagtgcagtccgaatgcggaaaggcggcgacgaccggcgcggggagctttccggctgttgcggttccatgaataaatcgctaaaaacccgtacggcggatgaattcggaggattgggg

SEQ ID NO: 12048 - DNA, 43901 bp, Unknown
  gut microbiota DNA sequence
gatttgtcctgagcgttttatcggtcgtgtttcgcgggcggtttttgcggcagcggtttctccgcggccgggagagggcttgcttttaaatataattttctatttttgcgatcgtggaaatatatcccgaccgctgtctcgcatccggaaaatccgaataaaatcgatgaatatttcaggggataagaatctttccgcgaaaatcaaaaacaggcgatgagcgatttagacaaacaattgatgaatgcagactctttcgacgagctgtatctggcgtattatccggccatgctgtcgtatgcccggatgtttctccgggatcagtgggccgaagacgtggtgcaggacgtgtttttcaatatctggaaaaaccgccaccggatttccacggacgatccgttgtacaagtacctgctgaaggctgtctacaaccgggcgatcaactacatctggaagcacaagcgcgacacggagtaccgctcgtggtacggttcgcagatcgaccggatggtgttcgattattacgatccggacaagaatccgatccttgccaaaatctatgacaacgacatgcggcagcagctgcggcaggcggtggacgagctgcccgacaagcggcgggagattttccgcatgcgctttttcgagaacatgtcgaacaaggagatcggcgagcggctggggctgacggtcagcacggtcgagaatcatatgtatctggcgctgaagaatctgcgcgacaaactgctctgacttccggtcgggcgtaagccggatcgggtctttttctgcaaaattttttcgcattcggattagggggtgggttgcccagctttgtattattggtagagagcaagatgctgactgccgttatacggagcgaccaaggccggagcgcatgtataaccgaagtctaatcttaaaccaatattattttgaaaaacgaacttatttataagtatttggagggaaacgcgactccggccgaagaacaggacgttctgagctggatttccgagtccgaagccaacaaagccgagttttgcgaaatccgggctttgtggagcgtgcgcgaccggaattccgtcgagaacgatccgcagcggatcctcaaatcgctcaaggcgctgcacgcccgcatcgacgcggatgcgtcgccgcaccgctccaagcgtgcgcggatcatacgctgggcaggctggagcgccgccgccatgctgggcgttgcactcgtcgtgggcggctacctcgtcggccacgacatgcacaaggcggccatggaatcgtactatacattcaccaataccggccgcaaacccgaatccctccggctgctggacggaacgcaggtctggctggcgcagggatcgaccctgagctacggcaagacgttcagtccgcacgaccgcacggtgaaactcgacggagaggcctttttcgacgtggcttccgacagggaccatccgtttttcgtgaagaccaatacggtggtggtcaaggtcgtcggcacttcgttcaacgtcaagatgtataaggatacggacgatacggaggtcgtgctcgaacgcggcgtggtcaaactccagttcggcgacaacgacaacatgattaccatgcagccgggacagaagatctactattcgtccgcttcgcacgacatctccatctccgaggtcaacgtggagtatctgatgctgctcaagtacggcatgatctcgatgtccgatgtccgtgtggccgagatcatccgcaaggtggaggagatctacagcgtcgatatagagaccgtcgcgcctctcgacgacgaccggctgtataacttcaacttcctgaagtccaatacgctcgatgacgtgctggacatcatcgagaagatgtcgggcgtcaaatgccgtcccgcgccggcggccgtcacggaatagaaacaagaaacgacttaaaccgaatagctgaatagaaacctaaattttcaactgcctatgaactaaaccctgattccattcatccgaatcatgttggcacatccgggcccggtgctgctgctttcctcgatcagtttaaaactttacagtcctaatcatgaagaaaaatttatctgtttttcggacgggatgctgtatgttgctgctgttgctgtgcaacgtctttacgttgtcggcggctgaagagctgtatgcacaacactacaatgtcaccctgtccctgcgaaatgcaaccgtcaaggaagcggtcgatgcggtgacccggcaaaccggaattgcattttcgtacgaatcgtcggtcggcgtcatgccgctcggcaatgtggaaatccgtgtggacggcggcgctgtcgatgccgttctcggtccgctgttcgccgacaaaggcatcgcgtggcaggtcgtcgacggcgtcgtgatcctgacccggcaaaactccccccccccaatcggattccggtcgtaggctgaccgtcaggggccggataaccgccggcgccggcgagtcggtcgtcggtgcgacggtcatggtcaaaggcacccagacgggcgtctcgtccgacgttgagggcaattacgaaatcgtcgttcccggtccgggttcggtgctggtattcaattatctgggttatcagcctcaggagatcgcggtcggcaaccggacgcagatcgacgtgcggctcgctgaggacaacaacgtgctggacgacgtggtggtcgtcggttacggcacccagtcgcgccgcacgctgaccagcgccgtctcgaaggtgagcggcgccgatctggaaggcgttccggtcaattcgatcggcgatgccctgaaaggcaaggttccgggcgtacgcgtctcgacggccaacaaccagccgggcagcgatccggtgttcctgatccgcggcggttcgtcgatcaaccagtccaatgcgccgatcatcatcgtggacggcgtccgccgcgagatgaccggactcaatacgaacgacatcgagtcgatcgaaatcctgaaggacgccgcttcggcgggtatttacggagccagcgcgtcgaacggcgtgattctggtgaccaccaagaagggcaaccgcgccaaaggtccccagattacgttcgaggcgcaggccgcatggacctcgcccgcgacgaaattcgacctgatggacgcccgcgactatgtcgtcaccatgcgccgcgcgctgaacgactgccccggatatacctacggacagcaggtgctcacgggcgccaactcggccggtatcggcaacggcgattcgtcgatctggacgacccgctacctgcaggagggcgaaagcgtgccccgcggctggagttcggtggtcgatccggtcgatccgtcgaagatcatcgtttttcaggataacgaccagcagagccagtggttcgacgactcctactggatgcagtactacgtcggcgtgaacggcggcagcgacaaggtgacctacgccgcttcggccagctacatgaaagacggcggcatcggcatcaataccgatttctcccgttttacgtttcacggcaacacctccttcaagatcaccaagagccttacggccggtacgaccttcgactactcggagaccagcggcaacgagatcccttcgagcggcatcggcaactactggacgattctgggccgcggcatgttcatgcccgccacccaccgcgactacctcgaagacggccagcccggtcagggcaccaacagtacgaccatctcggcggcatggttcgaccgctactataccaacaactatgtgacccgccgctccacggccaacttcaacctcaagtgggacattgtcgacggcctgtcggctttcgcccagatcgccaaccacaactcctacaagaacagctaccagtatctggccggcaacgccatcagccagacccgccagacctacgaagggtggtcgcagaccaaccgcctgagttttcaggcgcacgtcgattacaacaaatccttcggcgaccacaatctcagcgccatggccggatacgacttcctcaagcgaaagatcaacggcatgtcgatgaccgtgcagggcgccgagtccgacaagaccccgacgctgggggcgggcaccacgcctaccgcatggaccgacacccagacgccgtggtgccagatctcctatttcggacgtctgaactacaactacaaggagaaatacatgctgggcttcaccatgcgcgccgacggttcgtcgctcttcgccaaggataaccgctggggctatttccccgccgtttcggccggctgggtcgtttccgaggagaagttctggaacgtcgagaagttcaaccagctgaaactccgcctgagctacggtctgacgggtaacaacaacgtcgattattacgacacgctcggcgcttacagcgtgacgggcatctatgccggttcgggcgctacgctcgcttcgacgctgcccaacctcggcctgacgtgggagaagaccaagcagttcgacatcggtctcgacatggcgttcttcaacaaccgcctgcgcgtggccgccgactattacagcaagaagtcggaagacctgctcttcgacgtttcgctgcccgatacgtcgggatacggctcggccatgcagaacgtcggttcgatccgcttctacggtctcgaattcgaaatttcgtcggtgaacgtcagcaccaagaacttcagctggacgaccgacttcacctactcgttcaacgccaacaaggtgctgtcgctgcccgacgagtattactataaggatatcgacggcaaagacgcatggcgcatcggcggctatacgatgtccgagtcgggctaccgcttcggcggcacggccgtcggcgagccgctgggacgcatctacggctacaagacctcccatatcatcgaatccgaggcgcaggccgacgccgcgctttacgactccaactcgcacggctaccgccgttcggacggcctgtcgatcgccggacgcaaggacgtgggcgactacgagtggaaaaaccgcgcggggtcggcgcttacggccgacggccgcgagcagatcaacggcgaggacatgttcctgctgggcaatgtcgtgccccattcgacgggcggtatgaacaataccttcaaattcaagaacctgaccctttcggtctacctcgactatgcgctgggacattcgatctacaactaccagtatacacgctgcttccagacctcgatgggcaactgcaactggaatctggtctacgatgccctgaatacatggcagaagcccggcgacgacaccaagttcgcccgcctgactcccaacgacgccgacggcggcaaccgcaactactcgcgcatttcgaatatcaacgtgcagaaggccgattacctctgcctgcgcgacgtgacgctctcctacgatctcccgctgcgctggatccgcaaggtcggtctgggccgtctgaccgtttccgtgtcgggcaacacgctctgctactggaccggcgtcaagggtatttcgcccgaatccgcctcggtcggcagctcgacgggcatgtacagcgttaccagttcgagcgccacttcgttcaacaactatcctccgacgcgcaaggtgctcttcggcctcaaggcgaccttctgagaatgcggatgattcggtgatctaaaaacaagaatgctatgaaaatatatggaataatcctttctgttctgggggccgcctcggttgcgctgagcacttcctgtcacggggaactcgacgtcacgcagtccgacaagctcaacaccaccaacatgtggaccagcgagagcgacgccctcaccgccactaccggcatctactaccgcctgcggcaggcgttcgcccaaagcaaggccaatcctttcttctggggcgaactgcgcgtcggcccggccatgtggggcaagggcaccggccgctcgctgtgcgacaacgacatgctggacgtcatgctcaacaccctcagcgcctccgacgcctcgaccgactggagctatctctacaccaccatcgaccagtgcaatcaggtgctcaaatacgctcccggaatcggcatgtccgaggacaatatgaactactgtctgggcaacgcccgtttcatccgggcgtactgctacttctggatcgcccgcgtgtggggcgacgctccggtgattaccactccgaccgagggaaccggtgaggcgatctatccctcgcgccatccggtcgccgaggtctatgcccggatcgaagacgacctgaacgctgcggcggggtatatcaggaccaatgcgaagggctgctactatgcgacggccgacaacgtcaatctgctccgtgccgacttcgcgctctggatgtatgcggccggcggcggcgacggctacctgaccatggccgagacggctttgggcgcggtgcagtcggccggcctgctcgaccggttcgccgatgtgttcagcatctcgaacaaaaagaacaaggagatcgctttcgccctgcatctggagaacggcgagtatacgtcgggcagctacttctcctacttcatctggggcagcacccagatcaaggccgagtaccgcaacgctcccgacggggtgcccgtcagttcgaaccagtggttcctctactcggacgacttcatcgggttcctcaagcggagcaaggagctgggcgaccagcggaccgatgtgacctacatggagcgcacgggcgtcagcgatatgtacgaagtcatccagtggcccaacaagctcatcggcaatatctctacgggcacgatggtctgggagcaggatttcatcctctaccgctatgcgcagtattacaccatgctggccgaactgcgctaccaccggaaggactattcgggagcgctcacggccctcaatacgctggcgcagcgcgcctacggcaaagcgaatttctataccgactcctcggccgcggccgtccggcaggcgctcgtggacgagaacctcaaggagttcgccgaagagggcaacgtctatttcacgctgatccgtctgggggcgatccatgattataatccctaccgctatgtggacgggctgggacagtgcggcatcgacacgtcgcgccccaaccagctgctgatgcccgtgtcgaagaaggcgatgaacaagaacaacaagatcacgcagacacagggctggtcgtaacggtgtattgtttaatgaaaaaaagctgactcagaatgaaaacattacgaatgctatatacggcggcgctgctttccgcagccatgctgctcgcgggctgttattcgaccgataccgacgacgacctgctttcgacggcgacgctcatcagcatctatccctcgacggtctcggtcggcagcgccgccgcgacccagaatgtggtcgtcacgctcgccccgaagtcgaagcggaatctggactggtcctgttcggtccagtccgcatgggtgaccgcggtccgggaaaaggtccccggcgaaagcacgggaaccgtttatgaggacgccgttgtcctcgccttcctcgaaaatacggcttacaaacgtcagacgacgcttacgatcacggcctccgacggcactgtgctggaagtcccggtcgtgcagaagggcatctatgccgacgcctatgtgaaggccgcgcccgaatcgctgaccttcatggccgagaatccgcagcccgctgccgttgcgatcgacaccaatatggacacctttgcggccgtgtccgattccgactggtgtacggtcgtcgataacggcgacggcacgataacggtgacctgcaccgaatacggcgacaatacggcggaccgcacggccgaaatcaccgtcacggccggcacgcccgacacgagcgaagcccggacggtcattcccgtcacccagctgcgcaaggacgtctactgctacctctacggcagcggcgtgcccaagtacccgacccgcgagaagtggggtcagatgaccaaactttccgatcgggtgtatgtggacagcgtctatgtcaagaacggacgtttctcggtttacacgaccgaaggcgatacctaccacctcgacggcgccggcaatctctcggcggccgaaaccgacctgacggtcgatgtggccggactgcggatcgttacgctcaacctgaacgagaagacctattcgatcgagcgcatcacgactcccaactgtctacccgacagcgaagtggcgaaatacgcgacctcgacctacacggccaacggccgcaccaaggtctggatgcgcgcgggtctcgactggaacggcggcgagaatatcggcggcatcaagctcggcagccgcatggtctccgatgcgaacaacgtcggtggctatacgtcgaacgtcagcagctacgagacggtccgtgtgagcgattacgacgaagtcgagagcggcggcaaggcgcagggcgaagtggagatgtccgccaaatacggccgcatctatacgctgaccgagttcctgacgggcaccccgaaggccgccgttgagctggcgcgcctgcttacggactggcctgcggagtaccgtcccggcagtacgttcgttgatgccgtcggcaacgatatccccgtgagcagcgtgaagtcgcttgcctctgccgatttcgagaatacgccgagtctttcgatgcagattcagggcatctgtccctacggctggcatgtagccaacgtgcaggacttctacgacatgctctgcgccgcggccgcagccaagggcgtgacgccgaatccgctcagcgccatgatcggaaagtggagcgtgcccgatgtgctgcgttcggccgaagggtggagtgcggcgccgacgcgccacgcggccgccgatgcgttcggattcgacttcttcccgcagggccgccggctgttcaagtccgggtatcagtattatgcttcccgcggcgagatgttcatctgccatccgggcggcttgagcagtggcgtctaccagtgctggcgtatcaatgcgctgaccaacaatgccgcggatctgaccgtcagcaccacctataatatcggcgactgctcggcgtcgttccgctgcgtcaagaattacgagaatttttaaggaccgaccggctgcggggcatacccgccctgcggccggatcttaacaacgaatctgaattatgaaagtactgaaactgctcctgctgtttgcgatgggcgcttccctttcgctggcaggctgcgacgacgattacctgtacccggtcgaatatcccgtgtacgatcccgacggcggttcggataacggcggcggcgatgaaattcccgttcctgaaaaggtgaacaacaaggtcgtcgcccaccgcggcggctcggccgaggccgggaccgccaaatatcccgacaactcgatcgcttcgctcagttacgcaatcagtctggggtgttacgcctcggagtgcgatatttactggactgccgacaacaacgtcgtcgtcgcgcatgccgccaacggctgttatgtgaacaacctcaagccgtgggaacacacgctcgacgaactgcgtgccgcgggcaagctctccaacggcgagctgctgccgacgttggaggagtttatcgacgtggcgctccatgccggaacgacgcggctctggctcgacgtgaaacggatcgaggtgggcggcgcgacctccaacacggccgagtcggtcaaggcctgctcgcgggcctgcgagatcatcagggagaagaaggcccagcatttctgcgagttcatcgtttcgggcaatgccgccatctgggcgggatgttattccgcggcccagctggccggcatcaaggtcggctggatgagctactcggcgccttcggcctataagtcctatctcgatccgtgggcgaacctcgactactcgaacttctttgccggcggcgccgaagtttcgaatccgaagtacccgctgcagagctacctcgacgccggtgtcgcgctgagcgtctacaatgccgatacggaccccgaaatgacctatgtcctgaaatattaccccaagatgaaggccgtatgtacgaactatcccgccaaactgctcggcagaatcgggtcggaggggctgtagtgcgtcgcacccgaatttttacgggagtctttatgacagaaagtgagccggaccgtccggctcactttccgttttgcgcccgctccggaagccgccgcgcggagagtttccatggtaggatctgagatttcccggaccgcagatttcccggactgcggaataaaataatttggaaagtttgtaatgccgggcatttgttttaattttgttcaatccaaaattacgacgatgcaacctcggaactttcttttctccttcggattcttgtggaccgtgctggcgtgcactcttttgccggggtgtgccgaccgtccggagtattcgctgcagaccgaggcggcattggaacggctcgacgcggaactctccaacaagccccgctaccagcagtggcggcaggagcaggccgacgcgctgcgcagccggatcgacgacggactgccgcccttggagcgtgccgaacggctctttgccgtcgcgcagatttacgtgactttccacctcgattcttcggcttattatgtcgaacggctctaccggctggccgagcggaccgggtcgcggcacgtgcgccgcttcgccctgctgggcgacatcgacgtctggctggggcgggggcaggtcagtctggccgaggagcttttccggaagatcgatacggccggtatgacgcccggcgaatacagggcttggcattcgcgctacagttcggtggcttcgcgccgctacgacgaagccgcggattcccttcagaagagggcgtggggcgatacgctttcccatatcaggaagctctcggtgccggggtgcagcgaccagacccgtacgcgcatggccgccgcgcggctcagcgaaacgggtcgctacgacgaggctctgcagctgctcgaaccgctgacggccaaaaacctgagccaccagaatttcgccctcgtctactattcgatggcgcatatcgccaaggggcagggcgacgaggaccggatgctctattatctggccgagtcctccatatccgacctgcgcgccggcacccgctcctattcgtcgctgtacgatctggccctcgaacttttcgaccgcaaggattacgaccgggcgacagcctacatgggttcgaccttcgacgacgcgatccgctgcaaatcggtgacgcggattcccaactcctcttcggcggtggtgaagatcaacgaggccgtgatttcgaatatcgcccagcagcagaagctgatgtcccgcacgatctggctggccgggattttcctgatcgtgctgatcgcgatcctgtggttcgtcctttggcagcaccgccgtctgcaaggcagtcacgaacagctgatccggatgagcgacctgctgcgcgagaagcacgacgaactgctgaaaaagaacgaccatatccgcgacatcaacaacgcgctggtcgattccaaccgcatcaaggaccgctacgtctgccattatatcgacctttcggtccattatatcaagcagatagacgccttccgccgcgaagtgtgccgcatcgccaagaccaagggcgccgacgaagtcgtgcggcgtctcaattcgtcgcaggtgatcgacggcgagtaccagaaattctaccagtcgttcgacagctcctttctggatatcttccccaactttatcggacaggtcaacgagctgctgcaacctgagttccggtttacgccgcgctccgattcgtcgctgactaccgagctgcgcattctggccgccatccggctggggattaccgacagcgggcatatcgcctcgctgctcaactgcgcctcggcgacggtctatacctaccgcaccaagctgcgcaatgcggctctcgaccgtgacaatttcgaggaacaggtctcgaaaacagggttgtgacatgtcgggagtctatataatccggggtttgggcgtgttttttatttttctgaaaatcagttgtatatagaccgatatagttctatatagttcgatatgtacgctggaaaactcataaaataaaggtaactttgtcttgaccgtccgacgcaggccctaagcgtgtctgtcctccggacggcgcccttcgccgcggcctgccgccgggcgcgggacgatgccggagccgacccctccggatgaaggccgacaccaatatataaaagaaccgataaaccttaaacttatgttatctcgatccaatctttgcagcggactcgcccggacgtgcggtttcgcgctgctgcttgcgacgggcgtttcgtgcgcgtcgccccagaatgtgctcaccgaagccgaggccgccgacggctgggagctgctgttcgacggcaagacgctcgaccagtggaaagattacaacggcgattcgctcacgcagccgtggcacgtcgtggacggctgcattcaggccaacggcgacggcagcgacctttcgggctacatcgtcaccaagaaacagtacgaaaacttcatcctcgactgggactggaaactctcctacggcggcaacagcggcatgctctaccacgtgctcgaagatccctatttcaaggtcccctatgtgacgggtcccgaataccagctgatcgacaacgacggctgggaggccgagaacgctccgaccaaacttgaggagtggcagcggctgggcgtggattacgccatgcacctgcccgatcccgattcgatgttcgtcaacccgcagggcgagtggaacaactcgcgcatcgtctgcgacaacggccatgtcgagcactggctcaacggacacaagatcctcgaattcgatgcctacaccgacgactggttcgcccgcaagaacagcggcaagtgggagactgctcccgaatacggactggcccgccggggcgtcatctgcctgcaggaccacggctatccggcctcgttccgcaacctgaagatcaaggagctgccgcgcaaggcgggccgtgaagtcgagcttttcaacggaaaagacctcacgggctgggaagcctacggcacggagaagtggtacgtggacaaggagggcaacctcgtctgcgagagcggtcccgacaaggagtacggctatctcgccacgcgcgaatattacaacgacttcgacctgacgctcgaattcaaacagctcgccaacggcaattcgggcgtcttcttccgttcgttcgtcgagccgcccgtgaaggtccacggctggcagtgcgaggtggctcccaagggccacgacacggcgggcatttacgaatcctacggccgcggatggctggttcagattcccgacgagaaggagaacatcctcaaggagggccagtggaatacgctgcgcctgcgggtcgagggcgaccgggtgcagacgtggctcaacggcgaggagatggtggacattaccgacgccaagatcggcgccgcacagggccgcattgccctgcagatccacgacggcggcgggatcaaggtgcagtggcgcaatttccgcctgacgactttataaactactaacattccgataaacatgagtacctcccgtagagattttctgaagacgctgggcggcatggcgctgctgacgatcgtcccgcgccaagtgctcggcggcccgaagttcaccgctccgagcgaccagctcaccaaaggcatcatcggcgtgggcggcatcggcaagagcagctaccacttcaccagcaacaaggactgccggctggtggcagtctgcgacgtggaccgcaaacacctcgaaagcgccgttgcgctgggacagaagaagttcggcgagacgctggaagcctacagcgacttccgccgcctgatcaccgaccccaatatcgacatcgtgcatatcgccacgccgccgcactggcacggcatcatggccgtcgaggcggccaaggccggcaaggacatctggtgcgagaaaccgatgacgcgcaccatcggcgaaggcaagcgcgtagccgaagccgtccggcgcaacaaccgcatcttccgcctgaacacttggttccgcttcaaggataccttctatggtctcggcacgacggtcgagccgctcaagaagctgatcgacagcggcctgctgggctggccgctcaaggtgaccatttcgggcaccaccggattcacgtggaagttcttctgggtgggccgggaaaacctcgctccggaacctgttcccgccgagctggattacgacatgtggctcggtccggcgccctacaaaccctacaacaaacaccgcgtgcacagcaccttccgcggctactgggactatgacggcggcggtcttaccgacatgggccagcactacatggaccccgtgcagtacctgctgggcaaggacgagacgtcgcccgtcaagatcgaggtggacgctccgcagcagcatcccgacgccgtgggcatctggcgtaaaatcgtctatacctacgacgacggctgccagatcgtcctcgaaggcgagggcttcgaaagcgagggcgacacgccctatatcgaaggtccgctgggcaaggtctacaagggtttccgctgcaccattcccgacgtgatggagaaactggccgagatgcccgatcccgaaccgcagaacaccgattttctggagtgcgtgcgcacgcggcgcaaattcgcgctcgacgagcagatcggtcaccgcagttcgacgctcgtgaatctgggcgcctgcgccctgcggctgaaccgcaccctgcacttcgatcccgacacccaactcttcatcggcgacgatgccgccaaccgactgatcgatcagccgatgcgcggcccgtggcatatttagcacctgttaccatgaaaaagataatcacacgactgtttattctgggcgccctgatcgccctgctgcccgcaggggttgccgcccagcagctcgacgcccggcagcgcaacgccgaaaccgtcgttgccgacggtctggcccagcttccggccgccacgcccgccgttttcaacgaagtgatgggcgaacttgccgctacgggaagcgccggtgtcgaaatgatcgccggcatgctcactcccgccgacaagggtaagaacgcgacgctcgaatacgccctgaacggcatcactgcctatgcgaccgcccccggaaacgaagccctgtgcgccgatgtccgcaagggactggttcgggcgatcgaacgctgcgccgacaacgccaaccgcgctttcctcttctcgcagctgcagctctgctccgcggcggaggacgccgcatggatactgccttatctggacgactcctatctgtccgactatgcgatccgtgcgctgatctctacgcccggcaccgagccggttctgctcgccgaggcccgcaaggagggtcttgcggccgaacggaaacgcgcgctggcctatgctttcgccgaaaagcggatgacgcaggccgaacccctcctgctgggatggctcggcggcgccgacgcccggacggccgaacagatttacaatgcgctggccgtctgcggttcgcgcgcttcgctcaaaccgctggccgccgcagccgccggggccggttacggctgggataacaccggcgctgccgatgcctacctgcgcctgcttgcgaacctcgtggccgcgggagacgcccagccggccgtgaaagccgccaagggcctgctcaagtgcgaccgccaatacgtgcgcggtgcggctctcgcggtgcttgccgatgcgctcggcaccgaaaaggcgatgccttacgtgctggccgccgtcaaggagggacctgccgaataccgctatgccgctttgcagacgctcggcaagggcgacgacgagatctttgcgcgggttgctgccggcatgccgcgctatgacgccgaaacccggaccgcggtgctcgcatggctgggtgactgcggcgccgtgtcgcagagcggtgtgattacgggcgccgtgacttcgtccgacgaccgggtcgcacgggccgccatcgaagcttcgggccgcatcggcggcgagcaggcgctcgcggcgctggtctcggcgctcgaaggtcctcatgccggagctgccgagaaagccctgcttgccttcaacggccgcatcgacccgatggtcgaacgactgcttgcgcgggacgacgccaaggtgctcgttccggccctcaggctggccgccgcacgccgcatgaccgtggccgcggaccgcgtcttcgcactgctggagacttccgacaagcaggtgcgcgaagccgcctatgccgctctgccctatgtgaccggacccagccatatggaccgtctggccggactgctcgatgccgccgatggacagcatgcggcgcaaatccagaccgcgctgatccgcacttcggcgcagcttccggccgacaaacgctacggcgcgatcgccggctacatgcaggcgtcgaaaattccggcgcgctattatcccgtgctggcgcagaccggtacccccgaagccgtcgccagcctgctggccggattccgcgagggtgaccgcgaagccgctttcgccgccctgctgacggtcgaaagccctgcgatgaccgacatcctttaccgcatcgccgccgaaaatccggctctggccgaccgcgccctgatgcgttatgccgacctctgcgccaaacagcccgcgactccggtccgccgctgccagctctaccggcagggactcgaactcaaaccctcggccgctgtgcggaacaaactgctcggctaccttgcgggcgtccatgaagtgcccgccctgatgctggccgccgactacctctccgaccccgaaaccgccggagctgccgccgcggccgtgaagacgatcgtcgccaagagcgctccgatgccgggcggcgaggctgtccgcagtgcgctggagcaggcccgcgaggtctacagggaactggccaaatccgacgccgacgcgggatacgccgtcgatgagatcaccggactgctcggcaagatccccgctgcgggcttcgcccttcttccgactgcgggtctcgaaggatggaccgccgtgaccgccgatcccgccggtgagcggaaactttcggcccgccggatcgccggcctgcgcaaagccgccgccgaagcgatggccgcgaactggagcgcggacggaaacgccctcgttttcgcaggcaaggctccgagtacgatcggtaccgaaaaggaatacgagaatttcgaactctggctcgaatggcgttccgaaggcgaagccgggcttgccgtgcgttcgatgtcccaaatccggctgggcggagcggaaggcaccggtctgaagacgctggggcagaccgataccccggccgccgctgcggacaacgctcccggtacatggaatacgctctacgccaaggtcgtcgatgaccgcatcacgctgatcgagaacggggtgacgctcgccgagaacgttgtgctgacgaacccctgcgcacccggcgaaccggtctgcgtacgcggccgcatcgaactgtcgggtctggcggctcctgcctgcttccgcaacctctacatcggcgaactgccctcgacgcctgttttcgaactttcgcccgaagaggcggcgcagggctacgaagtgctcttcgacggccgttcgctgcacaaatggacgggcaacacggtcaattacgttccgctggacggcacgatcgacgtgaccgcctcctacggcggatcgggcaacctctatacggtcaaggagtacggcgatttcgacctgcgcttcgagttccgcttcctgcgccggggcgtcaacaacggcatcggcatccgtacgccgatgggcgtggacgccgcctatcacggcatggaaatccagattctcgaccacgacgcgccgatctacaagaacctgcgcatctaccagcagcacggctccgtctacggcatcatcccggcgcaggaacacgtcgtgttcggcgatctggggacgtggaatacgatggagatacacgccgtgggcgaccgcattacggtcacggtcaacggccgcgtgatcctcgacggcgatatccgccaagcctgcaagggacacaacgtctcggaggacggctcgaagaagaatccctataccgtggacggcaagaaccatcccggactcttcaataagaaaggccatctcggtctgctgggccacggtgcgggcatccagttccgcaacctgcgcgtgctggacctgagcgccggccgccaatagacggcggagtccgcctcccgtgcgggtgatcccgcacgggaggcggactccgcacggatgcggcgcgggccgcaattgtgaaacgcaaaaactgcaagactatgtttataccctgtatgatcggatacggccagctgctgattatcgtattcgtcgtgatactgctcttcggcggcgcgaaaatccccgaactgatgcgcggcatgggccgcggcgtgcgggagttcaaggacgccatgaatagggactattcgtccgaaaacaagaagccgaatccggcggatgtccccggagacaaaccggcggataaatagtccggagcacggcgcgaattccccaacgaaccgatatgtcgaaacccaacgccggaaccgaaagcgcggagatggacttctggtcccatttcgcggcgctgcgcccccatttggtacgcggtgccgccgctgtcgtcgtgatcgccgtcgccgcatttttcgcccggcacttcctgatcgacgtggtgcttttcggccccaagagcgccggtttcccgaccaaccggctgctgctggagaccggacacggcctcgccgcgctctgcggctggatcaatggtctgacaggactttcgctgagcgtcaatcccgaagcgttcgacgtctcgaacctcgatttccgggttatcaataccgccatggcggggcagttcaacctgcacatgaaaatctcgttcgtgacgggtctcgtgctggccatgccctacgtcctctgggagttctggcgtttcgtgaggcccgcgctcacgcagcgcgaaatcgccgccacgcaccgcttcgtattctgggtctcggcctgcttcttcacgggcctgcttttcggctatttcgtcatcgtgccgctctcggtcagcttcttcatcaattacgaagccagcgcttcgatcgtcaacatgatcgacgtgaatcagtacctttcgaccgtcatcgtcgcatcgctggcctcggcgctggtgttccagctgccgctgctggtctacttcctgacccgtatggggctggtctcgtcgtcgtttctgaaacgctaccgccggcacgctttcgtcggcctgctggtgatcgccgcgatcatcacgccgcccgacattttcagcctgattctggttatcatacctctttactggctctacgaacttagcatccgtctttcctcccgcatcgaacgccgcgatgcggcggacggcggagccgtggcagccgctgtaatttccgcaacatccgatgaaaactgaaacaaccttctcccggcccgtgcggatcgtcgtgatcggcgccggcaaccgggcgcataaatacctcgaatacgcccgccggaatcccgaacagctccggttggccgcgatcgtcgaagtcaacgacctgcgccgccgtgccatggccgacgccttcggacttcccgacaagtattgctacgcccattacgacgacttcttcgccgagaggctcgatgccgacatggtgctgatttcgacccccgaaaacgcccatttcgacccggccgtgaaggctatcgacgccggataccacgtcctgctcgaaaagccgatcgcccagcgtctcgacgaatgccgcgaaatcgcccggcgcgcccgccggcgcggcgtgctggtcggcgtctgccatgtgctgcgctaccatccctatttcgccaagatccgcgagctggtcgcttcgggccggttgggccacgtcgtttcggtcaaccataccgcttcggtcggactcgaccgggccacccacagctacgtgcgcggcatcttccggcgcgagagcgaagccaatccgatcctgctggccaagtgctgtcacgacatcgacttcctgctgtggctgacgggttcgcactgccgccggctctcgtcgttcgggtcgctgcgctggttccgtgcggagaacgctcccgaaggctccgccgcccggtgtctcgactgccggatagaatccgaatgccccttctcggcgcgcgacctctactacgtccgccgcgactgggtctcgaacttcgacgtgccgcccggagcgacgctcgatgcgacgattctggaggagctgcgcacgggaatgctgggccgctgcgtctatcgttgcgacaacgacgtggtcgatcaccagctgctttcgatggagatggacgacgaggtgacgatgagcctttcgatggagatgttcaccaacgacgacttccgcaagacccacatccggctgacgggcggcgagatcgacggcgacgaacgtacgctgcgggtccgcaggttccgcggcggggatgccgagacctatgatttctcggacatcgccggacagcccttccacgccggggccgacctgcagctgatcggcgatttcatccgcgcgctccgcgacccctcgcggccgttcctcaccacgatcgacgattcgatcgagagccaccgcatttgctacgccgccgaacgcagccgccggacgggagagacgatccggatggatgccgcagaatgatttgcttcgagaagaccggaattccggtcttctcccgttttagcattaactttgctacctttgtccgaaacatctccgccatgcaaacccttttcttctggatcgactcggtcaataacgtgctctggtcttatctgctggtcgccctgctgttaggctgcgccgtatggttcaccgtgcgtacgcgcggcgtgcagttccgcatgctgcgcgagatgctccgcgtgctgggggagtcggcgggcggcggacggcggtgcgagcggcatgtctcgtcgtttcaggccttcgccgtctcgctggcgagccgcgtcggtacgggcaatctcgcgggcgtcgccacggcgatcgccgtcggcggtccgggagccgtcttctggatgtggatcatcgccctgctgggggcttcgagcgccttcgtcgaatcgaccctcgcccagctctacaaacgccgcggcagggattcctatatcggcggtccggcctattatatggaacggggactgggccggcgctggatgggcgtggtcttcgccgtactgatctccgtcacgttcggcttcgccttcaattcggtgcagagcaacacgatctgcgccgcatgggagggtgctttcggcttcgaccaccattgggtcggcatcgccctgacgctgctgacgctgggtgttatcttcggcggcatccaccgcatcgcccgcgtgagcggagtggtggtcccggtcatggcgctggggtatatcgcccttgcgctgggcgtggtgctcttcaatttccggcggctgcccgaagtcgtggagctgatcgtcgccaacgctttcggctgggagcaggcgatgggcggcggcgtgggagccgcgctgatgcagggcatcaagcgggggctgttcagcaacgaggcgggcatgggttccgcgcccaatgtcgccgccacggcccatgtctcgcatcccgtcaagcaggggctgatccagacccttggggtcttcaccgatacgctcgtaatctgcacctgcacggctttcatcatccttttcggcggcgtccccgacgcatcgctgtcgggcatccggcttacgcaggccgcgctggtcagcgaaatcggccccgtcggcagcgtcttcgtcgccgtggcgatcttcctcttcgctttcagcagtatcatcggcaactactattacggcgaagccaatatccgcttcatcacccgccgtccgggcgcactgaccctctaccggctgctggtcggggcgatggtgctgttcggggcccttgccacgctcgatctggcgtggagccttgccgacattacgatggcgctgatgaccctcttcaacctcgccgctatcctgctgctggggcgtcaggctttcctgctgctggccgattacgtcgcccagaaacggcagggcatcaaaaatccggtctacacgcgtgatcggattcctgagttgaaagacaaggcggagtgctggtagcaattcagcaggccgccgccgaagtcggccgggggcgtcagttcaccaccacattcgcgaaatattcgcgcagcagcgccgctgcgcggtccagctgttccggcgtattctccctgacgtccgagagcttgtactcctttcccatcgcttcgtatttgtgaactccgagcgtgtggtagggcagcagctcgacccgttcgatctgtctgtagccgccgagccgcccgcccagcgtgcggatgtcggcttcggcgtcgctgtagcccggcaccagcacgtagcggagccagaagggtttgccgtgttcttcgagccatgccgccgtgcgcagggtccgggcgttgtcgcgcccggtgagcgcgaggtggcgttcgggatcggcctgcttcacgtcgagcaggatcaggtccgccagccccagcagctcttcgaccgccggattccagatgctgccgttcgtgtcgatgcagacgtggatgcccgcttcccggagcctgcacaccagcggcgccagcgctgcggcctgaaacgtcggttcgccgcccgaaaaggtcacgccgccccgccgtccgtaaaagggcttctggtccacggccatgcggagtatctcgtccggggacgtgggcgtgccgccgcaggcgtcgatcgtgtcgggattggcgcagtagagacagcggaaattgcatccctgcaggaaaacgacgagccggagtcccggcccgtcgaatgttcccatggattcgtaggaatgtattcgaagcatagtctgaattttgtcgccctgatcgcggttgatcggcgtaatctacggcctgcggccgtatttataaatccgaccccaccccgaacccctcccttgggaggggcttgtatccgcctgcggcggaaattcggcgtggcgcggcagtggcggccgggaatttacatccgctcgtggaaactgcggctgatgacctccagctggtgttcgcggctcagcttggtgaagttcacggcatagcccgacacgcggatggtcagctgcggatagttttcggggtgctccatggcgtcttcgagcatcgcgcggttcagcacgttcacgttcaggtggtgcgcccccttggtgaagtagccgtcgagcatcgtcacgaggttctcgatacgctcctcctgcgtcgggcccagcgatttggggacgatcgagaaggtgttcgagatgccgtcctgcgagtcgcggtagcggagcttggccaccgaggccagcgaagcgatcgcgccgctcttgtcgcgtccgtgcatcgggttggcgcccggagcgaaagccacgcctttggcgcgtccgtcgggcgtcgcgccggtcttcttgccgtacatcacgttcgaggtgatggtcagcagcgagagggtcggacgggcgttcttgtagacgggcagcttcttcagctcctcgctgaaatagtacacgaggtccacgcccaagtggtccacccggtcgtcgttgttgccgaagcaggggaattcaccctcgatgtcgaatccgtcggtgagcccctgctcgttgcggcgcgccgtcaccttggcgtatttgatggccgagagcgagtcgagggcgatcgagagaccggccacgccgtaggcgaggttgatgcgcgggtcggtgtccaccagcgccatctgggccttctcgtaataatatttgtcgtgcatgtagtggatgatgttcatggcctcgttgtagacgcgggcgatctctttgagcaccatcttgtagttgcgcatcacctcttcgaagcgcagcggaccctcggtgagcgccggaatgcctttgaccatcagcgtgccggtgttctcgcagcggccgccgttcagagccagcagcagggccttggccaagttgcagcgggcgccgaagaactggatctgacggccgatgtcctgatacgacacgcagcaggcgatgccgtagtcgtccgaatggcgcacttcgcgcatcagctcgtcgttttcgtactggatcgagctggtgtcggccgaaaccttggcgcagaaatccttgaatccctgcggcaggtcggggctccacagaatcgtgaggttgggttcaggcgacgggccgaggttgtagagcgtctgcaggaaacggaacgaggtcttggtcaccttcgtgcggccgtcgttgaagcgtccgccgatggcttcggtcacccacgtcgggtcgccggcgaagatgtcgttgtaggactgcattctgaggtggcgcaccatgcggagcttgatgacgaactggtcgatcagctcctgcgcgaacacctcgtcgatgttgccgtgggccagatcgtactcgatgaagatgtcgaggaacgacgaaacgttgcccagcgacattgcggcgccgtcctgctccttcacggcggcgaggtaggccatgtagacccactgtacggcctcctgcgccgagtgcgccggacggctcaggtccagtccgtagtattcgcccatcgtgcggatctccttgagagccttgatctgctccgcgacctcttcgcgcaggcggatgcgggcgtcggtcatcgggccggtcaggccgcgcaggtcctcggtcttggcttcgatcagccggtcggtgccgtagagggccagacggcggtagtcgccgatgatgcggccgcgggcgtagttgtcgggcagacccgtcaggaagcccagcgaacggaacgagcggatctcctcggtgtagacgtcgaacacgccgtcgttgtgcgtcttgcggtagtgggtgaaaatatccttaaccttctcgtccacgtcgacgccgttctccttgcaggcgcgcgatacgacgttgatgccgccgaagggcttgatggcgcgcttgagcagctggtcggtctgcagaccgacgatcagctcctgttctttgtcgatgtagccggctttgtgcgaagtgatggtcgaaacggtcttgttgtccagcgaacggacgccgttgttggcgcgctcctcttcgagggccttgagacagaggttccagatgtgcttcgtgcggtcggtgggaccctgcaggaaggaggcgtcgcccacgtagggggtgatgttcgtctgaacgaaactcgtcacgttgatctccttgctccaaagtccgtcgataaaggttttgttcaattccataaattattattcgtcaaaatgagattaaaattgttttctttgggatgcgcaaaggtatgttatttttttcacaataccgaacgctgcgacgcattttcttaaaaaatcttaaaaaatacctgcgatttgtcggaccatatcgccccggagcgttttttctgcaggacggagtccttcggcctacggtttggcccctgctttgcagcgacgaatgctgaccgggatcgggcggcatcggcagcgtcgggcccggcggaccggtgccgccgcagattccggcgggccgatatgtgcgaccgatgcggcggaatacggcccggaggtctcgaacgcgcatcttgccttcgggtcccgccgcagttttgccgggacgggtgtatgctgtttttccggggcgggtgtatgttgcggacctttgctggtttgccgggacggatgcacgctgttttgcccgacaggaccttcgctgttttgcggggtggatgcacgccgttttgccggggcgaacgctcactgttttgtcggaccgggcgcattgaccggaatatttcgtacctttgtcccggaagccgtcccgtgtttctggcgccgcacccgctaagatgcaccccgctaagtgcccgcagagatgcgtgcccggcatgatgccgcttcggccctgcctgaacgctctgcggccgcggacccgaagcggcaggaaacggcgaccgtaattccgcaaaaccgattcgtcatggaagaactgactcttacgacccccgcactgctcttttcggccgtctcgctgattctgctggcctacaccaaccgttttctgtcgtacgcccagctggtgcgcacgctcaaggagcagcacctccagcacccctcgaaagtcacccgcgcgcagatcgacaacctgcgccgccgcctgcacctcacgcgcacgatgcagattctgggcgtttcgagcctttttctctgcgtggtgacgatgttcctgctgtatgtcggatttttcgtcctttcggcctatgtcttcggcgcggcgttgctgctgctgatcggttcgctgggcgtgtcgatctgggaaatccagatttcggtccgcgccctcgaaatccacctgcacgacatggagaaatagccgtaataacgaagatgccgcgacctcgcgtcgctgcatctcccactaacctacttatgtaacctaaaaccaacttggaaaacctcgtccggttttcacactgcaaatatacggggccgtcgttactttgaaatgacggccccgttacatttccgtttcacgggccggaggacattccgccgcaaaaccccggcataccgggaaccgcaggcgcgtggccggacgcggacagtgcggtgcggccggacaggcatgcggagatgtgcggttcctgcaaatgaaagggctcggaatttccgtctccgtttttcgcccgctttccggaagtgccttttcggattaaaaaggcgcatttccgtcggtttcgggtttttttattaatttagcggagtgaaaacggtgtgcgccggcactccggtccggcccgtttcccgatcttcagcgatgctcagacgtttgttcatattggccgccgtcgtgtctctcggacttcctgccgtccgcgcgcaggagggtgcggcttcgcatgccgcggtgattcaggccgatacgctgccggtgctgctggaacggctggaacgggaccctgaggacatagacctgctggtcgaaatctgctcccaatacaccatgcggagcgaattcgccgcgattcatccctacgtctcgcgtctccgcagggccggggccgcacacgacgacgagcgtgcgctgatgtacgccgacctcttttccggacagtcctacctgctcgccgagggtagcgactcgacccgcatatacctcgaccgggctttgatccgcgggcggcagtgcgaagacccggtggccttgtgccggatttacaatgcgctgggaatctatgccgtcagcatcgaaacgaactatttcggcggcatcgagtatttcctcgaagcgatgaagtacgcccgcagcgcctcgctgaaccgcttctatctggtggcgcagtgcaatcttgccaatacgtactacatgcgcaacgaccccgcgggtctgaaatacgccgaggaggtctatcggctgggcaccgagtggggttacgactacctcgctttcggcggtgcggtcatcagcgcctacatgcactacatgctcggcgatcagaaccgggctttggaatacatcctccggacgcttcccgacaccgataaattcggctaccacaccgagctttacagcctctacgccaatatcctccatgcgcagggcgacgatgcgggcgccgaacgctattacctgatggcgctcgaccacatcgaccaaaaggtcgtgaccgctgccgtgatgacctacctcagctacggaacctacctgaacgaccggggcgagtacgcccgtgcgattccggtgctccggcagggcatcgaactctcggagcggagcaacaacgccgtgcaccgctataagctttacctgcgtatctccgaggccgagaccgcgctgggccgctaccgcgaggcgctggactatttcaagagctaccatagtcaggcggacagcatcttcaacgtcgagcgggagcgttcgatcaacgaactgcgggtcaggtacgacgccgaacggcaggagaacatgctgcgcaagagcgaaatcgacctcatccgccagcagcgccgattccagctgctgctgttgctgctgctcttcgccgtcggcatctcgacggtggtctatatcctctaccggcgcaaggacaagatgtacaagcagatcgtccggcagcagtacgaattcctgaaaaaggagaaaaaggccgcgcagccggccatacccccccccggccctacctccccgcagaccgaaaagccgtcgcccgaccgtgacgaccacgccgtgcgcgacgccgaactcttcgcccggatcgagtacctgatgcagaccgaaggcgtctaccgccagaacgacctgaccatcgaacggctcgccgagcggctcgacaccaaccgcacctatatctcccgtgcgatcaaccagcaggccggaaagaccttcagcagctacgtcaacagctaccgcatcgacgaggccgtgcggcggctttccgacgtcgacgacgatacgccgctcaaggcgcttgcccagacgctcggctacaaccatctgcaaaccttctacacttcgttccagagcgcgatcggcatgccgccgtctaagtaccgcgagaaactgctcaaactccaccgcgagcaccagctctgaacgcaaccccgtttttcggggtttgttttttttcggaatttgtcaatttttacgaattccgaaaaagagcgtttcataaatcgtccggcttcttttacttttgtcaataggttagtgaggggcacctgcccggtgcggcggtgcgtatcctttggttgttttgcttggcggatgcctgttttgcgcaggcggtgccgccgccgaatcccgacgtattcctttaaatgctgttcatatgaaaaaaactttactattcagcagtcgattcttgctgactgcggccttgttcttctgcgccgcttcggtcgtctcctgccagaaggagccgaccgccgaccccgcgcctgcgcgcgccgcgatccgtctgaccgccgagccggcggatatggtccggaccaaaagcgagacggacgtcgcttacgcttcccgcttcgtggagggggacgccatcggcctcttcgccgtgatccgctccgaagccgaaacgcaggcctatccggccgcttcgggcaactatattcagaatgccaaattcgtccgtcaggccgacggttcgtggcgtgaggaaggctccaaatcctattacatggagcaggggcaggtcatggacctctatgcctattatccctatgctgaaaatgccgatcctacggcgctcgtctacgacgcttcggttgccgaagccgacttcatgacggcccgcacggcgggattcagcgagcgcgacggcgagatcagactcgtattccgtcataaactggcgctggccgaagccttcgtcgcggacgccgacaaactgaccgattacgccgtgacggtgcagaacgtgcgcacgaaagcggtgttctcgctggcggccgcggcccaagatgccgaaatgcagtccgtggacgccaagacggcttcggtggcgatgacgcgctgcggcaacgctttccgcgcctacctgccggcgcaggagatcgccgaaggcaaggccctgctgaaggtcgagggcaacggcttcgcggctttcgactacacgcatccgggcaaaacctcgctggccgccggtcaggtccgcaaactgctggttacgcccgctttcgcaaatcctgaactgctccccaactgttacgtcgtgtcgccgggcgagacgctctacattcccgtttgcaaagccttcggcgtctgggagaagaacgaagtgctggcgggcgccggcaccggcatgctgggagccatgggcgcccgcgtagtctgggaggacgtgcgctatctgctcaacgacgatcagatcaccgtgctgggcagcggctcgaaggccgttattcaggtgcgcaccacgccccggacctgcggcaatgcggtgctcgcgctggagatcggcggcgagatccgctggagctggcacctctggatcaccgattacgatcccaacgctcccgaagcgcagaaatcgaagaacggccggaccttcatggaccgcaacctcggtgcgatgaacgccgaatacggcaatatcgatgcgctgggactccagtatcagtggggccgcaaggacccggttccgtgtcctgcgaaatgggaggacatcgctacgcgccccgtgtggaacggcgtgggcgtcaaggtcggtttctcgaccaaggccaattctgccgtgatccgcgacaacctcgtggcttcgatcaacgagccgctggcgctcatcaagggcctcggccttccctacgactggtatgctaccgagaaaaaacaggggcagaaccgctggtgcgccgccgacggctcgaaaaccgagttcgatccctgtccccgcggatggcgggttcccgtgtccggtttcggaaccttgtcgccgtggtacaattgtgttactgccggcatcccgtggctcaacggagtgatctgggaggatctgggctactggcccgcggccggtttgctcgaatccagcggccagagctatctgggcctgttcggctactattgggcggcgactcccggtgaaaacctgagccccggcatttcgcaggaggagtgcgcctacgggtacaacttcgacaaccagcattctcagaccagctacctccagtaccgtcataccgttttgtcggtgcgctgcgtcaaagtgcagtaattcgatgtctcacgctttaaaaagataatcaccatgaaatatacaggttccatccatacgacgttttatgcgcttctggccgccgccgcgcttacggccgccggctgcagcgacgacgataacgaaaagggcggaggagcgactggcgtcaaggcgaacttctcggccgaaatcaccccttacacccgtgccgccggcgacacttggaccaacggcgatgccgtcggcatctatatgctcggcggcgatgcgggcacggcggacaacgtgcgctatacctgcgaacccaacggacggctgtcggccgcggatgcgaaaatcgtcattcccggcagcggcactttcgatttcgtcgcctatcacccttacaagcagagcagcctgagcggcgatgcgggtaagatcgacggctacctctatcccgtcgtcctgaacgaccagaccgatcccgcggcgatcgaccttctgtggagcgacaatgcgaccggggtcacggccgccgcgcccgacgtgaagttcaccttcgaacacgtgctgtcgaaggtcgaaatcgccgtcaagcagggcggaggcatctcggccgacgaccttgccggggttgtcgtcaccatcgacggcgtctacaacgagggcttcttcgccctgaacagcggcaggatcggcaatacgggcgttcccggtgccgtgacggcgcgcgccgtcaccgagggcgtcagctacgaggcgatcgttctgccgaccaccggcgccgcgcagcagggccgcgtcttcacggtggaggctcccctgctgggacgcacctacacatggacgatgcccgacgactatcttttcgtgggcggcaagatccacgagatcgaaattacggtcgacgtggacggcatttcggtcgtcacgggcgacattgccgactggaacggcggtgattccaatcccgaagtcgagaccgacgatgccgaattcctcgcgcttcccaactcctatatcgcccgtccgggttcgacggtgacgattcccgttgccaaggcctatgccgcatggcacaatatcccgatgcttcaggaaggctcgttcagcattcccaacgacctgaccgcccgcatcgtatggcaggagcgtttcgatgaagacgaaaccatcctgttctcgaccaacgacaaggtcacgatgaccggatcgggcatcaacgccgcaatcgaagtcgtcttgaatcccgatgtcgaaggcagccttgtcgtgggcgtgtacgacggcgacggcaactgctactggagctggcatatctgggccaccgagtacgatccctcgcagcccgcagggcagcagaccgtcggcggcaacgtcttcatggaccgcaatctgggcgccacttcgctcgtgaaggggccgcagagcgccggatgtttctaccagtggggccgcaaggatccgttccaaggtccctatacgtggatgatgttcctcaatgccaacgccggctggtcgaacgacggtatcggcaagttcatgacgctcaaagggcttgcttcgacgaaggttccctccgagaatctcgtggcttcggtccagcagccttaccgctatattgtgggtatttccggaacgcaggactggctgtcgccggatgtcggcggcgaagcctaccgctggagcaacgccgacggtacgaaaggcgtcttcgacccgtgccctgaggggtggcgcgtgcccgtttcgggtgcgggagcggcttccgcgtgggccgatctgaacggcgtgtgggatgcggagcgtaccggatgcgtttttgccgaaggcaacggctactatcctgcggccggctatatcaatatcatgtcggcgtcgggttcgggcggcggcgcggaagcgggtacttcgggctactgctggagcgcatcgtcggccggccggaacggctatgcgctgacttacagcgtctccgccatcaaaaccgaggccgaactgaccaaggcgtgggcctgccccgtccgctgcgtgaaggatgtcaaataacacgcggatataggaagaagaccgccgccctttcgtggggcggcggtctttgttttggcggccgtgcggtgtttcccgaccgctgttttctgtgcggtgttttctgtgcggtgttttctgtgcggtgttttctgtgcggtgtttcccgttctgtgtttcctatccggtgttttccggccgctgtcttccgttcgtccggtccggaattctccgcaggcctgtcttctgccgcgcctattttctgctttcgaggaagtagtgctgcgacttgagcaggttgcgggcctgcaggatcatcgtcttggtttcgttgaggatcgtcagatagagtacgctggcccgcgtgctggctgccgggtcgccgttgatgcggcgcagctggttcttgatcgcctcgacgatggtgtcgaagagcttgtcgcgcatttcgagcaccatgtccagatccgaaaagtccttcgtgcggagcatgtcgttgattttgtcgaaaatcgcctccacctgatcgtttacgcgcatcagatccacgatctgctccttcgacagcccctcgtggttgttgtcgatgtgtccgaacgcaggacgggtgatgtggatcagcgccttggtcacctccgagaggtaatccaccacctgcacgtagaagtgcccggtgtcgatgtcgcactgctgcaggcggcgcagcgtgggcatgatgccgtacttgcggtcgcgggcctcttcgaagagcctgttcgacgactgcaccatctccttgagcaccttgcggttctccttgaaaacggcgaccagcgtccggttgtaaatgcgcgtcacctgctccatcgtcgtgcatacttcgccgatgcagacgcagagcacttcgtccggggtctcggccttgattaccggcagttcctccgcggcggctttctcctccggcttggtgcggtggctgcggatgagcagccatgcgcagagagcgacgagcgccgtgacggcgatccagccgccccagagcagcagcagcgtcacgcagagggcgatcaggaatccgccgagcgcggtgatgaaccaccccgaaatgacggccatgacgcccgtgatgcggtatacggcgctttcgcggccccacgtccggtcggcgagcgatgaacccatagccaccatgaagaccacgtaggtggtcgagagcggcagtttgtaggaggtgcctatggcgatcaggatcgaggcggccgtgaggtttacgacggcgcggatcatgtcgtagggcgccgacgaacgctcctcggcgggcagcggttcgaagcgtcggtcgatgactttctgcatgcggtcgggaatcagccccgtccacatggtgttgagcgcgagcgaggcgcgtaccagactgcgcgatacgaaggtcgagccgaaccgctcgtcgccctcgtgctgcgaggcgagcgaaagttcggtctcggtgacgtggcgcgatttcttcgagaagaagagcgtcaggaccatcactgcgcccgacagcaacagcagcaggaagttggcgcgcgccggattggccagttcgcccatcatgatcgactcgctgcccgtttcgcgggcgatctgccatgcgtcgtagctggccagcggcacgccgatgaagttcaccagatcgttgcctgcgaaggccagcgccagcgcgaaggtgcctgtgaggatggtgatgcgcatgatgttgagccgcatgcgctggaaaatccagagcaccaccgacgctccggcccagaagacgagcagcgttacgagcacgtgctcgccgacgtactccccgaccgaagtcggaatcagccccgaacttttcagccccttgaacagcgcgaagtagaggattcccgccagcgagatgccgcaccatacggcgccccagcggcggaacgcctttgcgtagcggaacgagaagatgagccgcgaaacgtacatgaagagcgatcctgcggcgaacgccagcgccaccgagagcaggatggccgcgatgatggccattgcctttccggtgttgatgtactgcgagaggtccgaaaccgaagcggccggatcgccccagatgtggtagagtgccgcggcgactcccgcgcccagcagtccgaataccatcgacacggtggtcgaggtgggcagtccgagggtgttgtaaatgtccagcagcaggatgttgcccagcatcatgcccagaaagagcatcatgatctccgggaaggagaattgtccgggatagaagacgccgctgcgcgccacctccatcatgccgctcgacgtgagcgtgccgacgaggatgccggcggcggcgatccagaggatgacgcggcgcggtgcggctttcgatccgagggccgagttgagaaagttgaccgcgtcgttggccacgcccacgacgatgcccatcacggccagcaggcccatgacgatgacgatgcttgtgaatagaggactcatatggtcgtttgtcgtttgtttttcggcggttccgttttggcgctccgccgtgtgttttcgtccggccctgcatccgttttccggaggaggctttcgcccgccgtcttgggcggagatcgccgccctgcggtgcgggccggtctttccggtgcaaaggaacgaaacggatgttacaaacgtgttacggacgggttgcggctctatgaatgtttgcgcagggtgaaggtgaattccagtccgccgcgctccgagttgcggaccgagatcgtgccgccgtgcattatcacggcgtttttgacgatcgcaagccccagccccgtgccgcccagcttgcgcgaacgccccttgtcgatgcggtagaagcgttcgaaaatgtggggcaggtgttcttcctccacgccgatgccgttgtcggagaactgcagcgtgtactgctccggcgagtcgtccaacaggcggatgaaaatgtcgcgtccgcccgaataggccgcggcgttgtccgcgaggttgcggaacaccgaacccagcagcgagggactgccctccatttcgagcgggtaggggaagtcgcagttcacgcgcagccgctgcccttcgggccggagctgcatgtcggcgcggatttcgtccacgatgtcgttcagcacgacgcgctccctgaggatcagctggctcgcctcgtccatgcgcgtgacggtcgagatgtcggcgagcagactgcgcagccgcgccacctgcgcgcagctcttttcgaggaacgccgtacgcttctccgctccaagccccggattgtccagcagggtttccagatacccctgaatcgccgccacgggtgttttcagttcatggttgatgttgttcgtgagttgttttttgatgcggatcttttcctgctgttcgtgcagcgccagcgcatgttcgcggtcgcggtcggccgtggtgcgctgcagacgggcgtacagccggatgatatggctcgatatgtcgcccagttcgtcgtgcggaaagaccgcctgctcgtcgatccgctcgccccgttcggcacgctgggcgaaatctctcagccgcgtgatgttgtgtcccagccggcgggtcgtgaagtaggccgccacgctcatcagcagcgtgacgcccagcatgaaccacagaaattcgcggtctgcggccagcacttcgcggagcgttatcgaatagggcacagccgagcggacgacgaccccgccgtcggacatggccgaatagaaatagtagaggtcggtgctctccgaatggcggcggatcgtgaatcccgtgccgcgggcgagggcttcggcgacttcggggcggtcgaggtggttggtttccggaaggctgccggccgaattgtcgaaggtgacgcgcccggcgtcgtcgatcaccgtcacgcgcaggtcgccgaacggttcgtcgcgtgcggcgatgaactcctcaggcgtcgcgccgtcggcgagggcgtcgagcatccgcaggttgaagagctgcaggcgggtgtcgagccgttcggccttgaactgcttttcgcggccgtactgaaagacgatgaagcaggcgaccagcgtccacgaaaatgcgagcagcagcaggaagagccgccggtggtaggagaggctactcctcaaacccgtacccatagcccagacgtgttacgatgtggtctccgtagacgccgattttgcggcgcagccgcgtgatattgacgtcgatggtgcggtccagcacgatcacctcgtcgctccagacctgatgcagtatctcctcgcgcgaaaagattctgccgcggttcgaaagcagcagggcgagtatttcgaactccttttttgtcagggccagcggcgttccgtccacggtgcagattttgcgggcgaggtccatgtgcagcccttcgaacgcgatcgccctgctctgtcccgcttcaggtgcggtgcggcgcagtacggagcgcacgcgggccagcacttcgcgcacggagaaaggcttggcgatatagtcgtcggctccgatgttgagtcccgcgaccgtgtcgtcctcggtgtctttggccgtgcagaagatgatcggcactgcggccgtttcgggctgcgcccggagcagccgggccatcttgaatccgctcatctcgcccatcatgacgtcgagcagaatcagcgaataacgttcggggtgcatgccgagggcctgttcggcgctgtacgccgtatcgacttcgtaaccctcgacttcgagattgaactgaagaatctcgcagagggattcctcgtcgtccaccacaaggattttgtgctttgtcataactgttacggattggtatccgcatcaaaagtacgtaacaatccctttattgcgtggtccccgccgaatatttaaccgaaatgtaacagcccgtcattcgcccagcacctgcatctgctggcggatcgactcctcgtggatggcctgcagcaccgagcgcatgaattcgcggtccatgcccagctgtacggcctgctccgcgcgtcgcgccagcaggtcttcgtaacgtttggcctgcaggatcggcatgttgtgctctttcttgtactgtccgatgtcgcgcgatacccgcatgcggcgcacgagcagttcgagcagttcgtcgtctatcttgtcgatctgcgaacgcagttccgaaaggctctccgtcgtggtgttggcttcgcggatcaccagactgcggcagatgtaggccagaccctgcggtgtcacctgctgggccttgtcgctccacgcgcagtcgggcgaacagtgcgcttcgacgatcagcccgtcgaatccgaggtccatggcctgctgcgaaagcggcgcgatcagttcgcggcggcctccgatgtggctggggtcgcagaagatctgcaggcccggcaggcggcggtgcagctcgatggggatcgaccacatcggatggttgcggtagagactcttgtcgatcgacgtgaagccgcggtgaatgactcctagacggcggatgccggcgttgtagatgcgctccacgccgccgatccacagttcgaggtccggactcacggggtttttgaccagcaccggaatgtcgtggccgcgcagtgcgtcggcgatctcctgcatggcgaagggattggccgtggtgcgggcgccgatccagatcatgtcgatgcccccttccagtgccgccatgacatgcttgcgcgtggcgacctcggtggcggtgtacatgcccgtttcgcgcttcacgcgccggagccatgccacgccttcggcgcccacgccctcgaaccctccgggtttggtgcggggcttccaaagtccggcgcggaaaatccgcacgccttcggcggccagttcgcgggcggtttcgatcacctgctcttcggtttcggcgctgcacggtcccgcgatgaccagcgggcgccggggatcgagtcccggaaaattgatgggttgcaaatctttcatatcagttctgtttgaattattgtcgtttgtcttgtctctgtcttttcgcgtcattcgcagcctgccgccgcgtttgcgtctctgtccccgcctgccgcgaaaatcgggtcctatgtccttctgttcagatttcgggattgggatattcggcgtattcgcccagaatccggaagtcgctggtcagcggccgggccgcatcgaccgcctgccggtaccgcaccgggtcgtcgaaggtgacgtccacgtaaaaccggtattcccattcgcgtccgatgatcggcagcgactgtattttcgtgaggttgattccgtagaaggataacagcgtcagcactttcgagaggctcccctgcgtgtggggcagcgtgaataccaaagacgccttgtcggtgcgggccggatcggtgaattccgccgcgcggctgcggtcggccagtaccagaaaacgggtgaagttgtgcttgttggtctcgatgccgcgttcgaggatttcgagtccgtagagttccgcggcttcggcgccgcagatggccgccgtgccggcgagccgctggctggcgatttcgcgggcgcttcccgccgtgtcgtcgcgctcgacgactttcatcgcgggccgggccttgaggtattcgccgcactgcatcagggcgatcgggtgcgagtgtacctcgcggatgtcggcgatttgctgtcccggaagcgccgccagcacgtgcgagatgcggagcttgtactcgccgatgaccgtcagcgtgctgcggcgcagcagttcgtggttaggcagcaggcttccggcgatggtgttttcgatggccgccacccccagcagctccgcgtcggccgccatgcgggcgaactgctcgtcgaaactcgcgcagggcagcacttcgacctcttcgccggggaaacttccgtgcgccgccgtctcgtggaaacaacccgctatcccctgtatcgttatccgtttcatcttctgaatcgcattaaaaaatcccgctcttctgcagaacgggatccttcgtgttttcactctattgttttatacagttaattgcatgccatcccgcttcttcccttgctataaaagaaaaagtaaaagaaataatatgcaaaaccgtaaagtctcattgtctccttggtggattaacctctggcaaatgtagtgaaatattcccgaaatccaaattttcagccctgttttttgcctgccgcggccagtttgcgctccctgaaacgcttcttgaactgctggcggcgtccgaacagaagcctgaaaaacgtgccccgcagcagtgtgtcgtccatatcccactgccgcgtttcggcgtagcggtcgaggatgtatagaaacgccacggccgggcagctcagccgccgcaggttgatcatgcattcgtcggggcggagcggccgccggaggaatttcatgcggtttatgtcgatcagctggaaatcgtagcgtcccgtcgcctcgtcgtgccgccagaggatgttggtctggttgaaatcctcgtggcagatccctttttcgtggagccggacggtgaaacgggcgaatgcttcgagcacgggcagcgaatcggaggtcgggaaccgttccgtagccgccgtgagcggtgcgtagtccgaccggcgggatacgaaataggtctccgttatcagcccgttgcggcggtattcgctccatgcgacgggttcgggcgtgtcgatttccagctcgcgcaggcgcagggcgtgttcgtaggcgcgccgggccttgctcttgcggaaaaacgagtacatgacggcattgaacgcgctgggccgtttgtaacgcttgaccacgagccgttcgcctccgatgtcgaaggcgcggatttgattgcggccgtcgtgaagcacttcgcccgacaccgggaaaagttccggaagctgccggacgaactgccgcaggtgttccatgccgggattgaccgtaattttcatgtccgtattcatttacacggcaaagttacggcaaacgatcggcttggatagtccattttgggcgcagtattggctgattgggcggcaatcgggcttcggattgtttgttttgtcgcttttcgtctgcctgaagcgaccgcccttccggagacttccgcatggaatgcggcgtctcggcggccggcggaccccagcgtgcctccgcatttggcgtctcggcagccaagcccctccccggcctgcatctttcgcattgggcatctccgcagccggcggaccgctgccatccgctccacctgttccctgccggtcttcaggcctttccgccgaaatgaaaaaaggattacgtgacaccgtaatccttgctttgcgagctgttgacgaggattgaactcgtgacctcttccttaccaaggaagtgctctaccactgagctacaacagcaacatttctcattcgagtggtgcaaaagtacataagaaaaatgaaaagaccaaaaatttgtgcggttttcacaattattttctatctttacttttgaattataactctaaacccatgaaacgtatactgataataggcgccggaggccagataggttccgagctgacggtttacctgcgcaaaatctacggcgaccgcaacgtcgtcgccaccgacatgcgcgaatgcaaggctctcggcgaagcggggcctttcgaagtgctcaacgccctcgacgctacggccatggcctcggtggtcgcccgttaccatatcgactcgatcttcaacctcgtggcgctgctctcggccgtcggcgagcgcaatccccagatggcgtggaacgtcaacatgggtgcgctgaacaattcgctcgaagtggcccgccagcaccactgcgcgctcttcacgcccagctcgatcggcgccttcggccccacctcgcccaaggaccggaccccgcaggataccatcatgcagcccacgacgatctacggcatctgcaaggtcacgggcgaaatgctgggcaactactaccaccacaaatacggcgtcgatacccgctcggtgcgttttccgggcattatttcgagcgtcacgctgcccggcggcggcacgaccgactatgcggtcgagatctactacgaggccatccgctccgggcggttcacctgccccgtgccgccggacgtctatatggacatgatctacatgcccgacgcgctgcgcgcctgcgtcgaactgatggaggccgatcccgcgaaactcgttcaccgcaacagcttcaacatcgcctcgatgagcttcacgccggagatcatctgcgccgagatcaggaagcgtctgcccgatttcacgatggattacgacgtcgatcccgtcaagaaggagatcgccgagagctggcccaattcgctggacgacacctgcgcccgcgaggagtggggctggaaacccgaatgggacctttcgcgcatgaccgacgacatgctggcgcacatccggacgaaactggctgccgaatgagtctgtccggcggccgaccggcggtaacgcgtgtcgccgagaccgcttcgagctgggacggcgcgccgcttccggcctatccggcggggcagccgcaggtgacgattctccgggcgacgattccgccgcatgcgacgctcccgcggcacacgcatgccgtcgtcaatgccggcgtgatcctccgcggcgaactgaccgtggtctccgacaacgggacggagcggactttccgcgccggcgagggtatcgtggagctggtcggcacggtccattacggcgaaaaccgcggcgacggggagaccgagatggtgatgttttacgccggaacggagggcgtgccgctctccgagagtgcggatctataaccgaaagttatgacgacgagacgaattacgcggaccatagccctttttgtgctgttgctgacagctgcggttatcggcgggagtttctacatgctcggcttctcgctgcgccccgaagagacgatgcgggcgaaaaatgccacggcctatgaatatatgtacgccgagtatcctttcctgcgtccgtggacggacagcctcgaacgggccggagcgctgcgcgatacggtgatcgtcgatccgcagggcgtgcggctccatgcgctctacgccgcggctcccgaaccgaccgaccgcacggccgtcatcgtccacggatataccgactgcgccgtgcggatgctgatgatcggctacctctataatcacgacctgcgttacaacgtgctgctgcccgacctgcactaccacggccggagcgaaggccgggcgatccgcatgggctggctcgaccggctggatgtgctgcgctggatggaggtcgccgacaccctcttcggcggcaatacgcagatggtcgttcacggtatctcgatgggcgccgccacgacgatgatggttgcgggcgagtcgcagcgcccctatgtgaagtgttttgtcgaggactgcggctacacgagcgtctgggacgagttctcgaacgagctgaaaacctcgttcggacttcccgcatttccgctgatgtacactgcgagctggctctgtgatctaaaatacggctggaatttccgcgaggcttcggcgctggcgcaggtggccaagtgcgaacttccgatgctcttcatccacggcgacgccgacgattacgtgcctacgtggatggtctatccgctctatgaagccaagccgggcgaaaaggagctgtggctcgttcccggagccggacacgcctactcctaccgggacaacagggaggaatacaccgccgtcgtccgggagttcgtcggaaaatacgtccgctgattccgcggccgcccggtccgtgctggagccgtaaccacctcggaccgcatggacttcgatctgtcgcaggagaccggtccgccgatccgggaacggggctgacccgacaacggtgcagtcctcaaagcggccgcagctctgaaaacggtgccggacccgaaagcggctgcggtcccgacaacggtgcgccccgcatgaaatctcaagaggctgtctaacaattctaacttaggcagcctcttttttatgtttgcaaataatataaccatcagccgt

SEQ ID NO: 12049 - DNA, 1031 bp, Unknown
  gut microbiota DNA sequence
cgtcggtgaagtggtacacgccctcgttgcccgcgtagcgttccgactcgatgatcgagaagatcgcaagcgccaagtccccggcgtaggtcggagtgccgatctggtcgaagaccacctgcagcgtatcccgctccgaagtcagacgcagcatcgtcttcaggaagttgtgtccgtactccgaatagagccacgccgtgcggaagatcagataccggcacccggatgccatgacggcgcgttcgcccgcaagcttcgtacgcccgtaggctcccagcggcgagggagccgtatcctccctgtagggcgtatgggccgtgccgtcgaaaacgtagtccgtcgagacgtggaacagcgtcgcgcccgtcgccttggccgccgccgcgagattgcccgcggccttgtggttcagcaggtccgcacgcggttcgtcctcctcggcccgctccacgtcggtgtaggccgcgcagtttacgataacgtcgatgcgccgctcctcgaccgttcgcaggacggcagccgcatcggtgatgtctagttccgcgacgtccgtacagaagtagttgtggggcgagacgccgccaagacgccgcagggcgctgccaagctgaccgttcgcgcccgtaatcagaatattaagcataatagtcttcgttatagtcgaacagttccccggcctccgacagcagcgggtgggcgctgtccttgggcgagaggacgacatcttcgggggccagacgccagtcgatgcccagcgaagggtcgttccatgcaatggcgccctccgattcgggggcgtaggggttgtcgcacttgtattggaacgtcgcttcgtcgctcagcacggcgaagccgtgcgcaaagccccgcgggatgaagaactgacgcttgttgtcttccgtcagctccaccgccacgtggcggccgaacgtgggggagccgcggcggatatccaccgcgacgtcgagcacgcggccccggaccacgcggaccagtttcgactgggagtaccgccctttctggaaatggag
